United States Patent Application Publication US 2006/0150283 A1 - sequence listing, part 5

SEQ ID NO: 15647 - DNA, 758 bp, Zea mays subsp. mays
  misc_feature (1)..(758): Ceres Seq. ID no. 13493495
  misc_feature (1)..(758): Ortholog of  Ceres SEQ ID NO 15176514 as cited in SEQ ID NO 1114
  misc_feature (1)..(758): Ortholog of  Ceres SEQ ID NO 15173688 as cited in SEQ ID NO 61918
  misc_feature (1)..(758): Ortholog of  Ceres SEQ ID NO 12778345 as cited in SEQ ID NO 62792
  misc_feature (1)..(758): Ortholog of  Ceres SEQ ID NO 13662513 as cited in SEQ ID NO 63303
  misc_feature (1)..(758): Ortholog of  Ceres SEQ ID NO 12616929 as cited in SEQ ID NO 63962
  misc_feature (1)..(758): Ortholog of  Ceres SEQ ID NO 15225803 as cited in SEQ ID NO 67623
  misc_feature (1)..(758): Ortholog of  Ceres SEQ ID NO 15174088 as cited in SEQ ID NO 0
atcaaccctaaaccacccactatacccacccgcccggctagggttttgccaccatggccgccgccgcggccgccgcccggaggctcctctcccgccgcgcctcctcgaactcgctctccgcgttcctccgccgcggcgctgccccggagcagtcgctgctgcgcccggccgtcgtcgcggcggcctcccgcctcggcttcccgcgcgggatggcgcggcggcctggcggggacggctacggcgcgggccgggaccgcgcgcccacggagatggcgccgctgttccccggctgcgactacgagcactggctcatcgtgatggacaagcccggcggggagggcgccaccaagcagcagatgatcgactgctacatccagaccctcgccaaggtcctcggaagtgaggaggaggcgaagaagaagatctacaacgtctcgtgcgagcgctatttcgggttcgggtgcgagatcgatgaggagacatctaacaagctcgaggggctccctggtgttctctttgtgctaccggattcgtatgttgaccctgagtacaaggactacggagctgaactgcttgttaacggtgagattgttcagaggcctcctgagaggcagagaagggtcgagcccgtgccacagagggctgcagacaggcctaggtacaatgacaggacccgctacgcacgcaggagggagaaccagcgatgagatgaaaaaagtccacaataacaagttcaggtggtttgagctctgtaattc

SEQ ID NO: 15648 - protein, 217 aa, Zea mays subsp. mays
  peptide (1)..(217): Ceres Seq. ID no. 13493496
MAAAAAAARRLLSRRASSNSLSAFLRRGAAPEQSLLRPAVVAAASRLGFPRGMARRPGGDGYGAGRDRAPTEMAPLFPGCDYEHWLIVMDKPGGEGATKQQMIDCYIQTLAKVLGSEEEAKKKIYNVSCERYFGFGCEIDEETSNKLEGLPGVLFVLPDSYVDPEYKDYGAELLVNGEIVQRPPERQRRVEPVPQRAADRPRYNDRTRYARRRENQR

SEQ ID NO: 15649 - protein, 165 aa, Zea mays subsp. mays
  peptide (1)..(165): Ceres Seq. ID no. 13493497
MARRPGGDGYGAGRDRAPTEMAPLFPGCDYEHWLIVMDKPGGEGATKQQMIDCYIQTLAKVLGSEEEAKKKIYNVSCERYFGFGCEIDEETSNKLEGLPGVLFVLPDSYVDPEYKDYGAELLVNGEIVQRPPERQRRVEPVPQRAADRPRYNDRTRYARRRENQR

SEQ ID NO: 15650 - protein, 145 aa, Zea mays subsp. mays
  peptide (1)..(145): Ceres Seq. ID no. 13493498
MAPLFPGCDYEHWLIVMDKPGGEGATKQQMIDCYIQTLAKVLGSEEEAKKKIYNVSCERYFGFGCEIDEETSNKLEGLPGVLFVLPDSYVDPEYKDYGAELLVNGEIVQRPPERQRRVEPVPQRAADRPRYNDRTRYARRRENQR

SEQ ID NO: 15651 - DNA, 1973 bp, Zea mays subsp. mays
  misc_feature (1)..(1973): Ceres Seq. ID no. 12366695
  misc_feature (1)..(1973): Ortholog of  Ceres SEQ ID NO 14308370 as cited in SEQ ID NO 55399
acatatgagtatatgacatatccccactctagccaagtagccagtcctctctccactctcctctcgcaccaccaaaaaaaccggccccaccgttcgccatgagctccgaagcagaatgcgcagctccagccgccgccgcgccggatggggcgggcggcggcagggtggagatcgacacgtccgcgccgttcgagtccgtgcgggaggccgtcgaccggttcggtggcagcgccgtctggagctccgacctcgtcaggcgcatgttcgcgccctccaagaaacatgaacagtctgaccaagctgcagaggccatcaacgccgaggagcaggctgcacagctagagaacgagctggcagttaaagaaagggagactcttgatgtgctcaaggagctggaggcaaccaagaagatcatagcagacctgaaactgaagatacggaaggaagccactgaaacatcccctgaagaggctgctgaccaggtttctgaggcgggagctcaacagcagaaacctgaaaacaccaacattgatgtggtggtggacatggaaggtgtagaggagaaccattcaggttcggttccggtggatctcgagcaggcgaaggcaaacctgaacagagctacatgtgatctggctgcggtgcgggctgcagtcgagctactgcgaaacagcatagcgaaagagaaagtgttgcttgaaagagcccgagagaagctctcctctgatacttcgtcggtttcttctttggaggatgacctggatcagacagcgcaaaagatggaaacgctgaaggatctgcagaggagacgcaaagacccctcagatatttttgtagagatcaagaaaatgaccaccgaggtgcagcagctcaggagcatggcagacgattcgaaatctgaggcaatggtgttggctgcagaaatcgagcaggtaaaggccagcatttgcacggctgaggtcaggtgcattgcagccaggaagatggaagacgccgctagagcagcagaggccctcgcgctggccgagatcaaagcgctagtgagcagcggaagttctttcgaaggagacaccgcttccgatggaggaggggtaactctctcgatggaggagtatttcaagctgtgctcccgagctctggaagctgacgaaagctccaggaggaaagtggagaacgcaatgctgcaggtagacgcagctgacgattcagagtccgagtctgtcaagaggctcgaggatgccagagtggaggtcgaggagtgcaagaaggcgctgcaagaggccctgaggagggtagaggctgcaaaccatgggaagtttgcggtggaagagattcttcgtagatggaaatctgagagcgggcacaagaggcggtctcttggtggctccccaagattcaaaagggcggcagctcaccgtcgcgaagattcgcacgccacggatatgatctctgatgcttcagacagaccacccaaaccaacattgtcgatcgggcagatactgagcatgaagctaatgggacctgatgggtacgacaagagtgtttgggatgacaaaacaggcgagataccggagatctcgctcggtcagattataaacaggagtggtgttctgtgcagagaggatgtggctgctcgcagaagaatttcggggaagaggaagaagtttgcattgactgggctttctgttctcctggccaagcaatcgaagaacaagaagaagagagaatccttttaagctggtacaagtcgtcccacaaatatcagtgctgtactttatagtcttgtgatatgcagttgtagttcaaccttgtcattagtagctggttatatcgagatattttgtatgaggaatgaggtagtatattttagttcctcatgttaaatgtaccggtagcgattatttgctgctaattagagtagcgactggcagttctctgctatgtatgctgttgaggtctacgtaattggaccc

SEQ ID NO: 15652 - protein, 545 aa, Zea mays subsp. mays
  peptide (1)..(545): Ceres Seq. ID no. 12366696
MSSEAECAAPAAAAPDGAGGGRVEIDTSAPFESVREAVDRFGGSAVWSSDLVRRMFAPSKKHEQSDQAAEAINAEEQAAQLENELAVKERETLDVLKELEATKKIIADLKLKIRKEATETSPEEAADQVSEAGAQQQKPENTNIDVVVDMEGVEENHSGSVPVDLEQAKANLNRATCDLAAVRAAVELLRNSIAKEKVLLERAREKLSSDTSSVSSLEDDLDQTAQKMETLKDLQRRRKDPSDIFVEIKKMTTEVQQLRSMADDSKSEAMVLAAEIEQVKASICTAEVRCIAARKMEDAARAAEALALAEIKALVSSGSSFEGDTASDGGGVTLSMEEYFKLCSRALEADESSRRKVENAMLQVDAADDSESESVKRLEDARVEVEECKKALQEALRRVEAANHGKFAVEEILRRWKSESGHKRRSLGGSPRFKRAAAHRREDSHATDMISDASDRPPKPTLSIGQILSMKLMGPDGYDKSVWDDKTGEIPEISLGQIINRSGVLCREDVAARRRISGKRKKFALTGLSVLLAKQSKNKKKRESF

SEQ ID NO: 15653 - protein, 491 aa, Zea mays subsp. mays
  peptide (1)..(491): Ceres Seq. ID no. 12366697
MFAPSKKHEQSDQAAEAINAEEQAAQLENELAVKERETLDVLKELEATKKIIADLKLKIRKEATETSPEEAADQVSEAGAQQQKPENTNIDVVVDMEGVEENHSGSVPVDLEQAKANLNRATCDLAAVRAAVELLRNSIAKEKVLLERAREKLSSDTSSVSSLEDDLDQTAQKMETLKDLQRRRKDPSDIFVEIKKMTTEVQQLRSMADDSKSEAMVLAAEIEQVKASICTAEVRCIAARKMEDAARAAEALALAEIKALVSSGSSFEGDTASDGGGVTLSMEEYFKLCSRALEADESSRRKVENAMLQVDAADDSESESVKRLEDARVEVEECKKALQEALRRVEAANHGKFAVEEILRRWKSESGHKRRSLGGSPRFKRAAAHRREDSHATDMISDASDRPPKPTLSIGQILSMKLMGPDGYDKSVWDDKTGEIPEISLGQIINRSGVLCREDVAARRRISGKRKKFALTGLSVLLAKQSKNKKKRESF

SEQ ID NO: 15654 - protein, 396 aa, Zea mays subsp. mays
  peptide (1)..(396): Ceres Seq. ID no. 12366698
MEGVEENHSGSVPVDLEQAKANLNRATCDLAAVRAAVELLRNSIAKEKVLLERAREKLSSDTSSVSSLEDDLDQTAQKMETLKDLQRRRKDPSDIFVEIKKMTTEVQQLRSMADDSKSEAMVLAAEIEQVKASICTAEVRCIAARKMEDAARAAEALALAEIKALVSSGSSFEGDTASDGGGVTLSMEEYFKLCSRALEADESSRRKVENAMLQVDAADDSESESVKRLEDARVEVEECKKALQEALRRVEAANHGKFAVEEILRRWKSESGHKRRSLGGSPRFKRAAAHRREDSHATDMISDASDRPPKPTLSIGQILSMKLMGPDGYDKSVWDDKTGEIPEISLGQIINRSGVLCREDVAARRRISGKRKKFALTGLSVLLAKQSKNKKKRESF

SEQ ID NO: 15655 - DNA, 1601 bp, Zea mays subsp. mays
  misc_feature (1)..(1601): Ceres Seq. ID no. 12373088
  misc_feature (1)..(1601): Ortholog of  Ceres SEQ ID NO 14311590 as cited in SEQ ID NO 51709
cacaacacaacacccctccctttccaggattctcctctcctccaaaagatcggtggcgggtcacgggtgagacgagaaggaaagaagctgacaaaggcgagaagggatagagagaggagagaaagggaaggtagaaactggacagaaagtttctccccgctagaagtagctcggcggtgagggagcgagagacctgccgcctacccttgccccaccgtttttttcataccgtctcgccggaatcctgctttattttcccggccagtccaccgccttctcgggctaccacgctgatccggcgtcgtctgcggtccttccgaccaactcttcaatcttgtgaattgcttttcgcccagttagggcagatcaccattccttgcaggagttcgttgccgtctctccaatcctccctggctcgactgctcagtggtgactgatgtggtccactgccctgccctgcacctgcaagttagtttcactcgtgatccgtcagcttgccacccagcaaccgctgattatcagaaatccacttctcaaagcttcaaggagcatccttcgaacaagttcctgattccttcgcctcccgccctccccgtttcttctctggcatccttgtccgttgaccacagagggaagaaatctgttccgggcaggcaggcgcattctccgccacaatggacgatggagctgacctcccctgccagttgctcttctcccacccggagatgcctcacagcttcgacgagttcttcagcagcgccacgaccacgaccacctgcacccacacgcacagctgcgaccctccgggcccctcggccgccatgcatacccacacgtgcctgcacacgcacacccaggtcctgggcagcggcggggaggacgacggctcagcgaagccgcggaggcccctgggaaacagggaagccgtgcgcaagtaccgcgagaagaagaaggcgcgcgcggccttcctggaaggggaggtcaagaagctgcgcgccgccaaccagcagctcgtgcggcggctgcaagaccacgcggctctggaggcggaggtggcgaggctcaggggcctcctgctcgacgtccggggcaggatcgacgccgaggtcggcgtgtccccgtttcagaggccatgcagcgcgggctctgtggagtgcggcgctgatccagctctgcgcttcgatggcagctcggaggtagtaggaggtggtggctgggagaagagctcaagccctcaagttgcggactgcaggatcgatgaagggggaggagggatgtcacgggaacttgatgttctagaagtttcggggcctctgccagcttctttgggctttgctttaaagataaattaaattattcatggatttaggagaatgaggaaccgacagtgagtagaactatcttcgcatcgctgtggtttatgtttcttatgctggtgttcagtgtgtatatatagggtacagaatactttcatatgagcactgaagaaatcgaaattgacaatgtttcatgcgaaattgtactgcgggtatgtaaatgaagtgcgcctgacttctgacttgtagcctgtttgtgcttagctgaaatattattaagctatt

SEQ ID NO: 15656 - protein, 225 aa, Zea mays subsp. mays
  peptide (1)..(225): Ceres Seq. ID no. 12373089
MDDGADLPCQLLFSHPEMPHSFDEFFSSATTTTTCTHTHSCDPPGPSAAMHTHTCLHTHTQVLGSGGEDDGSAKPRRPLGNREAVRKYREKKKARAAFLEGEVKKLRAANQQLVRRLQDHAALEAEVARLRGLLLDVRGRIDAEVGVSPFQRPCSAGSVECGADPALRFDGSSEVVGGGGWEKSSSPQVADCRIDEGGGGMSRELDVLEVSGPLPASLGFALKIN

SEQ ID NO: 15657 - protein, 208 aa, Zea mays subsp. mays
  peptide (1)..(208): Ceres Seq. ID no. 12373090
MPHSFDEFFSSATTTTTCTHTHSCDPPGPSAAMHTHTCLHTHTQVLGSGGEDDGSAKPRRPLGNREAVRKYREKKKARAAFLEGEVKKLRAANQQLVRRLQDHAALEAEVARLRGLLLDVRGRIDAEVGVSPFQRPCSAGSVECGADPALRFDGSSEVVGGGGWEKSSSPQVADCRIDEGGGGMSRELDVLEVSGPLPASLGFALKIN

SEQ ID NO: 15658 - protein, 176 aa, Zea mays subsp. mays
  peptide (1)..(176): Ceres Seq. ID no. 12373091
MHTHTCLHTHTQVLGSGGEDDGSAKPRRPLGNREAVRKYREKKKARAAFLEGEVKKLRAANQQLVRRLQDHAALEAEVARLRGLLLDVRGRIDAEVGVSPFQRPCSAGSVECGADPALRFDGSSEVVGGGGWEKSSSPQVADCRIDEGGGGMSRELDVLEVSGPLPASLGFALKIN

SEQ ID NO: 15659 - DNA, 1418 bp, Zea mays subsp. mays; identical to SEQ ID NO: 5809
  misc_feature (1)..(1418): Ceres Seq. ID no. 13564606
  misc_feature (1)..(1418): Ortholog of  Ceres SEQ ID NO 13594117 as cited in SEQ ID NO 57050

SEQ ID NO: 15660 - protein, 321 aa, Zea mays subsp. mays; identical to SEQ ID NO: 5810
  peptide (1)..(321): Ceres Seq. ID no. 15222577
  misc_feature (23)..(23): Xaa is any aa, unknown or other

SEQ ID NO: 15661 - protein, 239 aa, Zea mays subsp. mays; identical to SEQ ID NO: 5811
  peptide (1)..(239): Ceres Seq. ID no. 15222578

SEQ ID NO: 15662 - protein, 210 aa, Zea mays subsp. mays; identical to SEQ ID NO: 5812
  peptide (1)..(210): Ceres Seq. ID no. 15222579

SEQ ID NO: 15663 - DNA, 1423 bp, Zea mays subsp. mays
  misc_feature (1)..(1423): Ceres Seq. ID no. 12407049
  misc_feature (1)..(1423): Ortholog of  Ceres SEQ ID NO 13654451 as cited in SEQ ID NO 67881
agaccaagcggcacgcacaagcgcagagccacggtgagcagagaagaaacgcatccacagaagggacaaacgtccggagcggattccacattccagtctcggtctcggtccatgggcgcgggaaagggaggagacggcggcgaggcggcgcccgaggccgcgcaggcgcagcccgtcgtgctgaagatgaacctgcattgcgccggctgcgcgcacaaggtcaagaaggccatcaagcgcgtccccggtgtggactccatcgtcacagacgtcgcggcgaacaaggtcgttgtggcggggacggccgacgcgggcgcgctcaagacgcggctcgaggccaagaccaacaagcccgtggagatcgtctccgccggcggtgcccccaggaagcctcccgccgcggagcccaagcaggacgccggcgacggcgagaagcagggggtcaaaggcgcgagccccaacgaggaggagaaagagaaagagaaggggaagaagcaacaggcggaggagaaagagaaagagaaggggaagaagcagcaggtggagtcggtgctgctcaagatccgcctgcactgcgacggctgcgcctaccgcatcaggcaacgcatcggcaagatcaaaggcgtcaaggatgtggtgctggaggccaatgccaaggacgaggtggaggtcacgggcaccatggacataccgaacatggtctcctacctcaaggagaagctcaaccgcgacgtggaggccgtggtgctgcccgtcaggaaagacggcggcggcggcggcgagggcgagggcgagggcaaggacgacaagaagcacagcggcggcggcggcggcaaggacaaggtcgcggccggggcagccggcgacgacaggatgaacaagggcaaagggatcgaggcgtcggcggccggtccgtcaacggcggccgccgcggcgtacatgtctgcgccggcgggggcgagcacgtaccacgtggctccgccgcacgggtacgtggcgtatgagcaggccccgcctcctgccagctactatccctacccgtactacggctacggcagtggcgatggcatgggccacgccaacccctcctactaccagcagcagccgcagccgcagcccgacgggaaccagcagccgcaggtggcgtacccgccatacccgtaccaattcgacatggcgccggcgccgcagctcttcagcgacgagaaccccaacgcttgctccgtgatgtgacgccgccgccggtgcgtgtccttgttgcgttccgtcggcgagctcactgatccgccgtcagctttaaccttagccatccgggcatccggccgagaaagaactcgacctgtacatatcgtcaatgaggaatcagccttagtccagagccctaggattatattttcctgatgaaattttgcttcatttgttt

SEQ ID NO: 15664 - protein, 410 aa, Zea mays subsp. mays
  peptide (1)..(410): Ceres Seq. ID no. 12407050
RPSGTHKRRATVSREETHPQKGQTSGADSTFQSRSRSMGAGKGGDGGEAAPEAAQAQPVVLKMNLHCAGCAHKVKKAIKRVPGVDSIVTDVAANKVVVAGTADAGALKTRLEAKTNKPVEIVSAGGAPRKPPAAEPKQDAGDGEKQGVKGASPNEEEKEKEKGKKQQAEEKEKEKGKKQQVESVLLKIRLHCDGCAYRIRQRIGKIKGVKDVVLEANAKDEVEVTGTMDIPNMVSYLKEKLNRDVEAVVLPVRKDGGGGGEGEGEGKDDKKHSGGGGGKDKVAAGAAGDDRMNKGKGIEASAAGPSTAAAAAYMSAPAGASTYHVAPPHGYVAYEQAPPPASYYPYPYYGYGSGDGMGHANPSYYQQQPQPQPDGNQQPQVAYPPYPYQFDMAPAPQLFSDENPNACSVM

SEQ ID NO: 15665 - protein, 373 aa, Zea mays subsp. mays
  peptide (1)..(373): Ceres Seq. ID no. 12407051
MGAGKGGDGGEAAPEAAQAQPVVLKMNLHCAGCAHKVKKAIKRVPGVDSIVTDVAANKVVVAGTADAGALKTRLEAKTNKPVEIVSAGGAPRKPPAAEPKQDAGDGEKQGVKGASPNEEEKEKEKGKKQQAEEKEKEKGKKQQVESVLLKIRLHCDGCAYRIRQRIGKIKGVKDVVLEANAKDEVEVTGTMDIPNMVSYLKEKLNRDVEAVVLPVRKDGGGGGEGEGEGKDDKKHSGGGGGKDKVAAGAAGDDRMNKGKGIEASAAGPSTAAAAAYMSAPAGASTYHVAPPHGYVAYEQAPPPASYYPYPYYGYGSGDGMGHANPSYYQQQPQPQPDGNQQPQVAYPPYPYQFDMAPAPQLFSDENPNACSVM

SEQ ID NO: 15666 - protein, 348 aa, Zea mays subsp. mays
  peptide (1)..(348): Ceres Seq. ID no. 12407052
MNLHCAGCAHKVKKAIKRVPGVDSIVTDVAANKVVVAGTADAGALKTRLEAKTNKPVEIVSAGGAPRKPPAAEPKQDAGDGEKQGVKGASPNEEEKEKEKGKKQQAEEKEKEKGKKQQVESVLLKIRLHCDGCAYRIRQRIGKIKGVKDVVLEANAKDEVEVTGTMDIPNMVSYLKEKLNRDVEAVVLPVRKDGGGGGEGEGEGKDDKKHSGGGGGKDKVAAGAAGDDRMNKGKGIEASAAGPSTAAAAAYMSAPAGASTYHVAPPHGYVAYEQAPPPASYYPYPYYGYGSGDGMGHANPSYYQQQPQPQPDGNQQPQVAYPPYPYQFDMAPAPQLFSDENPNACSVM

SEQ ID NO: 15667 - DNA, 1517 bp, Zea mays subsp. mays
  misc_feature (1)..(1517): Ceres Seq. ID no. 12350177
  misc_feature (1)..(1517): Ortholog of  Ceres SEQ ID NO 12778054 as cited in SEQ ID NO 63215
  misc_feature (1)..(1517): Ortholog of  Ceres SEQ ID NO 14303185 as cited in SEQ ID NO 67203
attcgttcactctctcgtacgcatcctcattctatattgtggatgggcgtcgtcgaaccgtgccgcatcgcacgatcgccctcccgtcaagctacaccatgccccatcccgccacattgtcccatcggcctcctgtcccgctgcccacgacactagtctcttgtctcgtcgtgctgcctcctcaacgctttgttaacattagagattgaaaggtagcatcgtagcaaaatgaaggcaccatcactactggttcagtgtttccctggcttgcttcccagcaaggccactagttgcgtgccaattgtatctgagaaggatctgcagctaccatcaccagctgttgaaataatcccctcaaagagtgttcatccatacaaatatgctggagagaaggttgatgtgcaaggtcttaatattttcaagggtaaagtcagtgtagcagatatgatagttatctcaccttctgaagtagcatcatcaaaatatgatggaactccgaaatactgggagagttccattacccttgtcgacattcttaaaaatgagatccgtgatggccagttgagcttcaggggcaagcgggttctagagcttggatgtggatatggcctctctgggatttttgcctgcttgaagggtgcatccacagttcactttcaggacataaatgcagaaacgatacggtgcagaacaatacccaatgttcttgcaaatcttgagcaggctcaggaccgacagaacagaccatcagagagccctgttacaccatctaggcagctcttggctcctaatgtacatttctatgctggagagtgggatgaactcccaacaattctctcagttgtgcagccacctgcagcaccaacaaacctcagcttctctgaggatgattttatggatggctgcagtagccatgatggaagcagtgtagttggtcatgactactgccccaggagatctaggaagctttctggtagccgtgcatgggagagagctagtgagaccgaccaggcagatagtggctatgatgtgatcttgatttctgatgtcccctacgcagctaactctctgaagaagctctatgcgcttatttcaaagtgcctacgtcctccttatggagtcctgtacgtcgcttccaagaagaacttggttggttccaatggtggcgccaggcagcttcgagctctcatggaagaggaaggtgtccttggtggccacttcttgactgaggtgtgtgacagggagatatggaagttctttttcaagtgagcaaatataggaagtgggaagagaaggaaatgagttctgacgttgaaacccagtttttatggtttctatatgcagcgatgtacataccgcgaggcatagttccattaattctttggtagtaggttgaaacttcaagaaatatctgcagttgagcttgcacaagtgttggaatcctttaccgctttgtagatctgctatgtgctaatgtcgctctattaagtacagaaagcaaattgtggtaacgtttt

SEQ ID NO: 15668 - protein, 346 aa, Zea mays subsp. mays
  peptide (1)..(346): Ceres Seq. ID no. 12350178
MKAPSLLVQCFPGLLPSKATSCVPIVSEKDLQLPSPAVEIIPSKSVHPYKYAGEKVDVQGLNIFKGKVSVADMIVISPSEVASSKYDGTPKYWESSITLVDILKNEIRDGQLSFRGKRVLELGCGYGLSGIFACLKGASTVHFQDINAETIRCRTIPNVLANLEQAQDRQNRPSESPVTPSRQLLAPNVHFYAGEWDELPTILSVVQPPAAPTNLSFSEDDFMDGCSSHDGSSVVGHDYCPRRSRKLSGSRAWERASETDQADSGYDVILISDVPYAANSLKKLYALISKCLRPPYGVLYVASKKNLVGSNGGARQLRALMEEEGVLGGHFLTEVCDREIWKFFFK

SEQ ID NO: 15669 - protein, 274 aa, Zea mays subsp. mays
  peptide (1)..(274): Ceres Seq. ID no. 12350179
MIVISPSEVASSKYDGTPKYWESSITLVDILKNEIRDGQLSFRGKRVLELGCGYGLSGIFACLKGASTVHFQDINAETIRCRTIPNVLANLEQAQDRQNRPSESPVTPSRQLLAPNVHFYAGEWDELPTILSVVQPPAAPTNLSFSEDDFMDGCSSHDGSSVVGHDYCPRRSRKLSGSRAWERASETDQADSGYDVILISDVPYAANSLKKLYALISKCLRPPYGVLYVASKKNLVGSNGGARQLRALMEEEGVLGGHFLTEVCDREIWKFFFK

SEQ ID NO: 15670 - DNA, 1874 bp, Zea mays subsp. mays
  misc_feature (1)..(1874): Ceres Seq. ID no. 12360030
  misc_feature (1)..(1874): Ortholog of  Ceres SEQ ID NO 13659033 as cited in SEQ ID NO 66372
  misc_feature (1)..(1874): Ortholog of  Ceres SEQ ID NO 13655724 as cited in SEQ ID NO 68973
  misc_feature (1)..(1874): Ortholog of  Ceres SEQ ID NO 12625899 as cited in SEQ ID NO 69079
  misc_feature (1)..(1874): Ortholog of  Ceres SEQ ID NO 15180366 as cited in SEQ ID NO 0
aaccccaccagaccttcaaccgctacatttccgtcactaccggagccgccactccgacgaacgcgggcggcggagcggaagcgaaccagagcaccggtaaaaagaaaaggatgaggcttgggagtataaacggcttgcggttcacgcagcttaaacttgtcatccttgcgttcttcatgttgtttgttctctggaaatgggagaagggctcgtcatactacgattccgaaatcctccagccagatccgttggttctgactcatccagctaactcgaagtttgtagaccagcatacatccccagaagaagactttccaagtgcagatcgatcacaccggtcagtaggtaaagtagaaaagccggttactagtgcgctgccaccattgtctacgataggctattctgttgatgttgcagatgggaatgaagtgccacctcctgagaagaaagaatgcgagtacaggaatgggaagtgggtttctgacaatcgtagaccactatactcagggtttggttgtaagcaatggctttcagagagttggtcctgcagactaacccagcgaaaagatttcgcgtatgaaaaattcagatggcagcctgaagcttgtgagatgccagagtttgaggcctcccacttcttgagaagaatgcaggataaaaccatcgcttacgtgggcgattctctagggaggcagatgtttcagtcgatgatgtgtatggtcactggtggaaaggagaggctggatgtagaagatattggcgcagagtatggctttgtgttagcgccgggtgcaaaaaggccagacggctgggcctaccggttcccgagcaccaacacaacaattctataccactggtcatcaacgctctgtgatttggagcccctgaacccatcagaccgagcgaccagttattccatgcacctggaccgcccgcctgcttttctgaagagcaacctccacaggctccatgtcctggtcctcaacaccggccaccactggaaccgggggaagctgagggcgaacaggtgggagatgtatctcggcggagcgccgaacaacgacaggaacaccgccgtcatttggaaggccaagaacttcaccgtccacaacgtcgtcaggtgggtggacgcgcagctcccccgccaccccaagctgaaggcgttctacaggtcgatatcgccccggcacttcttcaacggtgactgggacaccggaggcagctgcgacaacaccagccctctggccaagggagggagcggcgtccacctcgaccgttcggaggacgccgacgccgagggcgccgtgaggggcaccggggtcaggctcctggacgtcactgccctatcgcggctgagggacgaagggcatatttcgcggtacagcatcaaggccacttctggcgttcaggattgcctgcactggtgccttcccggcgtgcctgacacctggaacgagatccttgcggcccagctatagcctgtagctgaatttgaagatgccaagggctacatcgaattgtttatgggtgaagctcgtatatacagtaactaccacggagtactacgtcgttgccggagacccaatgctgctggtagtgaaacactgagctgcagtacattctttagggaccgtgcttaactgtagaaaatacagggcctttttttgtgtaagtacatgttgtgtttgcctactattacctatgtacgccagttgttaattggagaactggattgatagatagtttggaagtgttgcctgagaggtagggcaacgtatcttgcagcatccagtcctttgagaactcatctgttatgtaccaaacacgaacagagagcatcatgcattgctgatccatgtgatgtggttgttggt

SEQ ID NO: 15671 - protein, 491 aa, Zea mays subsp. mays
  peptide (1)..(491): Ceres Seq. ID no. 12360031
PHQTFNRYISVTTGAATPTNAGGGAEANQSTGKKKRMRLGSINGLRFTQLKLVILAFFMLFVLWKWEKGSSYYDSEILQPDPLVLTHPANSKFVDQHTSPEEDFPSADRSHRSVGKVEKPVTSALPPLSTIGYSVDVADGNEVPPPEKKECEYRNGKWVSDNRRPLYSGFGCKQWLSESWSCRLTQRKDFAYEKFRWQPEACEMPEFEASHFLRRMQDKTIAYVGDSLGRQMFQSMMCMVTGGKERLDVEDIGAEYGFVLAPGAKRPDGWAYRFPSTNTTILYHWSSTLCDLEPLNPSDRATSYSMHLDRPPAFLKSNLHRLHVLVLNTGHHWNRGKLRANRWEMYLGGAPNNDRNTAVIWKAKNFTVHNVVRWVDAQLPRHPKLKAFYRSISPRHFFNGDWDTGGSCDNTSPLAKGGSGVHLDRSEDADAEGAVRGTGVRLLDVTALSRLRDEGHISRYSIKATSGVQDCLHWCLPGVPDTWNEILAAQL

SEQ ID NO: 15672 - protein, 455 aa, Zea mays subsp. mays
  peptide (1)..(455): Ceres Seq. ID no. 12360032
MRLGSINGLRFTQLKLVILAFFMLFVLWKWEKGSSYYDSEILQPDPLVLTHPANSKFVDQHTSPEEDFPSADRSHRSVGKVEKPVTSALPPLSTIGYSVDVADGNEVPPPEKKECEYRNGKWVSDNRRPLYSGFGCKQWLSESWSCRLTQRKDFAYEKFRWQPEACEMPEFEASHFLRRMQDKTIAYVGDSLGRQMFQSMMCMVTGGKERLDVEDIGAEYGFVLAPGAKRPDGWAYRFPSTNTTILYHWSSTLCDLEPLNPSDRATSYSMHLDRPPAFLKSNLHRLHVLVLNTGHHWNRGKLRANRWEMYLGGAPNNDRNTAVIWKAKNFTVHNVVRWVDAQLPRHPKLKAFYRSISPRHFFNGDWDTGGSCDNTSPLAKGGSGVHLDRSEDADAEGAVRGTGVRLLDVTALSRLRDEGHISRYSIKATSGVQDCLHWCLPGVPDTWNEILAAQL

SEQ ID NO: 15673 - protein, 433 aa, Zea mays subsp. mays
  peptide (1)..(433): Ceres Seq. ID no. 12360033
MLFVLWKWEKGSSYYDSEILQPDPLVLTHPANSKFVDQHTSPEEDFPSADRSHRSVGKVEKPVTSALPPLSTIGYSVDVADGNEVPPPEKKECEYRNGKWVSDNRRPLYSGFGCKQWLSESWSCRLTQRKDFAYEKFRWQPEACEMPEFEASHFLRRMQDKTIAYVGDSLGRQMFQSMMCMVTGGKERLDVEDIGAEYGFVLAPGAKRPDGWAYRFPSTNTTILYHWSSTLCDLEPLNPSDRATSYSMHLDRPPAFLKSNLHRLHVLVLNTGHHWNRGKLRANRWEMYLGGAPNNDRNTAVIWKAKNFTVHNVVRWVDAQLPRHPKLKAFYRSISPRHFFNGDWDTGGSCDNTSPLAKGGSGVHLDRSEDADAEGAVRGTGVRLLDVTALSRLRDEGHISRYSIKATSGVQDCLHWCLPGVPDTWNEILAAQL

SEQ ID NO: 15674 - DNA, 1326 bp, Zea mays subsp. mays
  misc_feature (1)..(1326): Ceres Seq. ID no. 12359521
  misc_feature (1)..(1326): Ortholog of  Ceres SEQ ID NO 13648488 as cited in SEQ ID NO 20419
  misc_feature (1)..(1326): Ortholog of  Ceres SEQ ID NO 15171378 as cited in SEQ ID NO 51582
gtcagtccctcccaacctccattccttcctcctttgccaatgcagctctgatctctcctacctgagaatgtcagtgtgagtggccattccatctgcacaacatcctcctccacgcacgcacgcaaaacatacaaaaaggcagaagcggaggagatgaaggcaatggccgggccaaagctgctcgtcgtccacgcgtcgtcgaacaaggccctgaacgggatggcgcccacgtcgccgccgtcgcccggctggtcccggtgcctgtggctggtggtgttcctggccttgttcacctgcgtgtccctcctgaccgtgctctccacggcgcgcgcctcggccggggcgccggcgtgccaggcggcgtcgctcacggccagcgctgccggcgccacggaggccggcctgccgcggcacgtgttcgacgcgctggtgcagtacgcggcggcggcagggaacttgtcgtcgagcatgccggagccggacgtgcgcgcgatcgcgtcggtgctccggcggcgcgcgccgtgcaacctgctggtgttcgggctgggcgcggagacgccgctgtggcgcgcgctcaaccacggcgggcgcacggtgttcctggacgagaacccgtactacgtggcccacctggagggcaagcacccggggctggaggcctacgacgtggcctacgccacggcggtgcgcgagctccccgacctcctcgacgccgcccgtgccgcgcgcgccgccgagtgccgccccgtccagaacctgctcttctccgagtgccgcctcgccatcaacgacctccccaaccagctctacgacgtcgcctgggacgtcatcctcgtcgacggcccgcgcgggttcatggaggggtcgccggggaggatgtcggcgatctactcggctgcggtgatggcgcggaccaagggcgcggagacggaggtgatggtgcacgactacgagcgggaggtggagcgcgcgtgcggccgggagttcctgtgcgacgagaaccgggtcacggcgaccagcacgccgtcgctcggccacgtcgtcgtgcgcgacggcnccgccgccaaccgggaagccttctgcgggccgcccgccggcgccgctcagaaatcgaaaccgagctaagcgagtcgtagtcgttacttctccttcaaacaaatcatgtaattaactcaaggaagtataggtcagtggttcctcgtatttttttcgaacaaatcctgtgggtggtggtggtccaatgatttctcccttcaaacatactgtaatgcctgacgtgccaacacatttgacacgtttaagagaaattttgcatttacaactctt

SEQ ID NO: 15675 - protein, 323 aa, Zea mays subsp. mays
  peptide (1)..(323): Ceres Seq. ID no. 12359522
  misc_feature (302)..(302): Xaa is any aa, unknown or other
MKAMAGPKLLVVHASSNKALNGMAPTSPPSPGWSRCLWLVVFLALFTCVSLLTVLSTARASAGAPACQAASLTASAAGATEAGLPRHVFDALVQYAAAAGNLSSSMPEPDVRAIASVLRRRAPCNLLVFGLGAETPLWRALNHGGRTVFLDENPYYVAHLEGKHPGLEAYDVAYATAVRELPDLLDAARAARAAECRPVQNLLFSECRLAINDLPNQLYDVAWDVILVDGPRGFMEGSPGRMSAIYSAAVMARTKGAETEVMVHDYEREVERACGREFLCDENRVTATSTPSLGHVVVRDGXAANREAFCGPPAGAAQKSKPS

SEQ ID NO: 15676 - protein, 320 aa, Zea mays subsp. mays
  peptide (1)..(320): Ceres Seq. ID no. 12359523
  misc_feature (299)..(299): Xaa is any aa, unknown or other
MAGPKLLVVHASSNKALNGMAPTSPPSPGWSRCLWLVVFLALFTCVSLLTVLSTARASAGAPACQAASLTASAAGATEAGLPRHVFDALVQYAAAAGNLSSSMPEPDVRAIASVLRRRAPCNLLVFGLGAETPLWRALNHGGRTVFLDENPYYVAHLEGKHPGLEAYDVAYATAVRELPDLLDAARAARAAECRPVQNLLFSECRLAINDLPNQLYDVAWDVILVDGPRGFMEGSPGRMSAIYSAAVMARTKGAETEVMVHDYEREVERACGREFLCDENRVTATSTPSLGHVVVRDGXAANREAFCGPPAGAAQKSKPS

SEQ ID NO: 15677 - protein, 301 aa, Zea mays subsp. mays
  peptide (1)..(301): Ceres Seq. ID no. 12359524
  misc_feature (280)..(280): Xaa is any aa, unknown or other
MAPTSPPSPGWSRCLWLVVFLALFTCVSLLTVLSTARASAGAPACQAASLTASAAGATEAGLPRHVFDALVQYAAAAGNLSSSMPEPDVRAIASVLRRRAPCNLLVFGLGAETPLWRALNHGGRTVFLDENPYYVAHLEGKHPGLEAYDVAYATAVRELPDLLDAARAARAAECRPVQNLLFSECRLAINDLPNQLYDVAWDVILVDGPRGFMEGSPGRMSAIYSAAVMARTKGAETEVMVHDYEREVERACGREFLCDENRVTATSTPSLGHVVVRDGXAANREAFCGPPAGAAQKSKPS

SEQ ID NO: 15678 - DNA, 1268 bp, Zea mays subsp. mays
  misc_feature (1)..(1268): Ceres Seq. ID no. 12364236
  misc_feature (1)..(1268): Ortholog of  Ceres SEQ ID NO 15225667 as cited in SEQ ID NO 50951
  misc_feature (1)..(1268): Ortholog of  Ceres SEQ ID NO 14311671 as cited in SEQ ID NO 51251
  misc_feature (1)..(1268): Ortholog of  Ceres SEQ ID NO 14304791 as cited in SEQ ID NO 53562
  misc_feature (1)..(1268): Ortholog of  Ceres SEQ ID NO 14307355 as cited in SEQ ID NO 54610
  misc_feature (1)..(1268): Ortholog of  Ceres SEQ ID NO 13594298 as cited in SEQ ID NO 57803
  misc_feature (1)..(1268): Ortholog of  Ceres SEQ ID NO 14301894 as cited in SEQ ID NO 61677
  misc_feature (1)..(1268): Ortholog of  Ceres SEQ ID NO 13503476 as cited in SEQ ID NO 61978
  misc_feature (1)..(1268): Ortholog of  Ceres SEQ ID NO 12578438 as cited in SEQ ID NO 62201
gcacgagaccattacctagaacatcctaatcgaaaaatcagagataggagagacgaacaagaaaagacgagatcatatataccgtacgttatagagtaggaaaatagaaatacgaatgatgatcacgggacggcagcgaaaccctgcaaggctgcaggtgtcgtcgtccttcctgcttgcccttgttttcgcatcatcggtgctcgtcggcatcgtggccggcggcagcttctacgaggagtgcgacgcgacttgggagccccagaactgctgggcctacgacgatggcaacaggctctccctcgcgctcgtcagcagttcctcaggttccatgatccggtcgaagcggcagttcgtgtacgggaccgtgtccaccatgatccagcttgtccccggcgactccgccggcaccgtcaccacctactatacgtcgtcgctgggcgacaaccacgacgagatcgacttcgagttcttgggcaacgtgagcgggcagccctacaccatccacaccaacgtgtacgctgccggcgtgggcaacaaggagatgcagttcaagccatggttcgaccccaccgccgactaccacaactacaccatctcctggactccctgcatgatcgcgtggtacgtcgacggcgtccccatccgcgtgttccgcaactacgcggcgagccacggcgtggcgttcccgacgagccagcccatgtacgcctactctagcatctgggcggcggaggactgggccacgcagggcggccgcgtcaaggccgactggtccaaggcgcccttcgtcgccagctaccacggcatcgacctcggcgtctgcgagtgctacggcgggggcgcctgcgtctccagctgcgccgcggcgttcgccgccagccactgcagcctgagcgacgcgcaggtgggggagatgcgctgggtgcagggcagctacaggatctacgactactgcgtcgaccccaagcgcttggtcaacggccagaggccggtcgagtgcgacctgccgcagtactgaacggatcggagctccgatcaggtccttgttgcgtatgaatgaggaagcaataatcatacgtatttactcaatcaacagtgcaaggggccggccgggaattccaacaagccgacatatacccaccaggttgggtcgagtcacgacgatcaaagaggccgcccgtctcactcgtctattttcatggataatgcaattggttttgtgctcattttactcttttaccgatatataactatgagtttttgag

SEQ ID NO: 15679 - protein, 301 aa, Zea mays subsp. mays
  peptide (1)..(301): Ceres Seq. ID no. 12364237
MMITGRQRNPARLQVSSSFLLALVFASSVLVGIVAGGSFYEECDATWEPQNCWAYDDGNRLSLALVSSSSGSMIRSKRQFVYGTVSTMIQLVPGDSAGTVTTYYTSSLGDNHDEIDFEFLGNVSGQPYTIHTNVYAAGVGNKEMQFKPWFDPTADYHNYTISWTPCMIAWYVDGVPIRVFRNYAASHGVAFPTSQPMYAYSSIWAAEDWATQGGRVKADWSKAPFVASYHGIDLGVCECYGGGACVSSCAAAFAASHCSLSDAQVGEMRWVQGSYRIYDYCVDPKRLVNGQRPVECDLPQY

SEQ ID NO: 15680 - protein, 300 aa, Zea mays subsp. mays
  peptide (1)..(300): Ceres Seq. ID no. 12364238
MITGRQRNPARLQVSSSFLLALVFASSVLVGIVAGGSFYEECDATWEPQNCWAYDDGNRLSLALVSSSSGSMIRSKRQFVYGTVSTMIQLVPGDSAGTVTTYYTSSLGDNHDEIDFEFLGNVSGQPYTIHTNVYAAGVGNKEMQFKPWFDPTADYHNYTISWTPCMIAWYVDGVPIRVFRNYAASHGVAFPTSQPMYAYSSIWAAEDWATQGGRVKADWSKAPFVASYHGIDLGVCECYGGGACVSSCAAAFAASHCSLSDAQVGEMRWVQGSYRIYDYCVDPKRLVNGQRPVECDLPQY

SEQ ID NO: 15681 - protein, 229 aa, Zea mays subsp. mays
  peptide (1)..(229): Ceres Seq. ID no. 12364239
MIRSKRQFVYGTVSTMIQLVPGDSAGTVTTYYTSSLGDNHDEIDFEFLGNVSGQPYTIHTNVYAAGVGNKEMQFKPWFDPTADYHNYTISWTPCMIAWYVDGVPIRVFRNYAASHGVAFPTSQPMYAYSSIWAAEDWATQGGRVKADWSKAPFVASYHGIDLGVCECYGGGACVSSCAAAFAASHCSLSDAQVGEMRWVQGSYRIYDYCVDPKRLVNGQRPVECDLPQY

SEQ ID NO: 15682 - DNA, 1052 bp, Zea mays subsp. mays
  misc_feature (1)..(1052): Ceres Seq. ID no. 12381283
  misc_feature (1)..(1052): Ortholog of  Ceres SEQ ID NO 14309627 as cited in SEQ ID NO 493
  misc_feature (1)..(1052): Ortholog of  Ceres SEQ ID NO 15172672 as cited in SEQ ID NO 53908
  misc_feature (1)..(1052): Ortholog of  Ceres SEQ ID NO 14302111 as cited in SEQ ID NO 68773
aaatagccattcaatcattcaagcgaagcagccaccactctctccactgtgactccgtgacctgcctgccctgctgcgacaagcacagcacacacaccccgcacaccgcaccagctcagctcagctcaccaagacaatcaatcatggctcgtccgcgcagtgtcgctgccgctgcccccctcctcctgctgctcgccgccgccgcagcggggctcgtgtccgccgcgtcgccggcagccagcgacttcgtccgcaagtcgtgccgcacgacgcagtacccttcggtgtgcgagcagagcctggcgtcgtacggcgggtcgccgccgccacggagcccgcgggagctggcgcgcgccgcgctgtcggtgagcgcggaccgcgcgcgcgccgcgtcggcgtacgtgggccgcctgtgcggcgccagcaacggcaaaggcgcgaagaaggggtcgggatcggcgtcggcgtcggcaggtcccgtgcgcgactgcctggacaatctggcggacagcgtgggccacctccgcgacgcggcgcaggagatgggcggcgccgggatgggccgcgcggggacgccggcgttcaggtggcacctcagcaacgtgcagacctggtgcagcgccgcgctcaccgacgaggacacctgcctcgacggcctctcgtcccgcgccgtcgacgccggcacgcgcgccgccatccggggcaaggtcgtcgaggtcgcgcaggtcaccagcaacgcgctcgcgctcgtcaataaggtcgggcctgggtactaacacgggaaggggacccaagatccaggcccaggcccaggcccaggcccagcccagataccacacccgctactagtatagtactaggcgcctccacctccacggcgttgggtgtttctcgtccgttaatagctcggtttgctttgcttgtgtttgtgtaagatatacattagttaagggcaataagcttgtactattatgagtggcggccgaggagtacagtacgttctcctctgtccgatcatgccaccatattaatgtgggagatatcttttgtcc

SEQ ID NO: 15683 - protein, 257 aa, Zea mays subsp. mays
  peptide (1)..(257): Ceres Seq. ID no. 12381284
IAIQSFKRSSHHSLHCDSVTCLPCCDKHSTHTPHTAPAQLSSPRQSIMARPRSVAAAAPLLLLLAAAAAGLVSAASPAASDFVRKSCRTTQYPSVCEQSLASYGGSPPPRSPRELARAALSVSADRARAASAYVGRLCGASNGKGAKKGSGSASASAGPVRDCLDNLADSVGHLRDAAQEMGGAGMGRAGTPAFRWHLSNVQTWCSAALTDEDTCLDGLSSRAVDAGTRAAIRGKVVEVAQVTSNALALVNKVGPGY

SEQ ID NO: 15684 - protein, 210 aa, Zea mays subsp. mays
  peptide (1)..(210): Ceres Seq. ID no. 12381285
MARPRSVAAAAPLLLLLAAAAAGLVSAASPAASDFVRKSCRTTQYPSVCEQSLASYGGSPPPRSPRELARAALSVSADRARAASAYVGRLCGASNGKGAKKGSGSASASAGPVRDCLDNLADSVGHLRDAAQEMGGAGMGRAGTPAFRWHLSNVQTWCSAALTDEDTCLDGLSSRAVDAGTRAAIRGKVVEVAQVTSNALALVNKVGPGY

SEQ ID NO: 15685 - DNA, 1543 bp, Zea mays subsp. mays
  misc_feature (1)..(1543): Ceres Seq. ID no. 12406084
  misc_feature (1)..(1543): Ortholog of  Ceres SEQ ID NO 13647847 as cited in SEQ ID NO 20430
  misc_feature (1)..(1543): Ortholog of  Ceres SEQ ID NO 15171696 as cited in SEQ ID NO 59997
gcacgagaccattacctagaacatcctaatcgaaaaaaatacagggggaaaagcaagacgcgtgagcacttccttatcgtctcttcctttcaccccctcgaccccgatcgaatcgctcgaacaattccctgtgcatcgatcgatctaggcttgcgcgaggatccaattccatccggctctcctttgagctcgtgatcctcggagttggaggagttcttcgcgagtctctttttgccccgatttctttttggcttatttgtgcgagctttctcaggagcagaagggaagaggcagtttgcaattccgatgcacccaggcctcaagattcaactctgaggccttatccgaggcatccgcatcgatctccgcaagaggatgggtaacgtgggaagcaacggtggaggcgccgccactggtcaccgccgtcggagctccggccacggccatcaccagcaggcgccgccgcctccccagccgcaggagactgcgcccaaccgctacgtgttcgcggccgccacgccgtacccgccccagtaccctaaccccaatccgccgcagtactacccgcagtacgggaactactacccgccgccaccatcatccgtgccggtgccccttccggcgccgtacgaccaccaccacaggccacccaccgccgcccctggcgagttcccgcccccaccccccgtccacccccacaactaccccggctgggccgggcggtatccctcctacggaccgcatctgtctatgccgacgccttacgttgagcaccagaaggccgtcactatccgcaacgacatcaaccttaagaaggagacgcttcggatcgagcctgatgaagaacgccctggccgcttcctcgtcgccttcacctttgacgccacggtcgctggcagcatgactgtttacttctttgcaaaggaagagctcaactgcaatctaacaacagtgaaagaagacctaattaagcccattactgttagcttcaaagagggtcttggtcaaaaattcaggcaaccttcaggaacaggaattgacttttcagtgtttgaagaatcagatttattaaagcagggggacatggatgtatatccacttgcagttaaagctgaaacaacattgtctgttgatcacccaccagaaggggatgaccaaaagatgataactcctaactcacagatcacccaggccgtttttgaaaagaaagaaaatggggattatcaagtaagagttgtttgccagatcctctgggtcaatggaactaggtatgaactgcaagaaatatatggcatagggaactccatggaaggtgatgctgatgcaaatgatccagggaaagaatgtgttatttgcctctcagaaccaagggatactactgtcctgccatgtaggcatatgtgcatgtgcagtgagtgcgccaaggtcctgaggtaccaaaccactcggtgccccatctgcaggcagcctgtggagcgtctcctggagatcaaagtgaacaacaaatctgaagatcagcagcagacgccccaatcgccaccgc

SEQ ID NO: 15686 - protein, 389 aa, Zea mays subsp. mays
  peptide (1)..(389): Ceres Seq. ID no. 12406085
MGNVGSNGGGAATGHRRRSSGHGHHQQAPPPPQPQETAPNRYVFAAATPYPPQYPNPNPPQYYPQYGNYYPPPPSSVPVPLPAPYDHHHRPPTAAPGEFPPPPPVHPHNYPGWAGRYPSYGPHLSMPTPYVEHQKAVTIRNDINLKKETLRIEPDEERPGRFLVAFTFDATVAGSMTVYFFAKEELNCNLTTVKEDLIKPITVSFKEGLGQKFRQPSGTGIDFSVFEESDLLKQGDMDVYPLAVKAETTLSVDHPPEGDDQKMITPNSQITQAVFEKKENGDYQVRVVCQILWVNGTRYELQEIYGIGNSMEGDADANDPGKECVICLSEPRDTTVLPCRHMCMCSECAKVLRYQTTRCPICRQPVERLLEIKVNNKSEDQQQTPQSPP

SEQ ID NO: 15687 - protein, 264 aa, Zea mays subsp. mays
  peptide (1)..(264): Ceres Seq. ID no. 12406086
MPTPYVEHQKAVTIRNDINLKKETLRIEPDEERPGRFLVAFTFDATVAGSMTVYFFAKEELNCNLTTVKEDLIKPITVSFKEGLGQKFRQPSGTGIDFSVFEESDLLKQGDMDVYPLAVKAETTLSVDHPPEGDDQKMITPNSQITQAVFEKKENGDYQVRVVCQILWVNGTRYELQEIYGIGNSMEGDADANDPGKECVICLSEPRDTTVLPCRHMCMCSECAKVLRYQTTRCPICRQPVERLLEIKVNNKSEDQQQTPQSPP

SEQ ID NO: 15688 - protein, 214 aa, Zea mays subsp. mays
  peptide (1)..(214): Ceres Seq. ID no. 12406087
MTVYFFAKEELNCNLTTVKEDLIKPITVSFKEGLGQKFRQPSGTGIDFSVFEESDLLKQGDMDVYPLAVKAETTLSVDHPPEGDDQKMITPNSQITQAVFEKKENGDYQVRVVCQILWVNGTRYELQEIYGIGNSMEGDADANDPGKECVICLSEPRDTTVLPCRHMCMCSECAKVLRYQTTRCPICRQPVERLLEIKVNNKSEDQQQTPQSPP

SEQ ID NO: 15689 - DNA, 1113 bp, Zea mays subsp. mays
  misc_feature (1)..(1113): Ceres Seq. ID no. 12353094
  misc_feature (1)..(1113): Ortholog of  Ceres SEQ ID NO 12558659 as cited in SEQ ID NO 20727
  misc_feature (1)..(1113): Ortholog of  Ceres SEQ ID NO 14314534 as cited in SEQ ID NO 52434
  misc_feature (1)..(1113): Ortholog of  Ceres SEQ ID NO 15175034 as cited in SEQ ID NO 62432
  misc_feature (1)..(1113): Ortholog of  Ceres SEQ ID NO 13656436 as cited in SEQ ID NO 69154
aaatagagcccgagcgccgagggaggagggcaaaccgggagagagagagagagacacctcctccttttcccccctttgcattgggttgccgcaacactacagacacaaacacagtctaggaggcttcttccgctcgctcaggtaggtgtactgtactgtagtaggttggttctccattcatcattcagctcacaggtccctccgcctccgccgtatcggagggagaggaagcggaaggcttggaaggagaagagaatggcggggcggcgcgcggaggaggagtacgactacctgttcaaggtggtgctgatcggggactcgggcgtcggcaagtccaacctcctctcccgcttcacccgcaacgagttctgcctcgagtccaagtccaccatcggcgtcgagttcgccacacggacactccatgttgagggcaagatcatcaaggcgcagatctgggacacggcaggccaggagcgggtaccgggcgatcaccagcgcctactatcgcggggcgctgggcgcggtcctggtctacgacgtgagcaagcccaccaccttcgagaacatcagccggtggctcaaggagctacgcgaccacgccgactccaacaccaggatcatgctcgtcggcaacaagaccgacctgaggcacctccgggccgtcgccaccgacgacgctcggagcttcgctgaggcagaaggcctgtcctacatcgagacgtccgcgctggaggccaccaacgtggaggaggcgttccagctcatcctgggcgacatttaccgggccgtcagcaagaagcctgtggcgtccgacgaggttggcgccggccagggaggcgtcaaggaaggtaagaccatcgatgtggcgactggtgctgatgccgccgctcacaagaagcagtgctgctcggcttagaagttagaagaacccatgctggtggtctctcgttcagtggcgtatgtgttgttgtgatggttgtcgttgttgttttttttctcttcttccagtccaaaagtttgttgattcgttttgccagatagtacctttgttggagggataatcatgctcacatatatattctctaaagcaagcagttatatatgattataccg

SEQ ID NO: 15690 - protein, 164 aa, Zea mays subsp. mays
  peptide (1)..(164): Ceres Seq. ID no. 12353095
MLRARSSRRRSGTRQARSGYRAITSAYYRGALGAVLVYDVSKPTTFENISRWLKELRDHADSNTRIMLVGNKTDLRHLRAVATDDARSFAEAEGLSYIETSALEATNVEEAFQLILGDIYRAVSKKPVASDEVGAGQGGVKEGKTIDVATGADAAAHKKQCCSA

SEQ ID NO: 15691 - protein, 145 aa, Zea mays subsp. mays
  peptide (1)..(145): Ceres Seq. ID no. 12353096
MAGRRAEEEYDYLFKVVLIGDSGVGKSNLLSRFTRNEFCLESKSTIGVEFATRTLHVEGKIIKAQIWDTAGQERVPGDHQRLLSRGAGRGPGLRREQAHHLREHQPVAQGATRPRRLQHQDHARRQQDRPEAPPGRRHRRRSELR

SEQ ID NO: 15692 - protein, 98 aa, Zea mays subsp. mays
  peptide (1)..(98): Ceres Seq. ID no. 12353097
MLVGNKTDLRHLRAVATDDARSFAEAEGLSYIETSALEATNVEEAFQLILGDIYRAVSKKPVASDEVGAGQGGVKEGKTIDVATGADAAAHKKQCCSA

SEQ ID NO: 15693 - DNA, 1442 bp, Zea mays subsp. mays
  misc_feature (1)..(1442): Ceres Seq. ID no. 12361081
  misc_feature (1)..(1442): Ortholog of  Ceres SEQ ID NO 14304094 as cited in SEQ ID NO 53422
gcacgagaccattacctagaacatcctaatcgaaaaactagccacagtaccacctcagcccaggtcccttcgcctccgctcaactgccgccgcagggcccgctgcaggcttccatgtgtggtagggcccggtgtaccctcagcccggccgaggttgccagggccttcggcttccccaccacctccgccaacgcgggcggcggtggtgacggccccgctgtgccgacgctccatcttaaccggttccggccgtcgtacaatgtgttgcctggggcgtacctgcctgtgggcgccatgcgggcactaccaggttgcgcccacggaggaggaggttcggatggggaggggccggtgatccagtgcatgaagtgggggctggtgcccagcttcaccggcaaggccgagaaacccgaccatttcaggatgttcaatgccagatcagagtccgtaaaagaaaaggtttcattccgtcgactaattcaaaaaaataggtgccttgttgcagtagaagggttttatgagtggaaaaagaatggatcaaaaaaacagccatactacatacatttccaagatcataggcctcttgtctttgcagccttgtatgatgcatggacaaattcagaaggagagatcacccatacattcactattttgactacacatgcctcaacttctctaaattggcttcatgatagaatgcctgttatcttaggcagtaaggactatgttgatgcttggttaaatgatgtttctgtaaaacttgaagaaattactgcaccttacgaaggagctgatctggtttggtatccagtgacatccgcattgggtaaagcatcatttgatggacctgagtgcatcaaagaggtacatatcggagctactgataagcctatttcaaaattcttcaccaagaaatcgactgcctacgatctatcagggaagtatgagaatatgtcacgggagcttgctcatgcttacaaagcagcgaaagtggaatgcgatggatcagtagaaaatcaaggaggggacggcaaccaacaccagtcccgagagaagcaaactactaattgtactataaaggatgaacctgtcaccttggaaccacaagttttcgagacaccgtggagcatcgagcatgaagatactatgactctggctggtgccactttggaaacacaacgtgatttgggattcaagagaaagatcgaggacactcaagtcgaagctagcatgaagccctctcagcttaccaggaaggaaaaagctgtaaaagcagcttcggatgggcaggcatcgttgctttcatatttcgcaaggaagcagggtcgctcgatgaagtagtttgcggtagccgtgccatgtattcctgtgtaactcaaactttaccagtacctgtcctccgtgttcgggacaaactatttcggttttaattttgttttggct

SEQ ID NO: 15694 - protein, 408 aa, Zea mays subsp. mays
  peptide (1)..(408): Ceres Seq. ID no. 12361082
MCGRARCTLSPAEVARAFGFPTTSANAGGGGDGPAVPTLHLNRFRPSYNVLPGAYLPVGAMRALPGCAHGGGGSDGEGPVIQCMKWGLVPSFTGKAEKPDHFRMFNARSESVKEKVSFRRLIQKNRCLVAVEGFYEWKKNGSKKQPYYIHFQDHRPLVFAALYDAWTNSEGEITHTFTILTTHASTSLNWLHDRMPVILGSKDYVDAWLNDVSVKLEEITAPYEGADLVWYPVTSALGKASFDGPECIKEVHIGATDKPISKFFTKKSTAYDLSGKYENMSRELAHAYKAAKVECDGSVENQGGDGNQHQSREKQTTNCTIKDEPVTLEPQVFETPWSIEHEDTMTLAGATLETQRDLGFKRKIEDTQVEASMKPSQLTRKEKAVKAASDGQASLLSYFARKQGRSMK

SEQ ID NO: 15695 - protein, 348 aa, Zea mays subsp. mays
  peptide (1)..(348): Ceres Seq. ID no. 12361083
MRALPGCAHGGGGSDGEGPVIQCMKWGLVPSFTGKAEKPDHFRMFNARSESVKEKVSFRRLIQKNRCLVAVEGFYEWKKNGSKKQPYYIHFQDHRPLVFAALYDAWTNSEGEITHTFTILTTHASTSLNWLHDRMPVILGSKDYVDAWLNDVSVKLEEITAPYEGADLVWYPVTSALGKASFDGPECIKEVHIGATDKPISKFFTKKSTAYDLSGKYENMSRELAHAYKAAKVECDGSVENQGGDGNQHQSREKQTTNCTIKDEPVTLEPQVFETPWSIEHEDTMTLAGATLETQRDLGFKRKIEDTQVEASMKPSQLTRKEKAVKAASDGQASLLSYFARKQGRSMK

SEQ ID NO: 15696 - protein, 325 aa, Zea mays subsp. mays
  peptide (1)..(325): Ceres Seq. ID no. 12361084
MKWGLVPSFTGKAEKPDHFRMFNARSESVKEKVSFRRLIQKNRCLVAVEGFYEWKKNGSKKQPYYIHFQDHRPLVFAALYDAWTNSEGEITHTFTILTTHASTSLNWLHDRMPVILGSKDYVDAWLNDVSVKLEEITAPYEGADLVWYPVTSALGKASFDGPECIKEVHIGATDKPISKFFTKKSTAYDLSGKYENMSRELAHAYKAAKVECDGSVENQGGDGNQHQSREKQTTNCTIKDEPVTLEPQVFETPWSIEHEDTMTLAGATLETQRDLGFKRKIEDTQVEASMKPSQLTRKEKAVKAASDGQASLLSYFARKQGRSMK

SEQ ID NO: 15697 - DNA, 1352 bp, Zea mays subsp. mays
  misc_feature (1)..(1352): Ceres Seq. ID no. 12383204
  misc_feature (1)..(1352): Ortholog of  Ceres SEQ ID NO 12583469 as cited in SEQ ID NO 51031
  misc_feature (1)..(1352): Ortholog of  Ceres SEQ ID NO 13597389 as cited in SEQ ID NO 63426
  misc_feature (1)..(1352): Ortholog of  Ceres SEQ ID NO 13595998 as cited in SEQ ID NO 68161
agcacagagtggtaagcatggcgagcaccacagacaaccgtggcctcctcgtcgtggccgccgccaccgtcgtcctcgccgtggccgcggccccggcgcatacaccggggggcaatactgctacccctccgccgccgttccggacggtgtacgcgttcggcgactcgttcacggacacggggaacacgcggtcgacgacggggccctactcgttcggctacgtgtccagcccgccctacggcgccaccttcttccaccgctcgaccaaccgctactccgacggccgcctggtggtggacttcctggccgaggcgctggcgctgccgtcctacctcccgccctacctcgccgtgtccgtctccaacgccaacgccacggcggccggagccggcgtcaacttcgcggtggccggcgccacggccatcgagcacgacttcttcgcgcggaacaacctcagcatcgacgtcacgccgcagtccatcatgacgcagtctgggctggttcgacgcgcacctgctccgctcctcctcctccgccgccgccgccgccgacgcgctcttctgggtgggcgagatcggcgccaacgactacgcctacacagtggtcgcccgcgacaccatccctcccaagctcgtccgcaccatggccgtccagagggtcaccgccttcgtcgagggcctgctggagcgaggcgccaagtacgtgatcgtgcaggggctgccgctgacggggtgcctgccgctggccatgacgctggcgcgcgccgacgaccgcgacgccgtgggctgcgccgcctccgtcaaccgccagagctacgcgcacaaccgccgcctcctggcggccctccgcgcgctgcgccgccgccacccgggcgccgtcgttgcgtacgccgattactacgccgcgcacctcgccgtgatgcggagccccgcgcgccacggcttcgccgagcccttccgcacctgctgcggctccggcggcggcgcctacaacttcgacctcttcgccacctgcggctcgccgcaggtcaccacggcctgcgcgcgccccgccgagtacgtcaactgggacggcgtccacatgacggaggccatgtacaaggtcgtcgccggcatgttcttcagtggcgacggctactgccgcccagcgttcaaggacctgctggccatgaaagcccgccaggggaagccgtgattttgagacaatcagaatgcacgttccaattacaataagtagagctgcatgcgtgacgaatccatgtcatcttcatcgtgaacccttaaccatttatcaggcatttataattggatccacatacgtatgatgatgatgagcacaaaggatttaacttc

SEQ ID NO: 15698 - protein, 409 aa, Zea mays subsp. mays
  peptide (1)..(409): Ceres Seq. ID no. 12383205
HRVVSMASTTDNRGLLVVAAATVVLAVAAAPAHTPGGNTATPPPPFRTVYAFGDSFTDTGNTRSTTGPYSFGYVSSPPYGATFFHRSTNRYSDGRLVVDFLAEALALPSYLPPYLAVSVSNANATAAGAGVNFAVAGATAIEHDFFARNNLSIDVTPQSIMTQSGLVRRAPAPLLLLRRRRRRRALLGGRDRRQRLRLHSGRPRHHPSQARPHHGRPEGHRLRRGPAGARRQVRDRAGAAADGVPAAGHDAGARRRPRRRGLRRLRQPPELRAQPPPPGGPPRAAPPPPGRRRCVRRLLRRAPRRDAEPRAPRLRRALPHLLRLRRRRLQLRPLRHLRLAAGHHGLRAPRRVRQLGRRPHDGGHVQGRRRHVLQWRRLLPPSVQGPAGHESPPGEAVILRQSECTFQLQ

SEQ ID NO: 15699 - protein, 404 aa, Zea mays subsp. mays
  peptide (1)..(404): Ceres Seq. ID no. 12383206
MASTTDNRGLLVVAAATVVLAVAAAPAHTPGGNTATPPPPFRTVYAFGDSFTDTGNTRSTTGPYSFGYVSSPPYGATFFHRSTNRYSDGRLVVDFLAEALALPSYLPPYLAVSVSNANATAAGAGVNFAVAGATAIEHDFFARNNLSIDVTPQSIMTQSGLVRRAPAPLLLLRRRRRRRALLGGRDRRQRLRLHSGRPRHHPSQARPHHGRPEGHRLRRGPAGARRQVRDRAGAAADGVPAAGHDAGARRRPRRRGLRRLRQPPELRAQPPPPGGPPRAAPPPPGRRRCVRRLLRRAPRRDAEPRAPRLRRALPHLLRLRRRRLQLRPLRHLRLAAGHHGLRAPRRVRQLGRRPHDGGHVQGRRRHVLQWRRLLPPSVQGPAGHESPPGEAVILRQSECTFQLQ

SEQ ID NO: 15700 - protein, 249 aa, Zea mays subsp. mays
  peptide (1)..(249): Ceres Seq. ID no. 12383207
MTQSGLVRRAPAPLLLLRRRRRRRALLGGRDRRQRLRLHSGRPRHHPSQARPHHGRPEGHRLRRGPAGARRQVRDRAGAAADGVPAAGHDAGARRRPRRRGLRRLRQPPELRAQPPPPGGPPRAAPPPPGRRRCVRRLLRRAPRRDAEPRAPRLRRALPHLLRLRRRRLQLRPLRHLRLAAGHHGLRAPRRVRQLGRRPHDGGHVQGRRRHVLQWRRLLPPSVQGPAGHESPPGEAVILRQSECTFQLQ

SEQ ID NO: 15701 - DNA, 1671 bp, Zea mays subsp. mays
  misc_feature (1)..(1671): Ceres Seq. ID no. 12352733
  misc_feature (1)..(1671): Ortholog of  Ceres SEQ ID NO 15170107 as cited in SEQ ID NO 67639
accaagcgcccaacaactgccgccccaagccaagggaagggaaaaggctatcgttctcgtcagtcgtcacgagagccgcgacggcgcgcatggcggcgacggcagcggcgctccggtgctgcttccccggatcctccggtgtcggtagtggcttcgtcaagcccaactcctccaggcgaggctggtgcgcagcggccgtggcggcgccgtcgcgggaggcggaaccggtttcgtcgctggggcaccgcacccgcgtcgacttccccatccttcaccaggaatttgatgatgccaaattagtttacttcgacaatggtgcaacatcgcagaaaccatgtagtgtgatgaaaacattagatgagtactaccgatcgtacaattcgaatgttcatcgtggtatccatgcactcaggctactcatgcatatgaggatgcaagaagaaaagttgcaaattttgtcaacgcagctgatagcagagagattgttttcactcgtaatgctactgaagctattaatctggtagcctattcatggggactatctaacttgaaagaaggagatgaaattgttcttacagttgcagagcatcatagtgctattgttccatggcaatttgtttcccagaagactggtgccaccttaaaatatgttggattgactaaagaaaatgtcccagacattgagcagttaaaagggtttctgtcgaacaagacaaagatagttgttgttcatcatgtctcaaatgttctaggttccatgcttcctatcgaggagattgtaacatggtcaaacagagttggagctaaagtccttgtagatgcttgccaaagtgttccccatatgccagttgatgttcagaaacttggcgcggactttcttgtcgcatcctctcataagatgtgtggccctacaggcgtcggatttttgcatggtaaatttgagattttgtcgtctatggagcctttcttaggtggtggtgaaatgattgcggatgtattcgaagacaaatccacatatgctgagcctccctctagatttgaggctggaactcctgcaattggagaagctataggactgggagcagccatcgactatttatcatgcattggcatggagcagatccacgaatatgagaaagagctggggacatacctctacgaaagccttctctctgttccaaatgtccagatatatggcccggcgccttcccagactgtccaccgtgctccgttgtgctccttcaatatcgagaacgtccatcctacagatatcgcagagattcttgatctgcagcatagcgtagcgattcggtcggggcatcactgcgcgcagatcttgcataggacccttggcatcaacgcaagtgctcgtgcgagtcttcacttctacaacacaaaagacgaggtggataccttcgtcgacgcgcttaaagccaccgttgatttcctcacggatcgatactagtgcggttcagttcacttcccttttttttttgccagtttcatcgctctctcgtttgaactgttgtatgcacacacaaaaaagtatgcatatatatttggtataaagaaaacatacaaagtgtacggcttggcaaagtgagctcccttatttggagttttggactgtactcccttatttggcggttgttgttgaattaaacgtagttc

SEQ ID NO: 15702 - protein, 235 aa, Zea mays subsp. mays
  peptide (1)..(235): Ceres Seq. ID no. 12352734
MLPIEEIVTWSNRVGAKVLVDACQSVPHMPVDVQKLGADFLVASSHKMCGPTGVGFLHGKFEILSSMEPFLGGGEMIADVFEDKSTYAEPPSRFEAGTPAIGEAIGLGAAIDYLSCIGMEQIHEYEKELGTYLYESLLSVPNVQIYGPAPSQTVHRAPLCSFNIENVHPTDIAEILDLQHSVAIRSGHHCAQILHRTLGINASARASLHFYNTKDEVDTFVDALKATVDFLTDRY

SEQ ID NO: 15703 - protein, 207 aa, Zea mays subsp. mays
  peptide (1)..(207): Ceres Seq. ID no. 12352735
MPVDVQKLGADFLVASSHKMCGPTGVGFLHGKFEILSSMEPFLGGGEMIADVFEDKSTYAEPPSRFEAGTPAIGEAIGLGAAIDYLSCIGMEQIHEYEKELGTYLYESLLSVPNVQIYGPAPSQTVHRAPLCSFNIENVHPTDIAEILDLQHSVAIRSGHHCAQILHRTLGINASARASLHFYNTKDEVDTFVDALKATVDFLTDRY

SEQ ID NO: 15704 - protein, 188 aa, Zea mays subsp. mays
  peptide (1)..(188): Ceres Seq. ID no. 12352736
MCGPTGVGFLHGKFEILSSMEPFLGGGEMIADVFEDKSTYAEPPSRFEAGTPAIGEAIGLGAAIDYLSCIGMEQIHEYEKELGTYLYESLLSVPNVQIYGPAPSQTVHRAPLCSFNIENVHPTDIAEILDLQHSVAIRSGHHCAQILHRTLGINASARASLHFYNTKDEVDTFVDALKATVDFLTDRY

SEQ ID NO: 15705 - DNA, 1847 bp, Zea mays subsp. mays
  misc_feature (1)..(1847): Ceres Seq. ID no. 12362207
  misc_feature (1)..(1847): Ortholog of  Ceres SEQ ID NO 15177221 as cited in SEQ ID NO 53046
  misc_feature (1)..(1847): Ortholog of  Ceres SEQ ID NO 15170209 as cited in SEQ ID NO 58562
  misc_feature (1)..(1847): Ortholog of  Ceres SEQ ID NO 14315134 as cited in SEQ ID NO 59476
  misc_feature (1)..(1847): Ortholog of  Ceres SEQ ID NO 12616332 as cited in SEQ ID NO 63449
  misc_feature (1)..(1847): Ortholog of  Ceres SEQ ID NO 13597498 as cited in SEQ ID NO 64648
  misc_feature (1)..(1847): Ortholog of  Ceres SEQ ID NO 14308053 as cited in SEQ ID NO 67790
gcacgagaccattacctagaacatcctaatcgaaaagtttttgtcagtcatgcggccagcttcctccccgctagctcactagccaggcccgggcgcctcaccgccacggtgaccgccgccttctttgacgcctgcggcctgcctaaccccgaagtctctcagtgcgtgtttggccgaaatccacggggagggcttgtcctcgcctttgctgagctgctccggagcggagccgtgcctacttgagttcaggtttgtttcgccatccgaggccaagattcggagcgtcgccgaagggaggcgatgaagggcaaaggcgggccggtggacaggaggtcctccgccagatggaggctgctggtgctctgcgcattcagcttcggcatcggcatgatcttcaccgaccggttctggacagcaccggataccagtagccataccatgtctcaacgctggaggcaagagcaagagctccaacttgtatcagaagattgcaacacaaagaggaagcatggggaagacaaggatataatgggagaggtaaccaagactcatgaagccatacaatcattggataagtccatctcaacgctgcagatggagcttgcagcaaagcggagcacacttgagctactccgatctagtggttcaccagtaacctctgaaactagccaaccaaggaaaaaggcttttgttgtcattggagtcaacactgcattcagcagccgcaagcgccgtgattctgtccgggagacatggatgcctcaaggagaaaagctgcaacaattagaagaacagaagggaatagttatccgcttcactatcgggcacagtgctacatccaacagtatactggacaaagctatagattcagaggacgctcagcatcatgactttcttaggctggaccatgttgagggatatcatgaactctcagctaagacaaaaatattcttctctactgctgttggcatctgggacgctgacttctacgtcaaggtcgatgatgatgtgcatgtaaacctaggaatgcttgccactacccttgctcggcataaatcgaaaccaagaacttatattggctgcatgaagtcaggcccagttcttgctgacaagaatgtgaagtaccatgaacctgagtactggaaatttggggaggaaggaaataagtacttccgtcatgctacagggcagatatatgccatttcgaaagatctggcgacttatatctcaatcaatcggcctatcttgcacaaatacgcaaacgaagacgtgtcgcttggatcgtggttcatcggtttggaagttaatcacatcgatgaaaggaacatgtgctgtggaactccaccagactgtgagtggaaagggcaagctggcaatgtctgcgtagcgtctttcgactggagctgcagtggcatatgcaagtctgttgagaggatcaaagatgtacatgctcgctgcggcgaaggggattcagcagtttggagtgctcttgtctagcacataccctcctttgcccgtaaatatgtagcataattggtaagctttggtggtggtggacaccagcataggcgttaggcaactccccaagtaaacttgacaaaacccagagatcatgatcatgccccgtggaacattgccaatggtaactctggctggaaaaattctgcgtaattttggtctgtcactgttcatgaccttcggacttcggtggtgttaggagctccaaggtagggttgcaactgatgttactgatcttacatgtagggggagagtttctcagctgatgcgagatcatgtaatgcagaggacattgttttatgcaaattttgacattcttttgcgggttc

SEQ ID NO: 15706 - protein, 398 aa, Zea mays subsp. mays
  peptide (1)..(398): Ceres Seq. ID no. 12362208
MKGKGGPVDRRSSARWRLLVLCAFSFGIGMIFTDRFWTAPDTSSHTMSQRWRQEQELQLVSEDCNTKRKHGEDKDIMGEVTKTHEAIQSLDKSISTLQMELAAKRSTLELLRSSGSPVTSETSQPRKKAFVVIGVNTAFSSRKRRDSVRETWMPQGEKLQQLEEQKGIVIRFTIGHSATSNSILDKAIDSEDAQHHDFLRLDHVEGYHELSAKTKIFFSTAVGIWDADFYVKVDDDVHVNLGMLATTLARHKSKPRTYIGCMKSGPVLADKNVKYHEPEYWKFGEEGNKYFRHATGQIYAISKDLATYISINRPILHKYANEDVSLGSWFIGLEVNHIDERNMCCGTPPDCEWKGQAGNVCVASFDWSCSGICKSVERIKDVHARCGEGDSAVWSALV

SEQ ID NO: 15707 - protein, 369 aa, Zea mays subsp. mays
  peptide (1)..(369): Ceres Seq. ID no. 12362209
MIFTDRFWTAPDTSSHTMSQRWRQEQELQLVSEDCNTKRKHGEDKDIMGEVTKTHEAIQSLDKSISTLQMELAAKRSTLELLRSSGSPVTSETSQPRKKAFVVIGVNTAFSSRKRRDSVRETWMPQGEKLQQLEEQKGIVIRFTIGHSATSNSILDKAIDSEDAQHHDFLRLDHVEGYHELSAKTKIFFSTAVGIWDADFYVKVDDDVHVNLGMLATTLARHKSKPRTYIGCMKSGPVLADKNVKYHEPEYWKFGEEGNKYFRHATGQIYAISKDLATYISINRPILHKYANEDVSLGSWFIGLEVNHIDERNMCCGTPPDCEWKGQAGNVCVASFDWSCSGICKSVERIKDVHARCGEGDSAVWSALV

SEQ ID NO: 15708 - protein, 352 aa, Zea mays subsp. mays
  peptide (1)..(352): Ceres Seq. ID no. 12362210
MSQRWRQEQELQLVSEDCNTKRKHGEDKDIMGEVTKTHEAIQSLDKSISTLQMELAAKRSTLELLRSSGSPVTSETSQPRKKAFVVIGVNTAFSSRKRRDSVRETWMPQGEKLQQLEEQKGIVIRFTIGHSATSNSILDKAIDSEDAQHHDFLRLDHVEGYHELSAKTKIFFSTAVGIWDADFYVKVDDDVHVNLGMLATTLARHKSKPRTYIGCMKSGPVLADKNVKYHEPEYWKFGEEGNKYFRHATGQIYAISKDLATYISINRPILHKYANEDVSLGSWFIGLEVNHIDERNMCCGTPPDCEWKGQAGNVCVASFDWSCSGICKSVERIKDVHARCGEGDSAVWSALV

SEQ ID NO: 15709 - DNA, 1368 bp, Zea mays subsp. mays
  misc_feature (1)..(1368): Ceres Seq. ID no. 12407575
  misc_feature (1)..(1368): Ortholog of  Ceres SEQ ID NO 13595877 as cited in SEQ ID NO 67702
  misc_feature (1)..(1368): Ortholog of  Ceres SEQ ID NO 13654367 as cited in SEQ ID NO 67993
attaacaaagctgcagcttcgaggcctcacctcccgagccgaaagcgattcatagcatcatctattcatccgcgcgtggtgcaatggaggaggctcccacgacgccgccgcggaaggcgaagccgctgatgtcgcgcctcatgcggctttccatcaaggtcgtggacagggtcaccgacgccacccgccgggcagacgggacgctgaatcgttttgcgctctcgctgctggacccgcgtgtcccggccatctcctccccttgccgtggcgtcgcctcccgggacgtcatcctcgacggcgccctccgcctccgcgcgcgcctattccacccggccacgacgtcaaaatccacggcccctctccccgtgatcgtctttttccacggcggcgggttcgcgtacctctccgcggcgtccccggcctacgacgccgcgtgccgccgcatcgcgcggtacgcctccgcggcagtgctctcggtcgactaccgccgcgctcccgagcaccggttcccgggcgccctacgatgacggtatcgcggcgctgcgcttcctcgacgatccaaagaaccaccccaccccgctcgacgtgtcccgcagcttcgtcgcgggcgacagcgctggcggcaacatcgcccaccacgtggcccgccgctacgcgtccgacgtcgcctcgttcaggaacatccgtgtcgccggcctgatcgccatccagcccttcttcggcggcgaggagcggacaccctccgagctccgcctagacggcgccgcgcccatcgtgtccatcgaccgcaccgactggatgtggcgcgcgttcctgccgcccggctgcgaccgtacccacgagggtgccaacttcgcatccccagcagccgccgccggcctcgactcccaggcgttccctcccgtcctgctcgtcatcggtggcttcgacccgctgcaggattggcagcgccggtacggcgagatgctgaagagcatgggcaaggatgtgcgagtggttgagtaccctgacgccatccacgccttctacgtcttccccgggttcgacaacgcgcgagatttcatgatacgcatcgccaagttcgtcgccgaaagcgccagcggcagaagtagcagctagcgagttgtcggagctggagatacagtctgcacactgtgcagtggtcaggtgtttggtgcaagtggcgtgtcgtgcgtcgcaatttgcagccttggctgtggcgttttggaggatgcggcggtatggttgcgtggttgagtgagagaagaagatgtgtctggttgttattgttaactttcgtaaaagtttggtctgataagtctgatgaatgatgtaattttaattaactaatcaagttggtgatttcgt

SEQ ID NO: 15710 - protein, 147 aa, Zea mays subsp. mays
  peptide (1)..(147): Ceres Seq. ID no. 12407576
MEEAPTTPPRKAKPLMSRLMRLSIKVVDRVTDATRRADGTLNRFALSLLDPRVPAISSPCRGVASRDVILDGALRLRARLFHPATTSKSTAPLPVIVFFHGGGFAYLSAASPAYDAACRRIARYASAAVLSVDYRRAPEHRFPGALR

SEQ ID NO: 15711 - protein, 132 aa, Zea mays subsp. mays
  peptide (1)..(132): Ceres Seq. ID no. 12407577
MSRLMRLSIKVVDRVTDATRRADGTLNRFALSLLDPRVPAISSPCRGVASRDVILDGALRLRARLFHPATTSKSTAPLPVIVFFHGGGFAYLSAASPAYDAACRRIARYASAAVLSVDYRRAPEHRFPGALR

SEQ ID NO: 15712 - protein, 128 aa, Zea mays subsp. mays
  peptide (1)..(128): Ceres Seq. ID no. 12407578
MRLSIKVVDRVTDATRRADGTLNRFALSLLDPRVPAISSPCRGVASRDVILDGALRLRARLFHPATTSKSTAPLPVIVFFHGGGFAYLSAASPAYDAACRRIARYASAAVLSVDYRRAPEHRFPGALR

SEQ ID NO: 15713 - DNA, 1171 bp, Zea mays subsp. mays
  misc_feature (1)..(1171): Ceres Seq. ID no. 12404842
  misc_feature (1)..(1171): Ortholog of  Ceres SEQ ID NO 13597185 as cited in SEQ ID NO 63657
accaacgccaccaaaaccaacactccgatggatgttttcaccaagcaactcctccccatgcctcaccagcgggaccccaactacccttcctcttccacctcttcctcctcgtcgtcgtcctcctccacgcccccatctcgccctcaccaccgtgcgcaaccccagccccacaacctcccccagtcccccagacccgtcccgcgcaccatcgacaccaccccgttccccaccaccttcgtccaggccgacaccacctcgttcaagcaggtcgtccagatgctcaccggcgccgagcagccggccaacaacgacgcgacgacggcgggcgcagccgctgccgctgccgccaacggcggtggcgccggcgcccaggcggccagcggtggaccgtgctgccggcccaagaagccgtcgttcaagctgtacgagcggcggagcagcctgaagaacctgaagatgatcgcgccgctggcgatgggctcgccgccgtcgccgtcgccgcggagggcggcgccggagatcctgtcgccgagcgtgctggacttcccgtccctcacgctcagcccggtgacgccgctcgccggcgacccctttaaccgctcgccggcgtcggcgtcgtcctccgaggaggccgagcgcgcggccatcgccgagaggggcttcttcctccacccgtccccgaggggcgccgagcccccgcgcctgctcccgctcttccccgtcgtctcgccccggatggccggcgccgcggcggcgccgtcgtccgagtgaagatcccccgacgcgggcgcgcgcctgctctaccgtagccgccgccgccgccaccaccaccaccatcagtactactactactacaacaaccgtcgccgtcgccgtaccgtccgtccttgtttcgtgaggtgcttgctttgctgttcttcttgatcgacgccgctgtaatttttgcccccttcttgcttttcttggaacgggcgaggaagggagttctctctctctctctctttttttttgcttcgtttcggagcggcgacacgcgagcgatcagcgatctgacgatccaggctcgctcggttcctgatcgctcgcgtcgcgggagcctccggccgggatgaaatgatgggatggatgaattagacagttaataattaatgaagcctaatctgaagatttg

SEQ ID NO: 15714 - protein, 256 aa, Zea mays subsp. mays
  peptide (1)..(256): Ceres Seq. ID no. 12404843
TNATKTNTPMDVFTKQLLPMPHQRDPNYPSSSTSSSSSSSSSTPPSRPHHRAQPQPHNLPQSPRPVPRTIDTTPFPTTFVQADTTSFKQVVQMLTGAEQPANNDATTAGAAAAAAANGGGAGAQAASGGPCCRPKKPSFKLYERRSSLKNLKMIAPLAMGSPPSPSPRRAAPEILSPSVLDFPSLTLSPVTPLAGDPFNRSPASASSSEEAERAAIAERGFFLHPSPRGAEPPRLLPLFPVVSPRMAGAAAAPSSE

SEQ ID NO: 15715 - protein, 247 aa, Zea mays subsp. mays
  peptide (1)..(247): Ceres Seq. ID no. 12404844
MDVFTKQLLPMPHQRDPNYPSSSTSSSSSSSSSTPPSRPHHRAQPQPHNLPQSPRPVPRTIDTTPFPTTFVQADTTSFKQVVQMLTGAEQPANNDATTAGAAAAAAANGGGAGAQAASGGPCCRPKKPSFKLYERRSSLKNLKMIAPLAMGSPPSPSPRRAAPEILSPSVLDFPSLTLSPVTPLAGDPFNRSPASASSSEEAERAAIAERGFFLHPSPRGAEPPRLLPLFPVVSPRMAGAAAAPSSE

SEQ ID NO: 15716 - protein, 237 aa, Zea mays subsp. mays
  peptide (1)..(237): Ceres Seq. ID no. 12404845
MPHQRDPNYPSSSTSSSSSSSSSTPPSRPHHRAQPQPHNLPQSPRPVPRTIDTTPFPTTFVQADTTSFKQVVQMLTGAEQPANNDATTAGAAAAAAANGGGAGAQAASGGPCCRPKKPSFKLYERRSSLKNLKMIAPLAMGSPPSPSPRRAAPEILSPSVLDFPSLTLSPVTPLAGDPFNRSPASASSSEEAERAAIAERGFFLHPSPRGAEPPRLLPLFPVVSPRMAGAAAAPSSE

SEQ ID NO: 15717 - DNA, 1415 bp, Zea mays subsp. mays; identical to SEQ ID NO: 8064
  misc_feature (1)..(1415): Ceres Seq. ID no. 12406615
  misc_feature (1)..(1415): Ortholog of  Ceres SEQ ID NO 12612333 as cited in SEQ ID NO 56421

SEQ ID NO: 15718 - protein, 336 aa, Zea mays subsp. mays; identical to SEQ ID NO: 8065
  peptide (1)..(336): Ceres Seq. ID no. 12406616

SEQ ID NO: 15719 - protein, 320 aa, Zea mays subsp. mays; identical to SEQ ID NO: 8066
  peptide (1)..(320): Ceres Seq. ID no. 12406617

SEQ ID NO: 15720 - protein, 208 aa, Zea mays subsp. mays; identical to SEQ ID NO: 8067
  peptide (1)..(208): Ceres Seq. ID no. 12406618

SEQ ID NO: 15721 - DNA, 1076 bp, Zea mays subsp. mays
  misc_feature (1)..(1076): Ceres Seq. ID no. 12407567
  misc_feature (1)..(1076): Ortholog of  Ceres SEQ ID NO 15173035 as cited in SEQ ID NO 56029
  misc_feature (1)..(1076): Ortholog of  Ceres SEQ ID NO 12608745 as cited in SEQ ID NO 58289
  misc_feature (1)..(1076): Ortholog of  Ceres SEQ ID NO 13586951 as cited in SEQ ID NO 0
accttgctttgctcgcactcgcacacagttgcgagcgcattgcttgcattggcgcagccgcaggccgcagcacgaagctagccagtaggcggtagatggcgagcagcgcggggaaccgcttcctgaggcagctgagcgcgagcaacggcgacgaagcggtctgcggcggcctgcagatggaccagcaggagtacggcggcgccggcgtggggaggaggggatcccggcggtggtcgaagaagcgggccgccgccgccgccgccgcgaggggctacggcgccggcagcgggaatggcgtgaagcagccggcctctgccgcggggaagcgggtgatggtggtggtggacgagagctcgggagccaaccacgccatgatgtgggcgctcacccacgtcgccgacaagggggacttcctcacgctgctccacgtcctgccgcgctccggcagcggcaggggcgaggaggcctcctccctcgccaactcgctcggcacgctctgcaaggcctccaggccagaggtggaggtcgaagcgcttgtgatccaagggcccaagctgggcaccgtgctcagccaggtgaagaagctggaggcctccgtgctggtgctcagccagtgcaggccatctccctgctggttaagctgcttcctgcggagcagcggcgaggagtttgtggagcagtgcatcaaccaggcggagtgcctgacgctggcggtgaggaagcagagcaagggcgtctgtgggtacctcatcagcacccggtggcagaagaacttctggctcctggcctgacaaccatgcattttacctagctagttactactgctacatgatcacatttgttttaagtcactcccgtatatgtgctgtcatttcgtgtcatcaagtgcgtcacaagaaagaccatctctctctctccttcatcctgttgtaaagcgaaaagagcctccgaatctgaccacctttctacgaacctgtatcttccctgcaagtctttagcgtgcgtgtagtactgtgatctgcactgaacaatcatgtaatgctgcataaatgaccaattctgttgtaaaaaaaatt

SEQ ID NO: 15722 - protein, 231 aa, Zea mays subsp. mays
  peptide (1)..(231): Ceres Seq. ID no. 12407568
MASSAGNRFLRQLSASNGDEAVCGGLQMDQQEYGGAGVGRRGSRRWSKKRAAAAAAARGYGAGSGNGVKQPASAAGKRVMVVVDESSGANHAMMWALTHVADKGDFLTLLHVLPRSGSGRGEEASSLANSLGTLCKASRPEVEVEALVIQGPKLGTVLSQVKKLEASVLVLSQCRPSPCWLSCFLRSSGEEFVEQCINQAECLTLAVRKQSKGVCGYLISTRWQKNFWLLA

SEQ ID NO: 15723 - protein, 204 aa, Zea mays subsp. mays
  peptide (1)..(204): Ceres Seq. ID no. 12407569
MDQQEYGGAGVGRRGSRRWSKKRAAAAAAARGYGAGSGNGVKQPASAAGKRVMVVVDESSGANHAMMWALTHVADKGDFLTLLHVLPRSGSGRGEEASSLANSLGTLCKASRPEVEVEALVIQGPKLGTVLSQVKKLEASVLVLSQCRPSPCWLSCFLRSSGEEFVEQCINQAECLTLAVRKQSKGVCGYLISTRWQKNFWLLA

SEQ ID NO: 15724 - protein, 152 aa, Zea mays subsp. mays
  peptide (1)..(152): Ceres Seq. ID no. 12407570
MVVVDESSGANHAMMWALTHVADKGDFLTLLHVLPRSGSGRGEEASSLANSLGTLCKASRPEVEVEALVIQGPKLGTVLSQVKKLEASVLVLSQCRPSPCWLSCFLRSSGEEFVEQCINQAECLTLAVRKQSKGVCGYLISTRWQKNFWLLA

SEQ ID NO: 15725 - DNA, 1314 bp, Zea mays subsp. mays
  misc_feature (1)..(1314): Ceres Seq. ID no. 12363419
  misc_feature (1)..(1314): Ortholog of  Ceres SEQ ID NO 13600220 as cited in SEQ ID NO 0
gcacgagaccattacctagaacatcctaatcgaaaaatttttcgacatgccgcgcgagctggaggtccggtacggtggctggctggacgctgggatccgggaggagtacgagcactacgcggacgtctgcttcggggcgttcggcgaccgggtgcggctctggacgaccttcaacgagcccaacctgctggtcaagttccagtacatgctgggcgcgtacccgcccagccgctgctccccgccgttcggcagctgcgggagcggcgactcgcgccgggagccgtacgccgcggcgcacaacatcatcatgtcccccgccgccgtccgcgcctacagggacaagtaccaggcgacgcagggcggctccgtcgggatcgtggccgccatgaaatggtacgagccgctgacgaactccacggacgacatcctggccgcgcggcgcgcgcaggctttcgagacggactggtttctggagccgatattcttgggcgattaccccggagcgatgcgggagatcctgggatcggacctgccgaccttcaccgcggaggagaaggcgctgctgctgcggtacaaggcggacttcatcgggctgaaccactacacggcgatctacgccagggactgcctgcgctccccgtgcaacctcgggtcgtacgaagggaacgccttcgtctcggcgactggggaaagggacgacggggtcaagatcgggggagatactgcgctggcaggtttcttcgacgtcccagaggccatagagctggctatccagtacgtgaacgggaggtacaagggcacgcctgtgtatattactgagaacggttactcgcagtggagtgatgccagcagggaggagctgatcaacgatgtgaggagaaagaactacctgcagggctacatcacgtatctatccaaagcagtcaggaacggagcaaacgtgcggggctacttcgtgtggacgctgctggacaacttcgagtgggcgttcggttacaggttgaagtacgggctgtaccacgtcgacttcgacacacaggagaggacgccccggatgtctgcgaggtggtaccagggcttcctcacggcccgcaccagccagcgcgacgaagcagcgcaggcacggagagcagactcgtgatgaaccattcccacttccaccgatatatatcatcgaacgccttgctagacagccgagggtctcatgactcgtgctcatttccgtcctcgcggtatattggaataactgtggctgtggtgtcctaatgtctgtatatgcatatatcatatattttgacctcaaaagaggtttag

SEQ ID NO: 15726 - protein, 364 aa, Zea mays subsp. mays
  peptide (1)..(364): Ceres Seq. ID no. 12363420
MPRELEVRYGGWLDAGIREEYEHYADVCFGAFGDRVRLWTTFNEPNLLVKFQYMLGAYPPSRCSPPFGSCGSGDSRREPYAAAHNIIMSPAAVRAYRDKYQATQGGSVGIVAAMKWYEPLTNSTDDILAARRAQAFETDWFLEPIFLGDYPGAMREILGSDLPTFTAEEKALLLRYKADFIGLNHYTAIYARDCLRSPCNLGSYEGNAFVSATGERDDGVKIGGDTALAGFFDVPEAIELAIQYVNGRYKGTPVYITENGYSQWSDASREELINDVRRKNYLQGYITYLSKAVRNGANVRGYFVWTLLDNFEWAFGYRLKYGLYHVDFDTQERTPRMSARWYQGFLTARTSQRDEAAQARRADS

SEQ ID NO: 15727 - protein, 311 aa, Zea mays subsp. mays
  peptide (1)..(311): Ceres Seq. ID no. 12363421
MLGAYPPSRCSPPFGSCGSGDSRREPYAAAHNIIMSPAAVRAYRDKYQATQGGSVGIVAAMKWYEPLTNSTDDILAARRAQAFETDWFLEPIFLGDYPGAMREILGSDLPTFTAEEKALLLRYKADFIGLNHYTAIYARDCLRSPCNLGSYEGNAFVSATGERDDGVKIGGDTALAGFFDVPEAIELAIQYVNGRYKGTPVYITENGYSQWSDASREELINDVRRKNYLQGYITYLSKAVRNGANVRGYFVWTLLDNFEWAFGYRLKYGLYHVDFDTQERTPRMSARWYQGFLTARTSQRDEAAQARRADS

SEQ ID NO: 15728 - protein, 277 aa, Zea mays subsp. mays
  peptide (1)..(277): Ceres Seq. ID no. 12363422
MSPAAVRAYRDKYQATQGGSVGIVAAMKWYEPLTNSTDDILAARRAQAFETDWFLEPIFLGDYPGAMREILGSDLPTFTAEEKALLLRYKADFIGLNHYTAIYARDCLRSPCNLGSYEGNAFVSATGERDDGVKIGGDTALAGFFDVPEAIELAIQYVNGRYKGTPVYITENGYSQWSDASREELINDVRRKNYLQGYITYLSKAVRNGANVRGYFVWTLLDNFEWAFGYRLKYGLYHVDFDTQERTPRMSARWYQGFLTARTSQRDEAAQARRADS

SEQ ID NO: 15729 - DNA, 1726 bp, Zea mays subsp. mays
  misc_feature (1)..(1726): Ceres Seq. ID no. 12363262
  misc_feature (1)..(1726): Ortholog of  Ceres SEQ ID NO 15178264 as cited in SEQ ID NO 52395
  misc_feature (1)..(1726): Ortholog of  Ceres SEQ ID NO 13598642 as cited in SEQ ID NO 64264
  misc_feature (1)..(1726): Ortholog of  Ceres SEQ ID NO 13663413 as cited in SEQ ID NO 66334
  misc_feature (1)..(1726): Ortholog of  Ceres SEQ ID NO 12779833 as cited in SEQ ID NO 66670
  misc_feature (1)..(1726): Ortholog of  Ceres SEQ ID NO 15169501 as cited in SEQ ID NO 67032
  misc_feature (1)..(1726): Ortholog of  Ceres SEQ ID NO 13590666 as cited in SEQ ID NO 68761
gcacgagaccattacctagaacatcctaatcgaaaaacactctcctcgcgtttcccgccattaactctgcaacctattctcttcctcgcgaaaccgcttccttcgattcattccccctctcccctctccaagacccaaaaccctaacccctacgacccccgtgaccgccgccgccgtcgatgcctgcgctctccgacgtcgcgcttcaggctgccatcgccggcaacctccgcctcctgaagctggtggcgagcaagatgaatctgcgcgaagcgaaggacgccgctgggcggaacgcgctccacctggccgcggagatgggccgtcttgaggtttgcaggttcctggtggaggaatcgggcttcgaggtgaacttcgcctgcgccgaaggcgggtcgccggtccactgcgccgcggccgggggcagcgagagcgtcttgggctaccttctcgaccacggtggcgaccctgtgatgccggactccatgggctccactccactgcatgatgcggcagaggaagggcattgtgcggctgtgaggatgctgctgtccaagggtgtcgatgtggatccacacggctgtcgtgggacgccgctgcacttggcctgctccaatgaccgggatcaggttgttaggatcctgctggaacatggcgcagatcccaacaaagttgtcggtcatgtcctcccaccactcatgatggcatactgtggcggttctttgagatgcatgaagctactgattgaggctggtgcggatgtgaacttgattgctccttctggagtaattttggctcaggcagtttgtgatgggtcaactgagattgtcaagtttttgctagaggttggagctgatcctaacattcctgatgaggatgggaaaatcccgatcatgtacccagcatttaatgggcatcgggagcttgttgaaattctatttcctaagacaagaccagtttcatctttgccagactggagcgttgatgggattattagaagtatgaaagatctgtttttcaagcctcaggatgcagctgtggtggaaaaaaagatagctgatgcgaagtcacaagggaaggaagctttcgcaaggggagagtaccctgcagcagtatacttctataccatggtactagagaacgaccttgatgctactgcgtttgccaaccggagcctgtgctggttgcggctgagggagggggccaaggctctgttagatgctcaacagtgcaaaatgatacggcctcgttggtcgaaggcatggtatcgcgagggcgcggctctcagcttgctgaaggactaccaaggggcagtcaacgcgttcacggaagcattgaaactggatcctgcaagtttagagatcaagaaagccttaagggaggccaccgattccctggcgaacgttggccgctccggagaacagaacccatgagctgctgctgcatccatgtgctttatctcacgttaagaatcctctaacactatgtggctcagcctcatattatatgttgatatatgtcgccttaacgcactgctggagatactagtttcgatctcagcctatatgttttgctccttcgggatgcagcctaagatacatgtggcaaccaagtgaggttgggcagggtagcatatctatggactggttgaactattatatgtatctggatatctaagtgcacctgttgctcctagtaaagttgcagttctaatgaccccttcgtc

SEQ ID NO: 15730 - protein, 417 aa, Zea mays subsp. mays
  peptide (1)..(417): Ceres Seq. ID no. 12363263
MPALSDVALQAAIAGNLRLLKLVASKMNLREAKDAAGRNALHLAAEMGRLEVCRFLVEESGFEVNFACAEGGSPVHCAAAGGSESVLGYLLDHGGDPVMPDSMGSTPLHDAAEEGHCAAVRMLLSKGVDVDPHGCRGTPLHLACSNDRDQVVRILLEHGADPNKVVGHVLPPLMMAYCGGSLRCMKLLIEAGADVNLIAPSGVILAQAVCDGSTEIVKFLLEVGADPNIPDEDGKIPIMYPAFNGHRELVEILFPKTRPVSSLPDWSVDGIIRSMKDLFFKPQDAAVVEKKIADAKSQGKEAFARGEYPAAVYFYTMVLENDLDATAFANRSLCWLRLREGAKALLDAQQCKMIRPRWSKAWYREGAALSLLKDYQGAVNAFTEALKLDPASLEIKKALREATDSLANVGRSGEQNP

SEQ ID NO: 15731 - protein, 391 aa, Zea mays subsp. mays
  peptide (1)..(391): Ceres Seq. ID no. 12363264
MNLREAKDAAGRNALHLAAEMGRLEVCRFLVEESGFEVNFACAEGGSPVHCAAAGGSESVLGYLLDHGGDPVMPDSMGSTPLHDAAEEGHCAAVRMLLSKGVDVDPHGCRGTPLHLACSNDRDQVVRILLEHGADPNKVVGHVLPPLMMAYCGGSLRCMKLLIEAGADVNLIAPSGVILAQAVCDGSTEIVKFLLEVGADPNIPDEDGKIPIMYPAFNGHRELVEILFPKTRPVSSLPDWSVDGIIRSMKDLFFKPQDAAVVEKKIADAKSQGKEAFARGEYPAAVYFYTMVLENDLDATAFANRSLCWLRLREGAKALLDAQQCKMIRPRWSKAWYREGAALSLLKDYQGAVNAFTEALKLDPASLEIKKALREATDSLANVGRSGEQNP

SEQ ID NO: 15732 - protein, 371 aa, Zea mays subsp. mays
  peptide (1)..(371): Ceres Seq. ID no. 12363265
MGRLEVCRFLVEESGFEVNFACAEGGSPVHCAAAGGSESVLGYLLDHGGDPVMPDSMGSTPLHDAAEEGHCAAVRMLLSKGVDVDPHGCRGTPLHLACSNDRDQVVRILLEHGADPNKVVGHVLPPLMMAYCGGSLRCMKLLIEAGADVNLIAPSGVILAQAVCDGSTEIVKFLLEVGADPNIPDEDGKIPIMYPAFNGHRELVEILFPKTRPVSSLPDWSVDGIIRSMKDLFFKPQDAAVVEKKIADAKSQGKEAFARGEYPAAVYFYTMVLENDLDATAFANRSLCWLRLREGAKALLDAQQCKMIRPRWSKAWYREGAALSLLKDYQGAVNAFTEALKLDPASLEIKKALREATDSLANVGRSGEQNP

SEQ ID NO: 15733 - DNA, 1585 bp, Zea mays subsp. mays; identical to SEQ ID NO: 4558
  misc_feature (1)..(1585): Ceres Seq. ID no. 12381056
  misc_feature (1)..(1585): Ortholog of  Ceres SEQ ID NO 12610323 as cited in SEQ ID NO 56055

SEQ ID NO: 15734 - protein, 287 aa, Zea mays subsp. mays; identical to SEQ ID NO: 4559
  peptide (1)..(287): Ceres Seq. ID no. 12381057

SEQ ID NO: 15735 - protein, 278 aa, Zea mays subsp. mays; identical to SEQ ID NO: 4560
  peptide (1)..(278): Ceres Seq. ID no. 12381058

SEQ ID NO: 15736 - protein, 207 aa, Zea mays subsp. mays; identical to SEQ ID NO: 4561
  peptide (1)..(207): Ceres Seq. ID no. 12381059

SEQ ID NO: 15737 - DNA, 1274 bp, Zea mays subsp. mays
  misc_feature (1)..(1274): Ceres Seq. ID no. 12372822
  misc_feature (1)..(1274): Ortholog of  Ceres SEQ ID NO 15171289 as cited in SEQ ID NO 51570
ccaaccaaacttccggtcttctcttctccactacccacccgcctgcccgcccgccttctcctccaccactgccccgccgctaaccaaccactcgtgcgccacaagtctcccgtcgtggaatagggcaaaggccaggcatctcgcttctgtcctctgtcgaggggatcggacccgatcggagaaagaatgggctcggaggcggactgcgacaggatcaggggcccgtggagccccgaggaggacgacgcgctgcggcggctcgtggagcggcacggcgcgcgcaactggacggcgatcgggcgcgagatcccggggcggtcgggcaagtcgtgccgcctgcggtggtgcaaccagctgtcgccgcaggtggagcgccggcccttcacggcggaggaggacgcggccatcgtccgcgcccacgcccgcctcggcaaccgctgggccgccatcgcgcgcctcctccccggccgcaccgacaacgccgtcaagaaccactggaactgctcgctcaagcgcaagctcgccgccgcgtccgccccggcgggttcctccgacgtcgaggcgcgcccgaccaagcgcgtcagcctctcgcccgacagcccgtcggggtcggggtcggggtcagggtcagggtccgggtccgggtccgggtccgaccgtagcgacctgagccacggcgccggccaggtttaccgcccagtggcgcggtccggcgggttcgagccggcggactgcgcgatgagccgtccgctggaggaagaggaggaggaaaaggaggacccgctcacctccctcagcctctcgcttccaggcacggaccagcggttccaccacgaccgcgcccacagccagttccaggagctcccggcgtcgccgccctcgccctccccgcctccgccgccggttctctcggcgtacccgttcagccccgtgttcatggaggcgatgcaggagctgatccgcacggaggtgcagcggtacatggcgagcgtgggcgtgcgcgccgggtgcggcgccgccggcggggccgacctctgcatgccgcaactggtcgacggcgtcatgcgcgccgccgccgagcgggtcggccggatgcagtagcagtagctcctgccatcaaatgctcccgaaccgtcaatcgatcttctaggacgaacgcgcagcagctgttgttatcagtagcaaacttccaagttattattttcctttttttaaaactttattctctcgaaccgctgtgaaaccgaaacagcagtgaaaagagtcagcaactg

SEQ ID NO: 15738 - protein, 304 aa, Zea mays subsp. mays
  peptide (1)..(304): Ceres Seq. ID no. 12372823
MGSEADCDRIRGPWSPEEDDALRRLVERHGARNWTAIGREIPGRSGKSCRLRWCNQLSPQVERRPFTAEEDAAIVRAHARLGNRWAAIARLLPGRTDNAVKNHWNCSLKRKLAAASAPAGSSDVEARPTKRVSLSPDSPSGSGSGSGSGSGSGSGSDRSDLSHGAGQVYRPVARSGGFEPADCAMSRPLEEEEEEKEDPLTSLSLSLPGTDQRFHHDRAHSQFQELPASPPSPSPPPPPVLSAYPFSPVFMEAMQELIRTEVQRYMASVGVRAGCGAAGGADLCMPQLVDGVMRAAAERVGRMQ

SEQ ID NO: 15739 - protein, 222 aa, Zea mays subsp. mays
  peptide (1)..(222): Ceres Seq. ID no. 12372824
QPNFRSSLLHYPPACPPAFSSTTAPPLTNHSCATSLPSWNRAKARHLASVLCRGDRTRSEKEWARRRTATGSGARGAPRRTTRCGGSWSGTARATGRRSGARSRGGRASRAACGGATSCRRRWSAGPSRRRRTRPSSAPTPASATAGPPSRASSPAAPTTPSRTTGTARSSASSPPRPPRRVPPTSRRARPSASASRPTARRGRGRGQGQGPGPGPGPTVAT

SEQ ID NO: 15740 - DNA, 1200 bp, Zea mays subsp. mays
  misc_feature (1)..(1200): Ceres Seq. ID no. 12406443
  misc_feature (1)..(1200): Ortholog of  Ceres SEQ ID NO 13595626 as cited in SEQ ID NO 51116
gcacgagaccattacctagaacatcctaatcaaaaaactgaaccaaccaaccaccgctccttcttccttccttccttccttccccagttcccctcgtctcaccagtcaccaaggttccgagagcagagaaagataaaaaaaaggtaatccgacggaaacgacaagggcgcggcgagggcggggacagggtcggggaggccctgggcgcgggggcgccaagcgcatggcatcgtcgagggtgatgccgtcgtcctcgccgtcgcacacggcctctgatctcgcgcgcctagcgcaggccgccagcaggcccggcggcgggggcagcgggctgggctccatgaacgtggaggagctcctccgcggcatctacagcgacatgcccaccccggcgccgcccgcgtcggagcccgaacgcccgaggtcgccggccccggcgccggaggtcgccacgcggaggacggcggaggaggtgtggaaggagatcaccggcggaggtggcagtggggaacccgcgccccccgtggcggctcaggctgccgtccccgctggtggcgccggcggcccggagatgacgctggaggacttcctggctagggaggagggcgcggtgaaggaggatggggttagggtttcgggcccctctgcgccggccatggggttcctgggcggagcggagggcgtgggtgtgcctggcggcggaggcgggaggggaaggaancggcacctcatggatccagtggatcgcgccgcgatgcagcgacagaaacgaatgatcaaaaaccgcgagtctgctgcccggtcacgggagaggaagcaggcttatatcgccgagctagaatcgctggtaacgcacctcgaggaggagaatgccgagttgttgagagaacaggaagagcggcaccagaagcggcttaaagagctcttggaacgggtgacgccagtcattctgaggaaaaaaccatcaggagatcttagaagaacgaactcaatgcagtggtagattggagccaagctcagtcgccgtctctttacagttataacatagaatttgcccctgtatgtcatttttctatttatatatgcgccaactaagttgtagtatcttagctgaaatagcatgggcaattagccgacacaaaggttaaacgaaatcatattatgtaggagtgctcatgaccaagaaaggttgctgttcctgtc

SEQ ID NO: 15741 - protein, 258 aa, Zea mays subsp. mays
  peptide (1)..(258): Ceres Seq. ID no. 12406444
  misc_feature (165)..(165): Xaa is any aa, unknown or other
MASSRVMPSSSPSHTASDLARLAQAASRPGGGGSGLGSMNVEELLRGIYSDMPTPAPPASEPERPRSPAPAPEVATRRTAEEVWKEITGGGGSGEPAPPVAAQAAVPAGGAGGPEMTLEDFLAREEGAVKEDGVRVSGPSAPAMGFLGGAEGVGVPGGGGGRGRXRHLMDPVDRAAMQRQKRMIKNRESAARSRERKQAYIAELESLVTHLEEENAELLREQEERHQKRLKELLERVTPVILRKKPSGDLRRTNSMQW

SEQ ID NO: 15742 - protein, 252 aa, Zea mays subsp. mays
  peptide (1)..(252): Ceres Seq. ID no. 12406445
  misc_feature (159)..(159): Xaa is any aa, unknown or other
MPSSSPSHTASDLARLAQAASRPGGGGSGLGSMNVEELLRGIYSDMPTPAPPASEPERPRSPAPAPEVATRRTAEEVWKEITGGGGSGEPAPPVAAQAAVPAGGAGGPEMTLEDFLAREEGAVKEDGVRVSGPSAPAMGFLGGAEGVGVPGGGGGRGRXRHLMDPVDRAAMQRQKRMIKNRESAARSRERKQAYIAELESLVTHLEEENAELLREQEERHQKRLKELLERVTPVILRKKPSGDLRRTNSMQW

SEQ ID NO: 15743 - protein, 220 aa, Zea mays subsp. mays
  peptide (1)..(220): Ceres Seq. ID no. 12406446
  misc_feature (127)..(127): Xaa is any aa, unknown or other
MNVEELLRGIYSDMPTPAPPASEPERPRSPAPAPEVATRRTAEEVWKEITGGGGSGEPAPPVAAQAAVPAGGAGGPEMTLEDFLAREEGAVKEDGVRVSGPSAPAMGFLGGAEGVGVPGGGGGRGRXRHLMDPVDRAAMQRQKRMIKNRESAARSRERKQAYIAELESLVTHLEEENAELLREQEERHQKRLKELLERVTPVILRKKPSGDLRRTNSMQW

SEQ ID NO: 15744 - DNA, 1322 bp, Zea mays subsp. mays
  misc_feature (1)..(1322): Ceres Seq. ID no. 12374300
  misc_feature (1)..(1322): Ortholog of  Ceres SEQ ID NO 13594740 as cited in SEQ ID NO 51721
  misc_feature (1)..(1322): Ortholog of  Ceres SEQ ID NO 14316497 as cited in SEQ ID NO 58285
  misc_feature (1)..(1322): Ortholog of  Ceres SEQ ID NO 13595944 as cited in SEQ ID NO 68153
agataatgtagagtgcgccgcgccgtgacggcgcggatgagaaagcctccaaacctctctgtttcgggctctccgtccccggcgtccaacacccatactctccccaggttgtgtgccacacccacactcaactatatacgaaaaccgccggcgcctggcccctaggccctagtcacagacccttgttctttcttcgacgcgcccccgggcatggcgaaccgcagtgttgccatgggcgtggccctcgcgttcgtggccatgaccgcgctctgttgcgcgccgggcgccgcggagttgcccaggctggaccacccggccaggagcgacggatcgctgaagctgctcgtcgtcggggactggggacgcaaggggactcacaaccagtcccgggtcgccgaccagatgggaagggtcggggagaagctcgatatcgactttgttatatccaccggggacaacttctacaaggacggcctcaagggcgtgcgcgaccaggcatttgaagaatcgttcgtggatatctacacagctcaaagcttacagaagccatggtactcagttctaggaaatcatgattacaggggcaatgcgctcgcacagcttagcccagtcttgaggaagatcgacgaccgattcatttgcatgagatcgttcatcgttaacgcagaacttgtggacttcttctttgtcgacaccactccgttccaactggagtattggactcaccctggcaaggatcgttatgactggagaggggtggcgcctcgaggcaagtacatagccaatttgctgaaggatctggatgtggctatgaagaaatcaactgcaaggtggaagattgtggctgggcatcacaccatgaggagtgtgagtgagcacggggacactaaggagcttctggaattactacttccagtcctcaaggacaatggcgtcgacttctacatcaatggacacgatcactgcctggagcacattagcagcagagacagtccactccagtatttcacgagcggaggcggttccaaggcatggagaggagtcttccatccaaacaaggacaaactccggttcttctacgacgggcaagggttcatgtccctccagctgaaccaagaccaggcgcacttcatcttttacgacgttttcgggaacatactgtaccgatggagctcgagacatccccagccctccacctatctcgatgaggaataaattggattgattttgcgccattgatatgtacaaaacaccgcctgccaactgtcatgtatgtgaaatgatgagtgttagacgcaaagaaggttatacaccagttaggg

SEQ ID NO: 15745 - protein, 334 aa, Zea mays subsp. mays
  peptide (1)..(334): Ceres Seq. ID no. 12374301
MANRSVAMGVALAFVAMTALCCAPGAAELPRLDHPARSDGSLKLLVVGDWGRKGTHNQSRVADQMGRVGEKLDIDFVISTGDNFYKDGLKGVRDQAFEESFVDIYTAQSLQKPWYSVLGNHDYRGNALAQLSPVLRKIDDRFICMRSFIVNAELVDFFFVDTTPFQLEYWTHPGKDRYDWRGVAPRGKYIANLLKDLDVAMKKSTARWKIVAGHHTMRSVSEHGDTKELLELLLPVLKDNGVDFYINGHDHCLEHISSRDSPLQYFTSGGGSKAWRGVFHPNKDKLRFFYDGQGFMSLQLNQDQAHFIFYDVFGNILYRWSSRHPQPSTYLDEE

SEQ ID NO: 15746 - protein, 327 aa, Zea mays subsp. mays
  peptide (1)..(327): Ceres Seq. ID no. 12374302
MGVALAFVAMTALCCAPGAAELPRLDHPARSDGSLKLLVVGDWGRKGTHNQSRVADQMGRVGEKLDIDFVISTGDNFYKDGLKGVRDQAFEESFVDIYTAQSLQKPWYSVLGNHDYRGNALAQLSPVLRKIDDRFICMRSFIVNAELVDFFFVDTTPFQLEYWTHPGKDRYDWRGVAPRGKYIANLLKDLDVAMKKSTARWKIVAGHHTMRSVSEHGDTKELLELLLPVLKDNGVDFYINGHDHCLEHISSRDSPLQYFTSGGGSKAWRGVFHPNKDKLRFFYDGQGFMSLQLNQDQAHFIFYDVFGNILYRWSSRHPQPSTYLDEE

SEQ ID NO: 15747 - protein, 318 aa, Zea mays subsp. mays
  peptide (1)..(318): Ceres Seq. ID no. 12374303
MTALCCAPGAAELPRLDHPARSDGSLKLLVVGDWGRKGTHNQSRVADQMGRVGEKLDIDFVISTGDNFYKDGLKGVRDQAFEESFVDIYTAQSLQKPWYSVLGNHDYRGNALAQLSPVLRKIDDRFICMRSFIVNAELVDFFFVDTTPFQLEYWTHPGKDRYDWRGVAPRGKYIANLLKDLDVAMKKSTARWKIVAGHHTMRSVSEHGDTKELLELLLPVLKDNGVDFYINGHDHCLEHISSRDSPLQYFTSGGGSKAWRGVFHPNKDKLRFFYDGQGFMSLQLNQDQAHFIFYDVFGNILYRWSSRHPQPSTYLDEE

SEQ ID NO: 15748 - DNA, 1305 bp, Zea mays subsp. mays
  misc_feature (1)..(1305): Ceres Seq. ID no. 12350207
  misc_feature (1)..(1305): Ortholog of  Ceres SEQ ID NO 14303381 as cited in SEQ ID NO 53959
accgcaaacgccaccacgcccacgcctcgccgcgcaccacatctgaaacctccagcccgacgccggcgccggcgccgctgctcgcctgctcgtcacatttcctggtgcccgccaagccccgcgacctgggctccccagctccatccatcaaccgcctgcagccgcggaaatggcagcgccgacgacgctgcgctcggcggcggcgcgggcgcgcgcgcgcgcagcggagctcgtgagagggcggtggccgcagcggcgtctggggacgacgtccgcggcggagacggagagcaaaaagaataaggaggaggaggaggagggggccgggtgggagctctcggcggcgcgggagtactacgactaccgcaagtctatctacggcgacgtcacgcaccgcgccctcctcgtcggacgccgtcggcaccctcgtcgtccccgcccagcccaccgcgcaggtgtataagagcattggtgagaagtatggagtgaagtactcggaagacgagatcctgatgagataccggcgggcatacgagcaaccatggggtggatcacgtctcaggtatgtggatgatgggagaaccttttggcagcatatagtcacttcttctacaggatgttcagatgcacagtactttgaggaactctatcaatactttatgacagaaaaggcctggaagctttgtgaccccgatgccgaaagtgtatttaaagctttgaggaaagctggcgttaaaactgcagtcgtctccaatttcgatacccgtctacggccactcctgcaggccttgaaatgtgaccactggtttgatgcagttgcagtctctgcagaggttgcagcagagaagccgaacccaataatattcttgaaggcctgtgagttactgggcgtgaagcctgaagaagctgtgcacgttggcgacgatcgtagaaatgatatatggggagcgagagatgcaggctgcgatgcttggctctggggcagcgacgttcgctctttcaaggaggttgccgagcggatcggtgttgaggtgacgaagtgaggtaggatggtgaatatacggaggcagaggtagtagttacccaggatcgcggtcgtgaaggaagccagtgacccccatccttgtggtgaaattcctgtgctggtttgtaggcttgtagctgtatgtatgacaacttattagggttccgttgaacctactatgcatgcatgcttgctgccctgacagtgacaggcgaatgcgtgccacgcacttgaatctgagggtctgggactctgggttattgaattattatcgcctggtt

SEQ ID NO: 15749 - protein, 176 aa, Zea mays subsp. mays
  peptide (1)..(176): Ceres Seq. ID no. 12350208
MRYRRAYEQPWGGSRLRYVDDGRTFWQHIVTSSTGCSDAQYFEELYQYFMTEKAWKLCDPDAESVFKALRKAGVKTAVVSNFDTRLRPLLQALKCDHWFDAVAVSAEVAAEKPNPIIFLKACELLGVKPEEAVHVGDDRRNDIWGARDAGCDAWLWGSDVRSFKEVAERIGVEVTK

SEQ ID NO: 15750 - protein, 127 aa, Zea mays subsp. mays
  peptide (1)..(127): Ceres Seq. ID no. 12350209
MTEKAWKLCDPDAESVFKALRKAGVKTAVVSNFDTRLRPLLQALKCDHWFDAVAVSAEVAAEKPNPIIFLKACELLGVKPEEAVHVGDDRRNDIWGARDAGCDAWLWGSDVRSFKEVAERIGVEVTK

SEQ ID NO: 15751 - protein, 100 aa, Zea mays subsp. mays
  peptide (1)..(100): Ceres Seq. ID no. 12350210
TANATTPTPRRAPHLKPPARRRRRRRCSPARHISWCPPSPATWAPQLHPSTACSRGNGSADDAALGGGAGARARSGARERAVAAAASGDDVRGGDGEQKE

SEQ ID NO: 15752 - DNA, 1206 bp, Zea mays subsp. mays
  misc_feature (1)..(1206): Ceres Seq. ID no. 12406819
  misc_feature (1)..(1206): Ortholog of  Ceres SEQ ID NO 15177518 as cited in SEQ ID NO 1034
  misc_feature (1)..(1206): Ortholog of  Ceres SEQ ID NO 14313694 as cited in SEQ ID NO 54115
gttcccccggttattctattccctttccctcccccgcctcctctgctcctcgctctcccacccgctcgggcatccgccacacggccacaccaacactgcactccaccgcggcccgccacagtcctcctcctccgtcgccgtcgttcttcagcggcgccttcgcttccccagcacggtaccctagcatcagcgattcagcgctcaatacaagccaccgcggccatggcgcccgcaccggcagctctctccgcggccaacgccctctcgctgctcgcgcccgctagagtctcctccggaaggtggagcagcctgtccgtctccgtctcagcccggcccgtgaccggggtggtgtctgtcgcggcggccacggcgcagaggaggctggtcgccgcggcggcggcgacggagatggcgcccgcggcgagcggggaagaagggagcaagccgttcgtggaggagatgcgggcggtcgcgatgaagctccacaccaaggaccaggcccgggagggggagaaggagccccaggcgccccccgtcgccaagtgggagccctccgtcgaggggtacctccgattcctcgtcgacagcaagctcgtcttccagacgctcgaagccattgtcgagcgcgccgccgtcccgtggtatgcagagtttcggaatactgggctggagagatcagaggcgctgaaaaatgatctggaatggttcaggcaacagggccacacaattccagaaccatcggctcctggcaccacatacgcttctctactggaagagctgtctgaggaggacccccaggcctttatctgccatttctataacgtgtactttgctcatactgctggaggccgaatgattggcaaaaaggtttccgagaagattctgaacaacaaagagctggagttctacaagtgggagggcaatctctcctagctgctgcagaacgtccgcaacaagcttaaccaagtcgcttcgagctggtctcgggaggagaaggaccactgcctggaggagacggagaagtcgttctcttactcaggaggcctcctccgccatatatttacctgatctatcattgctggttgatccagtctcaaacgctgtaaatacatagtcctttgaatgttaaaactttattactggtgagggggatctcctgccccaggtacggtttacctgcattcaagttgctcagtgtcttacttg

SEQ ID NO: 15753 - protein, 310 aa, Zea mays subsp. mays
  peptide (1)..(310): Ceres Seq. ID no. 12406820
VPPVILFPFPPPPPLLLALPPARASATRPHQHCTPPRPATVLLLRRRRSSAAPSLPQHGTLASAIQRSIQATAAMAPAPAALSAANALSLLAPARVSSGRWSSLSVSVSARPVTGVVSVAAATAQRRLVAAAAATEMAPAASGEEGSKPFVEEMRAVAMKLHTKDQAREGEKEPQAPPVAKWEPSVEGYLRFLVDSKLVFQTLEAIVERAAVPWYAEFRNTGLERSEALKNDLEWFRQQGHTIPEPSAPGTTYASLLEELSEEDPQAFICHFYNVYFAHTAGGRMIGKKVSEKILNNKELEFYKWEGNLS

SEQ ID NO: 15754 - protein, 236 aa, Zea mays subsp. mays
  peptide (1)..(236): Ceres Seq. ID no. 12406821
MAPAPAALSAANALSLLAPARVSSGRWSSLSVSVSARPVTGVVSVAAATAQRRLVAAAAATEMAPAASGEEGSKPFVEEMRAVAMKLHTKDQAREGEKEPQAPPVAKWEPSVEGYLRFLVDSKLVFQTLEAIVERAAVPWYAEFRNTGLERSEALKNDLEWFRQQGHTIPEPSAPGTTYASLLEELSEEDPQAFICHFYNVYFAHTAGGRMIGKKVSEKILNNKELEFYKWEGNLS

SEQ ID NO: 15755 - protein, 174 aa, Zea mays subsp. mays
  peptide (1)..(174): Ceres Seq. ID no. 12406822
MAPAASGEEGSKPFVEEMRAVAMKLHTKDQAREGEKEPQAPPVAKWEPSVEGYLRFLVDSKLVFQTLEAIVERAAVPWYAEFRNTGLERSEALKNDLEWFRQQGHTIPEPSAPGTTYASLLEELSEEDPQAFICHFYNVYFAHTAGGRMIGKKVSEKILNNKELEFYKWEGNLS

SEQ ID NO: 15756 - DNA, 1863 bp, Zea mays subsp. mays
  misc_feature (1)..(1863): Ceres Seq. ID no. 12406346
  misc_feature (1)..(1863): Ortholog of  Ceres SEQ ID NO 12638191 as cited in SEQ ID NO 674
  misc_feature (1)..(1863): Ortholog of  Ceres SEQ ID NO 14303105 as cited in SEQ ID NO 66589
gattcctccactccggccttgcccgacgatctccagctgtccttcaatcaaattatcaacccaacgccatttcggcgctcccgcttcccacaggagtcacagctcaacaaatccctacccaaatccacctccccgccccccaccgccatggctcccccaccaacctcgcgctgcctcgccctcgctctcatcctcatcggcgccctctgcgccgccgccgccgccgcgcggttcgccccggcggacaaccacctccttgcgtgcggcgcggcggcgcccgccgtcctccccgacggccgccgcttcgtgccggactctggctgcgcatccacccgcctccggtcatcctccccgtccctctcctccgcggcgccgcccggctccccgccgccgccgtcctcgctcctcgcctccgctcgggtcttctcctgccgcgcgtcctacgacctcgatgtccgccgccgcgggcaccacatcctccgcctccatttctaccccttcgtccccgccctcgccgcggcccgcttccacgtcggcgccggggggctcctcctcctccacaacttcacggcctcgtcccccgtcgtcaaggagttcatcctccccgtggactccgacgtcctcgtgctcaccttcgtccccgactccggctccactgccttcgtcaacgccatcgagctcgtctctgcgcccgaagagctcgttggcgacatcggcaccctagtcacgtccggcggcgccgctcagatacacgagctgtcgtctcaggtgtttgagactctctacaggatcaacgtcgcggggcgcaaggtcacgccattcaacgacacactgtggcggacatgggttaacgatgagaaattcctcatcgacaccgactcctccaactacatggtgtggtcgtccagtggccggattgcttatcccaagggtagcaagcagatgacaagagaagtggctcctgacaatgtctacaactctgcaagatccgtgaggccaggggtgaatgtgacttggggtttccctgtgcctgctagcagccggtaccttgtgcgtatgcacttctgtgacattgctagcaaggctctgtatgagctctacttcaatatctacgtcaatggtgatcttgcagtcaaggatttcgatctctccagtgcaactggattcttggcctatccttattacattgactttatcgtcgatgtgaaggatgaggggatactgaaattggcgattggtggcttaaagaagagtcgatctgatgaagtaagtggtatccttaatgcactggagataatgaggatgaacaagaccagtggaggtatggatggagacttcccaattgatctacacatggaatatgtggtgagtaaggggattggagaatttgcccgctccctgctctgtggtttcatctttgttgggttgtttgtggctttggtcacgctgatggtgaggttgaggaccgagttgaggaataacggcacagcttggtcctggagacagatgaactccgatgaagggaaactggccagaacatatcagcttgtgcccagtaagacggactattgaatattgcaggctgggcatctttgaggagtgacaacctgcggctgttgtgtgcatctaatcacatcatactttttattaagttgtaagtactgtagttttatcacctctctaaaagtattgtagttttgtatcatcactcctttcatgcttggactttgcattctccatgctttgtcaatggtcaatggaggacatgctcatgatgctgtaaaagtactctaccctagatgtggctgtattgctattgcctcatttattcagtttgacttctgaaacatggattcacagctg

SEQ ID NO: 15757 - protein, 523 aa, Zea mays subsp. mays
  peptide (1)..(523): Ceres Seq. ID no. 12406347
DSSTPALPDDLQLSFNQIINPTPFRRSRFPQESQLNKSLPKSTSPPPTAMAPPPTSRCLALALILIGALCAAAAAARFAPADNHLLACGAAAPAVLPDGRRFVPDSGCASTRLRSSSPSLSSAAPPGSPPPPSSLLASARVFSCRASYDLDVRRRGHHILRLHFYPFVPALAAARFHVGAGGLLLLHNFTASSPVVKEFILPVDSDVLVLTFVPDSGSTAFVNAIELVSAPEELVGDIGTLVTSGGAAQIHELSSQVFETLYRINVAGRKVTPFNDTLWRTWVNDEKFLIDTDSSNYMVWSSSGRIAYPKGSKQMTREVAPDNVYNSARSVRPGVNVTWGFPVPASSRYLVRMHFCDIASKALYELYFNIYVNGDLAVKDFDLSSATGFLAYPYYIDFIVDVKDEGILKLAIGGLKKSRSDEVSGILNALEIMRMNKTSGGMDGDFPIDLHMEYVVSKGIGEFARSLLCGFIFVGLFVALVTLMVRLRTELRNNGTAWSWRQMNSDEGKLARTYQLVPSKTDY

SEQ ID NO: 15758 - protein, 474 aa, Zea mays subsp. mays
  peptide (1)..(474): Ceres Seq. ID no. 12406348
MAPPPTSRCLALALILIGALCAAAAAARFAPADNHLLACGAAAPAVLPDGRRFVPDSGCASTRLRSSSPSLSSAAPPGSPPPPSSLLASARVFSCRASYDLDVRRRGHHILRLHFYPFVPALAAARFHVGAGGLLLLHNFTASSPVVKEFILPVDSDVLVLTFVPDSGSTAFVNAIELVSAPEELVGDIGTLVTSGGAAQIHELSSQVFETLYRINVAGRKVTPFNDTLWRTWVNDEKFLIDTDSSNYMVWSSSGRIAYPKGSKQMTREVAPDNVYNSARSVRPGVNVTWGFPVPASSRYLVRMHFCDIASKALYELYFNIYVNGDLAVKDFDLSSATGFLAYPYYIDFIVDVKDEGILKLAIGGLKKSRSDEVSGILNALEIMRMNKTSGGMDGDFPIDLHMEYVVSKGIGEFARSLLCGFIFVGLFVALVTLMVRLRTELRNNGTAWSWRQMNSDEGKLARTYQLVPSKTDY

SEQ ID NO: 15759 - DNA, 1407 bp, Zea mays subsp. mays
  misc_feature (1)..(1407): Ceres Seq. ID no. 12406721
  misc_feature (1)..(1407): Ortholog of  Ceres SEQ ID NO 13664220 as cited in SEQ ID NO 61151
  misc_feature (1)..(1407): Ortholog of  Ceres SEQ ID NO 13597477 as cited in SEQ ID NO 65160
aaaacctctgaaccctcatcgagtttctgtggacgccacgccacgcgaccatacgtgtatagcacgcagcgcggcatcggcgtcgcacgcactcgcgcttgccgctggacggaggagcggagcaccgatcggccgggctcggtgcacgcgcctagcggatgaagatggccgtgctcgcgggcgcggccgtcgttgcggtggcggcggcggcgatggtcgccgcgctcctgtcctccccggacgcgctgcgcgacgtcgcggtgctggagattggcggcggggaaaggccgtgtcgagttggtccccgtggacgccggcgccgcggggcccgagagcctggcgttcgacccggccggcggcggcccgtacgcgggcgtgtcggacggccgcgtcctccggtgggtccccggcgagcggcgctgggaagagcactcggcctcctgcgcgcccgaactgctggacagctgcaggggctcccaggacccggggcgcgagcacgagtgcgggcgcccgttgggcctcaagttcaaccccgacacgggggagctctacgtggccgacgcctaccacggcctgcgcatggtcgcgccgggcccgggcggcggcaaggcgtcgaggccggtggcgccggagtggtggcagggcgcgcgcgccttcagcttcgccaacggcgtcgaggtcgacccgggcaccggcgccgtctacttcaccgagacgagcacgaggttccagaggcgggagttcctgcgcatcgtcgtgtccggcgacacgacggggcggctgctgcggtacgacccgaggggcggcggtggggtggaggtgctggccgacggcctggcgttccccaacggcctcgcgatgagcagcgacggcacgcacctgctgctggcggagaccaccacggggaggatcctccggtactggctccgcccgacggctcccaaggcgccggcgctgctggaggaggtggcgcggctgccgtggttcccggacaacatcaggatgagcccccggggcggcttctgggtggggctccacgccaggaggggcaagctcgcccagtactgcatctcctacccctggctccggcgcctggtgctggcgctgccgccgcgccacgtccagcgcgcctcgtcgctgctcagccgcctcgggcggcaggtcatcgcgctgcggctgagcgaggaggacgggagggtggtggagatggccagcgtccacggggatcttcggagggtgttcaggtccgtcagcgaagtggcggagaggaacggcagcatctggattggctctgtcatgtcgccgtttctcggagtctacaagttgcagtagaggcatttacgcttaaatatggattcagtagcttattatagcaaaggaaaacatacatcgcatctatatttgtgt

SEQ ID NO: 15760 - protein, 404 aa, Zea mays subsp. mays
  peptide (1)..(404): Ceres Seq. ID no. 12406722
MKMAVLAGAAVVAVAAAAMVAALLSSPDALRDVAVLEIGGGERPCRVGPRGRRRRGAREPGVRPGRRRPVRGRVGRPRPPVGPRRAALGRALGLLRARTAGQLQGLPGPGARARVRAPVGPQVQPRHGGALRGRRLPRPAHGRAGPGRRQGVEAGGAGVVAGRARLQLRQRRRGRPGHRRRLLHRDEHEVPEAGVPAHRRVRRHDGAAAAVRPEGRRWGGGAGRRPGVPQRPRDEQRRHAPAAGGDHHGEDPPVLAPPDGSQGAGAAGGGGAAAVVPGQHQDEPPGRLLGGAPRQEGQARPVLHLLPLAPAPGAGAAAAPRPARLVAAQPPRAAGHRAAAERGGREGGGDGQRPRGSSEGVQVRQRSGGEERQHLDWLCHVAVSRSLQVAVEAFTLKYGFSSLL

SEQ ID NO: 15761 - protein, 402 aa, Zea mays subsp. mays
  peptide (1)..(402): Ceres Seq. ID no. 12406723
MAVLAGAAVVAVAAAAMVAALLSSPDALRDVAVLEIGGGERPCRVGPRGRRRRGAREPGVRPGRRRPVRGRVGRPRPPVGPRRAALGRALGLLRARTAGQLQGLPGPGARARVRAPVGPQVQPRHGGALRGRRLPRPAHGRAGPGRRQGVEAGGAGVVAGRARLQLRQRRRGRPGHRRRLLHRDEHEVPEAGVPAHRRVRRHDGAAAAVRPEGRRWGGGAGRRPGVPQRPRDEQRRHAPAAGGDHHGEDPPVLAPPDGSQGAGAAGGGGAAAVVPGQHQDEPPGRLLGGAPRQEGQARPVLHLLPLAPAPGAGAAAAPRPARLVAAQPPRAAGHRAAAERGGREGGGDGQRPRGSSEGVQVRQRSGGEERQHLDWLCHVAVSRSLQVAVEAFTLKYGFSSLL

SEQ ID NO: 15762 - protein, 386 aa, Zea mays subsp. mays
  peptide (1)..(386): Ceres Seq. ID no. 12406724
MVAALLSSPDALRDVAVLEIGGGERPCRVGPRGRRRRGAREPGVRPGRRRPVRGRVGRPRPPVGPRRAALGRALGLLRARTAGQLQGLPGPGARARVRAPVGPQVQPRHGGALRGRRLPRPAHGRAGPGRRQGVEAGGAGVVAGRARLQLRQRRRGRPGHRRRLLHRDEHEVPEAGVPAHRRVRRHDGAAAAVRPEGRRWGGGAGRRPGVPQRPRDEQRRHAPAAGGDHHGEDPPVLAPPDGSQGAGAAGGGGAAAVVPGQHQDEPPGRLLGGAPRQEGQARPVLHLLPLAPAPGAGAAAAPRPARLVAAQPPRAAGHRAAAERGGREGGGDGQRPRGSSEGVQVRQRSGGEERQHLDWLCHVAVSRSLQVAVEAFTLKYGFSSLL

SEQ ID NO: 15763 - DNA, 1517 bp, Zea mays subsp. mays; identical to SEQ ID NO: 6004
  misc_feature (1)..(1517): Ceres Seq. ID no. 13570867
  misc_feature (1)..(1517): Ortholog of  Ceres SEQ ID NO 13592961 as cited in SEQ ID NO 20522
  misc_feature (1)..(1517): Ortholog of  Ceres SEQ ID NO 13596527 as cited in SEQ ID NO 62582
  misc_feature (1)..(1517): Ortholog of  Ceres SEQ ID NO 15226378 as cited in SEQ ID NO 62741
  misc_feature (1)..(1517): Ortholog of  Ceres SEQ ID NO 13597389 as cited in SEQ ID NO 63426
  misc_feature (1)..(1517): Ortholog of  Ceres SEQ ID NO 15169639 as cited in SEQ ID NO 64624
  misc_feature (1)..(1517): Ortholog of  Ceres SEQ ID NO 14303071 as cited in SEQ ID NO 67114
  misc_feature (1)..(1517): Ortholog of  Ceres SEQ ID NO 13595998 as cited in SEQ ID NO 68161
  misc_feature (1)..(1517): Ortholog of  Ceres SEQ ID NO 14303635 as cited in SEQ ID NO 68503

SEQ ID NO: 15764 - protein, 413 aa, Zea mays subsp. mays; identical to SEQ ID NO: 6005
  peptide (1)..(413): Ceres Seq. ID no. 13570868

SEQ ID NO: 15765 - protein, 397 aa, Zea mays subsp. mays; identical to SEQ ID NO: 6006
  peptide (1)..(397): Ceres Seq. ID no. 13570869

SEQ ID NO: 15766 - protein, 379 aa, Zea mays subsp. mays; identical to SEQ ID NO: 6007
  peptide (1)..(379): Ceres Seq. ID no. 13570870

SEQ ID NO: 15767 - DNA, 1392 bp, Zea mays subsp. mays
  misc_feature (1)..(1392): Ceres Seq. ID no. 12381052
  misc_feature (1)..(1392): Ortholog of  Ceres SEQ ID NO 12609146 as cited in SEQ ID NO 52118
  misc_feature (1)..(1392): Ortholog of  Ceres SEQ ID NO 12587035 as cited in SEQ ID NO 63605
  misc_feature (1)..(1392): Ortholog of  Ceres SEQ ID NO 14302836 as cited in SEQ ID NO 65013
gcacgagaccattacctagaacatcctaatcaaaaagtttcttcgccgtcgctttgcgagtgtggacgggacggatacatgagggagaacggcgccgccagggacgagggccccgccttgtgcaaggccgctgcggcggacgggggcggggatgtgggcgccgcctccgcccgccgccgccgccggctcgggcgtgccacggaggggcctgctccgacgaagagaatccggtcggggtcgcagaggtcgccgtacgactcgtctctggagacggcgacggacggctgctgctggccggcgcgcctatcgcatggcgccgtgtcggtgatcgggcggcggagggagatggaggacgcgttcgccgtcgcgctctcgttcctggcctcggaggcggtgggcggcgagcaggagcaggagctggacttcttcgccgtgtacgatggccacggcggtgcaagggtggcggaggcgtgccgggagcggatgcacgtggtgctggccgaggaggtcagcctgcgccgccgccgcagcggcagcgacgacctgcgctgggaggaggccatggcggccagcttcgcccgagtggacggcgaggtgaccggcggcttgtcgtccccgcaccatgacgacgccggcagcagcttgccctaccgcaccgtcgggtccaccgccgtcgtcgccgtcgtgggccggcgccgcatcgtcgtcggcaactgcggcgactcccgcgccgtgctctcacgcggcggcgtcgcggtgccgctctccagcgatcacaagccggaccgtccggacgagatgcagagggtggaagcagccggcggcagagtcgtcaactggaacggctaccgcgtgctgggagtcctggcaacctccaggtccatcggcgactactacctgaagccgtacgtgagcgcggagccggaggtgacggtggtggagcggacggagcgggacgagttcctcatcctggccagcgacgggctgtgggacgtggtctccaacgaggcggcgtgcaagatcgccaggagctgcctgagcgggcgcgcggcctccaggttccccgggtccgtggccggccgcaccgccgcggacgccgccgcgctgctcgcggagctggccttgtcccgcggcagcagggacaacatcagcgtcgtcgtggtcgagctgcggcggctccagacggaccagatgacgagggtttagtttgctgagactgagttgagttgagttgagagcgtaccgagtagtagatgatgatgacattgttaagtatttgagcagcctgtgctgagaagctgtggggggattaagagagtctccctcccgccttcagcacttgggtgccgtttggttcacatatttgtaacgtaatgggtaacggataacgtt

SEQ ID NO: 15768 - protein, 401 aa, Zea mays subsp. mays
  peptide (1)..(401): Ceres Seq. ID no. 12381053
ARDHYLEHPNQKVSSPSLCECGRDGYMRENGAARDEGPALCKAAAADGGGDVGAASARRRRRLGRATEGPAPTKRIRSGSQRSPYDSSLETATDGCCWPARLSHGAVSVIGRRREMEDAFAVALSFLASEAVGGEQEQELDFFAVYDGHGGARVAEACRERMHVVLAEEVSLRRRRSGSDDLRWEEAMAASFARVDGEVTGGLSSPHHDDAGSSLPYRTVGSTAVVAVVGRRRIVVGNCGDSRAVLSRGGVAVPLSSDHKPDRPDEMQRVEAAGGRVVNWNGYRVLGVLATSRSIGDYYLKPYVSAEPEVTVVERTERDEFLILASDGLWDVVSNEAACKIARSCLSGRAASRFPGSVAGRTAADAAALLAELALSRGSRDNISVVVVELRRLQTDQMTRV

SEQ ID NO: 15769 - protein, 375 aa, Zea mays subsp. mays
  peptide (1)..(375): Ceres Seq. ID no. 12381054
MRENGAARDEGPALCKAAAADGGGDVGAASARRRRRLGRATEGPAPTKRIRSGSQRSPYDSSLETATDGCCWPARLSHGAVSVIGRRREMEDAFAVALSFLASEAVGGEQEQELDFFAVYDGHGGARVAEACRERMHVVLAEEVSLRRRRSGSDDLRWEEAMAASFARVDGEVTGGLSSPHHDDAGSSLPYRTVGSTAVVAVVGRRRIVVGNCGDSRAVLSRGGVAVPLSSDHKPDRPDEMQRVEAAGGRVVNWNGYRVLGVLATSRSIGDYYLKPYVSAEPEVTVVERTERDEFLILASDGLWDVVSNEAACKIARSCLSGRAASRFPGSVAGRTAADAAALLAELALSRGSRDNISVVVVELRRLQTDQMTRV

SEQ ID NO: 15770 - protein, 286 aa, Zea mays subsp. mays
  peptide (1)..(286): Ceres Seq. ID no. 12381055
MEDAFAVALSFLASEAVGGEQEQELDFFAVYDGHGGARVAEACRERMHVVLAEEVSLRRRRSGSDDLRWEEAMAASFARVDGEVTGGLSSPHHDDAGSSLPYRTVGSTAVVAVVGRRRIVVGNCGDSRAVLSRGGVAVPLSSDHKPDRPDEMQRVEAAGGRVVNWNGYRVLGVLATSRSIGDYYLKPYVSAEPEVTVVERTERDEFLILASDGLWDVVSNEAACKIARSCLSGRAASRFPGSVAGRTAADAAALLAELALSRGSRDNISVVVVELRRLQTDQMTRV

SEQ ID NO: 15771 - DNA, 1411 bp, Zea mays subsp. mays
  misc_feature (1)..(1411): Ceres Seq. ID no. 12382286
  misc_feature (1)..(1411): Ortholog of  Ceres SEQ ID NO 15171856 as cited in SEQ ID NO 55120
gcacgagaccattacctagaacatcctaatcgaaaactctctctctctctctctctctctataacaaacaggacgaggggagattgtggaatgctcacccagcaaggaggccgacctgttcaatgccgtcctgggaggcctaggccagttcggcatcataaccagggccaggatcctgctgcaggaggctccggagaaggtgacgtgggtgagggccttctacgacgacttgggcgccttcaccagggaccaggagctgctggtgtcgattccggattcggtggactacgtggaagggttcatggtcctgaacgagcggtccctccacagctcctccatcgccttccccgcgagcgtggacttcagcccggatttcggcaccaggagcagccctaggatctactactgcgtcgagttcgcggtccaccaccaccacggttaccagcagcagtctcaggcggccgtggaggccatctcgaggcggatgagccacatggcgtcccagctgtacagcgtggaggtgtcctacttggacttcctgaaccgggtcaggatggaggaggtgagcctgcggagcgccgggatgtgggaggaggtgcaccacccgtggctcaacatgttcgtgcccaaggccggggtcgctggcttcagggatctgctcatggacaacgtctcgccggatagcttccagggcctcatcctcatctacccactcctcagagacaagtgggacaccaacacgtcggtcgtgatcccggactccgggcccaccgcggacgacccggtgatgtacgtggtcggcatcctcaggtccgcgaaccctggtccagaagaagacggtgacggctgctcccaccnctgcctgcncgagctnctccncannnnncgcnggatcgccgacgccncggaggcgcncctcggcgccaagcagtacctgcctcaccacccgaccccggcccgctggcagcagcacctggnccggcgttgggagcgcttcgcggaccgcaaggcccggttcgacccgctgcgcatcntggggcccggccagggcatattccctcggacggcccaggatgctgccgccgctgctgcgtacgggagctagcattttatatatatacggcatgaaacagtatagattattaattatcagctgactagctaggatgcgatcttctttcttcttcttcttctctcttcagtttcctctgcattttgagggcatgtggggccggttgttgggttattctgtgaggctctggcctccggggcactttgagaggacctgatggtggtggtggtggtggtgattggtgattggtgaatgtcactgggaattttggaacttttgtacaggttgatggaggaagcacaggctttaagtttataagggaatagacatagcgcttct

SEQ ID NO: 15772 - protein, 267 aa, Zea mays subsp. mays
  peptide (1)..(267): Ceres Seq. ID no. 12382287
  misc_feature (186)..(186): Xaa is any aa, unknown or other
  misc_feature (189)..(189): Xaa is any aa, unknown or other
  misc_feature (191)..(191): Xaa is any aa, unknown or other
  misc_feature (193)..(193): Xaa is any aa, unknown or other
  misc_feature (194)..(194): Xaa is any aa, unknown or other
  misc_feature (195)..(195): Xaa is any aa, unknown or other
  misc_feature (197)..(197): Xaa is any aa, unknown or other
  misc_feature (202)..(202): Xaa is any aa, unknown or other
  misc_feature (205)..(205): Xaa is any aa, unknown or other
  misc_feature (226)..(226): Xaa is any aa, unknown or other
  misc_feature (245)..(245): Xaa is any aa, unknown or other
MVLNERSLHSSSIAFPASVDFSPDFGTRSSPRIYYCVEFAVHHHHGYQQQSQAAVEAISRRMSHMASQLYSVEVSYLDFLNRVRMEEVSLRSAGMWEEVHHPWLNMFVPKAGVAGFRDLLMDNVSPDSFQGLILIYPLLRDKWDTNTSVVIPDSGPTADDPVMYVVGILRSANPGPEEDGDGCSHXCLXEXLXXXRXIADAXEAXLGAKQYLPHHPTPARWQQHLXRRWERFADRKARFDPLRIXGPGQGIFPRTAQDAAAAAAYGS

SEQ ID NO: 15773 - protein, 206 aa, Zea mays subsp. mays
  peptide (1)..(206): Ceres Seq. ID no. 12382288
  misc_feature (125)..(125): Xaa is any aa, unknown or other
  misc_feature (128)..(128): Xaa is any aa, unknown or other
  misc_feature (130)..(130): Xaa is any aa, unknown or other
  misc_feature (132)..(132): Xaa is any aa, unknown or other
  misc_feature (133)..(133): Xaa is any aa, unknown or other
  misc_feature (134)..(134): Xaa is any aa, unknown or other
  misc_feature (136)..(136): Xaa is any aa, unknown or other
  misc_feature (141)..(141): Xaa is any aa, unknown or other
  misc_feature (144)..(144): Xaa is any aa, unknown or other
  misc_feature (165)..(165): Xaa is any aa, unknown or other
  misc_feature (184)..(184): Xaa is any aa, unknown or other
MSHMASQLYSVEVSYLDFLNRVRMEEVSLRSAGMWEEVHHPWLNMFVPKAGVAGFRDLLMDNVSPDSFQGLILIYPLLRDKWDTNTSVVIPDSGPTADDPVMYVVGILRSANPGPEEDGDGCSHXCLXEXLXXXRXIADAXEAXLGAKQYLPHHPTPARWQQHLXRRWERFADRKARFDPLRIXGPGQGIFPRTAQDAAAAAAYGS

SEQ ID NO: 15774 - protein, 203 aa, Zea mays subsp. mays
  peptide (1)..(203): Ceres Seq. ID no. 12382289
  misc_feature (122)..(122): Xaa is any aa, unknown or other
  misc_feature (125)..(125): Xaa is any aa, unknown or other
  misc_feature (127)..(127): Xaa is any aa, unknown or other
  misc_feature (129)..(129): Xaa is any aa, unknown or other
  misc_feature (130)..(130): Xaa is any aa, unknown or other
  misc_feature (131)..(131): Xaa is any aa, unknown or other
  misc_feature (133)..(133): Xaa is any aa, unknown or other
  misc_feature (138)..(138): Xaa is any aa, unknown or other
  misc_feature (141)..(141): Xaa is any aa, unknown or other
  misc_feature (162)..(162): Xaa is any aa, unknown or other
  misc_feature (181)..(181): Xaa is any aa, unknown or other
MASQLYSVEVSYLDFLNRVRMEEVSLRSAGMWEEVHHPWLNMFVPKAGVAGFRDLLMDNVSPDSFQGLILIYPLLRDKWDTNTSVVIPDSGPTADDPVMYVVGILRSANPGPEEDGDGCSHXCLXEXLXXXRXIADAXEAXLGAKQYLPHHPTPARWQQHLXRRWERFADRKARFDPLRIXGPGQGIFPRTAQDAAAAAAYGS

SEQ ID NO: 15775 - DNA, 783 bp, Zea mays subsp. mays
  misc_feature (1)..(783): Ceres Seq. ID no. 12354505
  misc_feature (1)..(783): Ortholog of  Ceres SEQ ID NO 15174662 as cited in SEQ ID NO 54292
gaccacctctcgtatcgattctccaagcgccgcgccgcgccgagcgaagaagctcgtctcgtctccatggcggccgcagcggtggccgtctccacctctgtgtgcacgtcctcaaggcgtagcacgggctgtccgaacgtgaggccccaggcccgtccgctcctaggcaggccgtcgccgcgccggaggctgcagacggccttggccgcgacgggcaagacgccgggcgaggcggaggagcaggtccccgcgtgggccaagcccggcgcggacgagccgccaccctgggagcgcgagggcggggccgcgcgtggacaggaggcccggcaggtccccttctacgcgtacctgctcgcgtccacgatcaccgccatcgccgcgatcggctccatcttcgagtacaccaaccagcggccggtgttcgggatcgtcggccccgacagcgtcctgtacgcgccgctcctgggcttcttcggtcttcaccggcatcccgacctccgcgtttctgtggttcaaggccgtgcagacggccaacagagaggccgaggagcaagaccgcagagacggattcctgtgagaggctgtgggtgactccggcgcactcgccggtgccgtcgccgtgcagaagaacgcgcaccgcaccaccggtattcgcagcgacgggtgacgggtcatgttgtcatgttatgtatgtcggtgtactgtatactagaatttgagagagcggatggatttgcggcacaaatcagagaaaatatcttaatcatcattcgtatgagtggc

SEQ ID NO: 15776 - protein, 196 aa, Zea mays subsp. mays
  peptide (1)..(196): Ceres Seq. ID no. 12354506
DHLSYRFSKRRAAPSEEARLVSMAAAAVAVSTSVCTSSRRSTGCPNVRPQARPLLGRPSPRRRLQTALAATGKTPGEAEEQVPAWAKPGADEPPPWEREGGAARGQEARQVPFYAYLLASTITAIAAIGSIFEYTNQRPVFGIVGPDSVLYAPLLGFFGLHRHPDLRVSVVQGRADGQQRGRGARPQRRIPVRGCG

SEQ ID NO: 15777 - protein, 174 aa, Zea mays subsp. mays
  peptide (1)..(174): Ceres Seq. ID no. 12354507
MAAAAVAVSTSVCTSSRRSTGCPNVRPQARPLLGRPSPRRRLQTALAATGKTPGEAEEQVPAWAKPGADEPPPWEREGGAARGQEARQVPFYAYLLASTITAIAAIGSIFEYTNQRPVFGIVGPDSVLYAPLLGFFGLHRHPDLRVSVVQGRADGQQRGRGARPQRRIPVRGCG

SEQ ID NO: 15778 - DNA, 1349 bp, Zea mays subsp. mays
  misc_feature (1)..(1349): Ceres Seq. ID no. 12364087
  misc_feature (1)..(1349): Ortholog of  Ceres SEQ ID NO 14312328 as cited in SEQ ID NO 59022
acaactgttatattcccaccggcgccgccggctcttcgtcgtcctcctccgggtgtgccccagttcgctgcccgttccccagccgccgatccctcgatctccgctagcttcgttccttcgtacaggaacggtcgagcagaaactagcagccactcccgagtcccgactcccgatcgcgattacttgccgcggcaccagtactccagcggccaccatgagcagcgggaagcgatccttcttcgcgcccaagaagaaggccaccaacccgttcgattccgactccgacgacgacaaaccgcagcagcggccagcgcgggcgtcctccgtgcctcccccggacgagcagcggggctcctcctctctcttcggcgccggcgacagaggcgggctcttctcttccgcggccaaccatcactaccggaacgacttccgcgacgctggcggccttgagggccagtccgtgcaggagctggagggcctacgcggcgtacaaggccgaggagaccacgcgccggacgcgggggtgcgtcaggatcgccgaggagatgagggacaccgcatccaagacgctcgtcaccgtccaccagcaggggcagcagatccaccgcacgcacatgatggccgtcgacatcgaccaggatctcttcaggagtgagaagctattgggcgatcttgggggtctattttccaaaaagtggaagccaaagaagaatggcgccatcaggggtcctatgctaactagagatgattccttcataaggaaggggagtcatttggagcaaaggcagaaactagggctggcagatcatccacctccatcaaatgcgcgccaattccgttctgaaccctcatcagcacttgagaaagttgagatagagaaggcaaagcaggatgatgatctgtctgatctaagcaacatactgacggagctgaaagggatggccgttgacatgggctctgagatcgagaggcaaacaaaagcaatgggggatgcagagaaggattatgacgagctgaacttcagggtcaagggagcaaacactcgagctcgccgtctcctcgggagataaaaaaatgcatatattcttgtctcttggatggtccataacacattaactatatgggggcatcaaattctgatgattttgtgcatcagattttgattagcattgttaccgtggacatgtcggcgtgtatggtagttgagacatattttatatgtttgcttcttttttctatttttttagcattgcacgagcttaggatttcagtggattttacatggaaaaccttgtctgattagaaacttcttttcgggtaaataatgctgatacatagtgatttgtcgc

SEQ ID NO: 15779 - protein, 217 aa, Zea mays subsp. mays
  peptide (1)..(217): Ceres Seq. ID no. 12364088
QLLYSHRRRRLFVVLLRVCPSSLPVPQPPIPRSPLASFLRTGTVEQKLAATPESRLPIAITCRGTSTPAATMSSGKRSFFAPKKKATNPFDSDSDDDKPQQRPARASSVPPPDEQRGSSSLFGAGDRGGLFSSAANHHYRNDFRDAGGLEGQSVQELEGLRGVQGRGDHAPDAGVRQDRRGDEGHRIQDARHRPPAGAADPPHAHDGRRHRPGSLQE

SEQ ID NO: 15780 - protein, 174 aa, Zea mays subsp. mays
  peptide (1)..(174): Ceres Seq. ID no. 12364089
MRDTASKTLVTVHQQGQQIHRTHMMAVDIDQDLFRSEKLLGDLGGLFSKKWKPKKNGAIRGPMLTRDDSFIRKGSHLEQRQKLGLADHPPPSNARQFRSEPSSALEKVEIEKAKQDDDLSDLSNILTELKGMAVDMGSEIERQTKAMGDAEKDYDELNFRVKGANTRARRLLGR

SEQ ID NO: 15781 - protein, 151 aa, Zea mays subsp. mays
  peptide (1)..(151): Ceres Seq. ID no. 12364090
MMAVDIDQDLFRSEKLLGDLGGLFSKKWKPKKNGAIRGPMLTRDDSFIRKGSHLEQRQKLGLADHPPPSNARQFRSEPSSALEKVEIEKAKQDDDLSDLSNILTELKGMAVDMGSEIERQTKAMGDAEKDYDELNFRVKGANTRARRLLGR

SEQ ID NO: 15782 - protein, 146 aa, Zea mays subsp. mays
  peptide (1)..(146): Ceres Seq. ID no. 12364091
MSSGKRSFFAPKKKATNPFDSDSDDDKPQQRPARASSVPPPDEQRGSSSLFGAGDRGGLFSSAANHHYRNDFRDAGGLEGQSVQELEGLRGVQGRGDHAPDAGVRQDRRGDEGHRIQDARHRPPAGAADPPHAHDGRRHRPGSLQE

SEQ ID NO: 15783 - DNA, 1576 bp, Zea mays subsp. mays
  misc_feature (1)..(1576): Ceres Seq. ID no. 12350195
  misc_feature (1)..(1576): Ortholog of  Ceres SEQ ID NO 15177022 as cited in SEQ ID NO 57405
  misc_feature (1)..(1576): Ortholog of  Ceres SEQ ID NO 13597427 as cited in SEQ ID NO 64038
aaaactcccccaactgacggccacctcgaacggaaggggatcccccttaattatgagacaattattgctgaaattatttttttcggaatccaatcaggtagtagtatttgtgtgattgtgtccaggccctatacataagccgccatttgcagtccggacgcagccccgttcagtcgcagcccaggccgacgacggcagagagcgagccgacgccgccgcaccctcgtgccaggttacacggtgtgaaaatgtcaggaagggctttgaaagatctcaatgtttctcagtcagcagacctggagaacggaaaagacaattctgtgaaatcctgcatcaccaagcctgtgttgaatggcaacaaatgtgccaacaaggaagaaaaggctccgtctgcttgccacgacgctgtgactaatggaaatgcggctgccattgcagatgtggagtacattgattctgaaaatctagtagatctcccagatgtcgatgcagctctaagtaccttagctaaaagattggattcaaaggactgggttatgacatgtgaagctctcaacaatgttcgtcagttggcaatgtatcacaaggaacgattgcaggagcttctggagcctgtagttcctcttatcgtgaaatctgtgaagaacccaagaagtgctgtatgcaaaactgcactaatgacttgtgctgacatctttaaggcctatggtgacttaatggttcactcaatcgatccactgctagtacaactgtttctgaaggcttcacaagataagcgttttgtctgtgaagctgcagaggcagctcttatatcgatgacaagttggatctcccctttactactcttgccaagaatgctgccttacctcaagaacaagaatccacggatccgagcaaaagcatcagtgtgtttcagcaagagtgtaccacgccttgatgtggtgggaatcaaagaatatggtatggataagctcatccagattgcggcaacccaacttagcgaccagcttcctgaatcaagggaggctgctcgcaacctggcactggaactgcaagcattctatgagaagtctcaggcctcaacttctgacgaacacgaggtcgaggcctctgcctcgccagatgctgaatcatgggaggctttctgccagtccaagctctccgcattaagtgcccaagccattcttcgtgtgacctctactactacaaaagagtgcgtcacctctgccccaaaagaagggttggctgtgggttgctagcacaagccacaggggagatattgcgatttttcaccctgttcgctgttttgctgtacatgcttttggtttgtcctgcggtgcacccagtcgtgaaaaggttaatcattggttcaggagttcaggtgtgaccacggtgttaatattggtgtgggatatatatccattatagttggttgtacaatcatttggttccactacttggtattggagtgtagatttttttccccatggttcagcgttatacacaacagtccttattttttgtttttgatgctggttctgttattttgaaggaaatgacatattttgtgtttcgg

SEQ ID NO: 15784 - protein, 336 aa, Zea mays subsp. mays
  peptide (1)..(336): Ceres Seq. ID no. 12350196
MSGRALKDLNVSQSADLENGKDNSVKSCITKPVLNGNKCANKEEKAPSACHDAVTNGNAAAIADVEYIDSENLVDLPDVDAALSTLAKRLDSKDWVMTCEALNNVRQLAMYHKERLQELLEPVVPLIVKSVKNPRSAVCKTALMTCADIFKAYGDLMVHSIDPLLVQLFLKASQDKRFVCEAAEAALISMTSWISPLLLLPRMLPYLKNKNPRIRAKASVCFSKSVPRLDVVGIKEYGMDKLIQIAATQLSDQLPESREAARNLALELQAFYEKSQASTSDEHEVEASASPDAESWEAFCQSKLSALSAQAILRVTSTTTKECVTSAPKEGLAVGC

SEQ ID NO: 15785 - protein, 240 aa, Zea mays subsp. mays
  peptide (1)..(240): Ceres Seq. ID no. 12350197
MTCEALNNVRQLAMYHKERLQELLEPVVPLIVKSVKNPRSAVCKTALMTCADIFKAYGDLMVHSIDPLLVQLFLKASQDKRFVCEAAEAALISMTSWISPLLLLPRMLPYLKNKNPRIRAKASVCFSKSVPRLDVVGIKEYGMDKLIQIAATQLSDQLPESREAARNLALELQAFYEKSQASTSDEHEVEASASPDAESWEAFCQSKLSALSAQAILRVTSTTTKECVTSAPKEGLAVGC

SEQ ID NO: 15786 - protein, 227 aa, Zea mays subsp. mays
  peptide (1)..(227): Ceres Seq. ID no. 12350198
MYHKERLQELLEPVVPLIVKSVKNPRSAVCKTALMTCADIFKAYGDLMVHSIDPLLVQLFLKASQDKRFVCEAAEAALISMTSWISPLLLLPRMLPYLKNKNPRIRAKASVCFSKSVPRLDVVGIKEYGMDKLIQIAATQLSDQLPESREAARNLALELQAFYEKSQASTSDEHEVEASASPDAESWEAFCQSKLSALSAQAILRVTSTTTKECVTSAPKEGLAVGC

SEQ ID NO: 15787 - DNA, 1639 bp, Zea mays subsp. mays
  misc_feature (1)..(1639): Ceres Seq. ID no. 12406238
  misc_feature (1)..(1639): Ortholog of  Ceres SEQ ID NO 14311870 as cited in SEQ ID NO 51574
  misc_feature (1)..(1639): Ortholog of  Ceres SEQ ID NO 15174583 as cited in SEQ ID NO 53693
  misc_feature (1)..(1639): Ortholog of  Ceres SEQ ID NO 13581563 as cited in SEQ ID NO 58942
  misc_feature (1)..(1639): Ortholog of  Ceres SEQ ID NO 13658707 as cited in SEQ ID NO 66286
  misc_feature (1)..(1639): Ortholog of  Ceres SEQ ID NO 13654528 as cited in SEQ ID NO 68080
gcacgagaccattacctagaacatcctaatcgaaaaactctctcccgcgggtctcggcctcctctcctcggctcgctataagcaggctccaccgcttccgcaatggccacctaattcgctcggcgtcgggggagaagagaagcgcgcgcgatggcaccgggaagatctcttcgccctgcggggacggcggcggttctgtgggcggcgtcgctgctgctgctggcgacgtcgtgcgcgcgcgcaggtggcgcgtacgcggggccggggtgccggaagcacgtggcgagggtcacggagtacggcgcggtcggggacgggaggacgctcaacacggcggcgttcgccagggctgtggcggacctggcgcggcgcgcgcccgacggcggcgctgcgctggtggtgccgccggggaagtggctcacggggcccttcaacctcaccagctgcttcacgctctacctcgacgagggcgcccgagatcctcgcgtcccaggacatgaagcattggcccctcatagctcccctgccgtcctacgggagaggaagggacgagcctggcccaaggtacagcaatttcatcggaggatccaatctcactgacgtcatcatcacgggcaaaaatggaacgatcaacgggcaggggcaggtctggtgggacaagttccacgccaaggagctcaagttcacccgcggccacctcctcgagctcctctactctgacaacatcatcatctccaatgtcaccttcgtcgacgcgccgtactggaacctccaccctacctattgcaccaatgtgaccatcagtggcgtcaccattctcgcgccggtgaattcgcctaataccgatggaattgacccggattcttcctcgcgtgtcaagatcgaggactgctacatcgtctccggcgacgactgcgtggccgtgaagagcgggtgggacgagtacggcatcaggttcaacatgccgagccagcacatcgtcatccggaggctgacctgcgtctcccccacgagcgccatgatcgcgctgggcagcgagatgtccggcggcatccgcgacgtgcgcgccgaggacagcgtggccatcaacacggagtcggccgtcagggtcaagtccggcgccgggaggggcggcttcgtcagggacatcttcgtgcgcggcctcagcctccacaccatgaagtgggtgttctggatgaccggcaactacgggcagcaccccgacaacacgtccgaccccaacgccatgcccgaggtcaccggcatcaactacagcgacgtgttcgccgagaacgtgaccatggccggcaggatggagggcatccctaaggacccctacaccgggatctgcatatccaacgtgaccgcccgcctcgcgccggacgccaaggagctgcagtggaactgcaccaacgtcaagggggtcacctcccacgtctcgcccaagccgtgcccggagctcgccgcggagggcaagccgtgcgccttcccggaggaagagctcgtcatcggcccacccgagctgccgaagtgtagctattgaggccgattgccaaaagagatcattgatcatataggctcttcggtgatagtctagacaagcagtatgagaaatgcagctgaaatacgtttgcattgc

SEQ ID NO: 15788 - protein, 348 aa, Zea mays subsp. mays
  peptide (1)..(348): Ceres Seq. ID no. 12406239
MKHWPLIAPLPSYGRGRDEPGPRYSNFIGGSNLTDVIITGKNGTINGQGQVWWDKFHAKELKFTRGHLLELLYSDNIIISNVTFVDAPYWNLHPTYCTNVTISGVTILAPVNSPNTDGIDPDSSSRVKIEDCYIVSGDDCVAVKSGWDEYGIRFNMPSQHIVIRRLTCVSPTSAMIALGSEMSGGIRDVRAEDSVAINTESAVRVKSGAGRGGFVRDIFVRGLSLHTMKWVFWMTGNYGQHPDNTSDPNAMPEVTGINYSDVFAENVTMAGRMEGIPKDPYTGICISNVTARLAPDAKELQWNCTNVKGVTSHVSPKPCPELAAEGKPCAFPEEELVIGPPELPKCSY

SEQ ID NO: 15789 - protein, 193 aa, Zea mays subsp. mays
  peptide (1)..(193): Ceres Seq. ID no. 12406240
MPSQHIVIRRLTCVSPTSAMIALGSEMSGGIRDVRAEDSVAINTESAVRVKSGAGRGGFVRDIFVRGLSLHTMKWVFWMTGNYGQHPDNTSDPNAMPEVTGINYSDVFAENVTMAGRMEGIPKDPYTGICISNVTARLAPDAKELQWNCTNVKGVTSHVSPKPCPELAAEGKPCAFPEEELVIGPPELPKCSY

SEQ ID NO: 15790 - protein, 174 aa, Zea mays subsp. mays
  peptide (1)..(174): Ceres Seq. ID no. 12406241
MIALGSEMSGGIRDVRAEDSVAINTESAVRVKSGAGRGGFVRDIFVRGLSLHTMKWVFWMTGNYGQHPDNTSDPNAMPEVTGINYSDVFAENVTMAGRMEGIPKDPYTGICISNVTARLAPDAKELQWNCTNVKGVTSHVSPKPCPELAAEGKPCAFPEEELVIGPPELPKCSY

SEQ ID NO: 15791 - DNA, 1396 bp, Zea mays subsp. mays; identical to SEQ ID NO: 14449
  misc_feature (1)..(1396): Ceres Seq. ID no. 13636262
  misc_feature (1)..(1396): Ortholog of  Ceres SEQ ID NO 14311671 as cited in SEQ ID NO 51251
  misc_feature (1)..(1396): Ortholog of  Ceres SEQ ID NO 14304791 as cited in SEQ ID NO 53562
  misc_feature (1)..(1396): Ortholog of  Ceres SEQ ID NO 14307355 as cited in SEQ ID NO 54610
  misc_feature (1)..(1396): Ortholog of  Ceres SEQ ID NO 13594298 as cited in SEQ ID NO 57803
  misc_feature (1)..(1396): Ortholog of  Ceres SEQ ID NO 14301894 as cited in SEQ ID NO 61677
  misc_feature (1)..(1396): Ortholog of  Ceres SEQ ID NO 13503476 as cited in SEQ ID NO 61978
  misc_feature (1)..(1396): Ortholog of  Ceres SEQ ID NO 12578438 as cited in SEQ ID NO 62201
  misc_feature (1)..(1396): Ortholog of  Ceres SEQ ID NO 12617675 as cited in SEQ ID NO 64656

SEQ ID NO: 15792 - protein, 233 aa, Zea mays subsp. mays; identical to SEQ ID NO: 14450
  peptide (1)..(233): Ceres Seq. ID no. 13636263

SEQ ID NO: 15793 - protein, 201 aa, Zea mays subsp. mays; identical to SEQ ID NO: 14451
  peptide (1)..(201): Ceres Seq. ID no. 13636264

SEQ ID NO: 15794 - protein, 160 aa, Zea mays subsp. mays; identical to SEQ ID NO: 14452
  peptide (1)..(160): Ceres Seq. ID no. 13636265

SEQ ID NO: 15795 - DNA, 1414 bp, Zea mays subsp. mays
  misc_feature (1)..(1414): Ceres Seq. ID no. 12350215
  misc_feature (1)..(1414): Ortholog of  Ceres SEQ ID NO 14313548 as cited in SEQ ID NO 68496
atcgcttccagttcatatctatccgttctctctccataacaaacacccgaaacgccaggttataaggcggggagttaaaaaaccaaagcctattcaaacgaggagcaaaaggctactctcggagccggggttgaaccggagcggcgggcggccggccggcctcgcatcttcgccggaggaaaacaaaattaaagttcctcgcgtaggcacagatggccgacccgtcagcatcatcggtgccgccggttgtcaccatgggatccgtggtcactgtggcctcgccgcccacgggtggtggatcgacggtctctgcaggtatcacaggcggcggcaaagacgggcccgtgcgcagggtgcaaatacctgcggcgcaagtgccagccggactgcatatttgcgccctatttcccgcccgacaacctagacaagttcgcgtacgtgcaccgcgtcttcggcaccagcaacgtgatcaagattctcaacaacctccagccctaccagcgccagtacgccgtcaattcgctcgtttacgaggcggaaatgcgtatccgcgaccccatctacggctgcgtcggcgtcgtctccatgcttcagcaccgcctcatacggctcaagaaggcgctcgagagcgccagcttagagctgtccaactaccaggcggctgaagccgcggcggcctctgtggccgtgggaccccatggtgtggcagcagctgggatggcagacttcgtaggcaacgcagtgcccaattgcacacaaaacattatcaatgccgggtactccacgatggcgtcgatcaccggagctgggccgttcatgcagcaagacaactttgcctccgtgcagatgctggccatgagcttcgagggtgagaatggagctgcggcgagggtgggcatgaacggaggtggaggctatggcttcgcctactcgccggccatgggcgtcgggcacggtgtagtgtctggtcatgtgcagcagcagcagatcaacggtggacagttcttgaaaaacagcacgacgggcggggattaccggcccactatgtgatctttatcagttgcaggcgggatgaccggccgtgtcctttcggccggaggagggatggtggtggaggcgactatatgcacatgaggtgacgcgaagaaacagcagctacactagaggttgaaggctacgatccagctatttcagcagttaaatgcagcaggggcagctctacgcctctaagctagtcaattactcgaggatgtcagaaggtattttgcagagcgagggtgactggacacaaaacaacgataactcccaatgcaagaatgccgtcgtacgtacgtacgtgtagtgtaccagctgacattcaatgctcccgccaaatggagctactactagtctactactctcgctgcattcattc

SEQ ID NO: 15796 - protein, 169 aa, Zea mays subsp. mays
  peptide (1)..(169): Ceres Seq. ID no. 12350216
MRIRDPIYGCVGVVSMLQHRLIRLKKALESASLELSNYQAAEAAAASVAVGPHGVAAAGMADFVGNAVPNCTQNIINAGYSTMASITGAGPFMQQDNFASVQMLAMSFEGENGAAARVGMNGGGGYGFAYSPAMGVGHGVVSGHVQQQQINGGQFLKNSTTGGDYRPTM

SEQ ID NO: 15797 - protein, 154 aa, Zea mays subsp. mays
  peptide (1)..(154): Ceres Seq. ID no. 12350217
MLQHRLIRLKKALESASLELSNYQAAEAAAASVAVGPHGVAAAGMADFVGNAVPNCTQNIINAGYSTMASITGAGPFMQQDNFASVQMLAMSFEGENGAAARVGMNGGGGYGFAYSPAMGVGHGVVSGHVQQQQINGGQFLKNSTTGGDYRPTM

SEQ ID NO: 15798 - protein, 150 aa, Zea mays subsp. mays
  peptide (1)..(150): Ceres Seq. ID no. 12350218
MADPSASSVPPVVTMGSVVTVASPPTGGGSTVSAGITGGGKDGPVRRVQIPAAQVPAGLHICALFPARQPRQVRVRAPRLRHQQRDQDSQQPPALPAPVRRQFARLRGGNAYPRPHLRLRRRRLHASAPPHTAQEGARERQLRAVQLPGG

SEQ ID NO: 15799 - DNA, 1417 bp, Zea mays subsp. mays
  misc_feature (1)..(1417): Ceres Seq. ID no. 12407425
  misc_feature (1)..(1417): Ortholog of  Ceres SEQ ID NO 15176803 as cited in SEQ ID NO 52778
  misc_feature (1)..(1417): Ortholog of  Ceres SEQ ID NO 13597638 as cited in SEQ ID NO 65448
  misc_feature (1)..(1417): Ortholog of  Ceres SEQ ID NO 14302283 as cited in SEQ ID NO 68688
  misc_feature (1)..(1417): Ortholog of  Ceres SEQ ID NO 14302772 as cited in SEQ ID NO 69055
acaacacttcccgcaacagaagcatacgccgtgcccatctatctatagctagcactagcagtggtgcacactgaaatggacagcgccagcagcctcgtggacgacaccagcagcggtggcggcggcggcggcggcgcgtccacggacaagctaagggctttggccgtcttcgccgccgcctcggggacgccgctggagcgcatgggcagcggcgccagcgcggtcgtggacgcggccgagccgggcgccgaggcggactccggctccggtgccgccgcggtgagcgttggcgggaagctgccgtcgtccaggtacaagggcgtggtgccgcagcccaacgggcggtggggcgcgcagatctacgagcgccaccagcgcgtgtggctcggcaccttcgcgggcgaggccgacgcggcgcgcgcctacgacgtcgcggcgcagcggttccgcggccgcgacgcggtcaccaacttccgcccgctcgcggacgccgacccggacgcggccgccgagctccggttcctggcgtcccgctccaaggccgaggtcgtcgacatgctccgcaagcacacatacttcgacgagctcgcgcagaacaagcgcgccttcgccgccgcgtccgcggccaccgcctcgtcgctggccaacaacccttcttcctacgcgtcgctctcccccgcgaccgcgacggccgccgccgccgccgcgcgggagcacctcttcgacaagacggtcacccccagcgacgtgggcaagctgaaccggctggtgatcccgaagcagcacgccgagaagcacttcccgctgcagctcccgtccgccggcggcgagagcaagggcgtgctcctcaacctggaggacgccgcgggcaaggtgtggcggttccgctactcgtactggaacagcagccagagctacgtgctcaccaagggctggagccgcttcgtcaaggagaagggcctccaagccggcgacgtcgtcggcttctaccgctccgctgcaggcgccgacaccaagctcttcatcgactgcaagctgcggcccaacagcgtcgtcgccgcctcgacggcaggcccgtcgcctcgggcgccggtggcgaaggccgtgcgtctcttcggcgtcgacctgctgacggcaccggccaccgccgccgcggcgccggcggaggccgtggctgtggccgggtgcaagagagccagggacttgggttcgcccccgcaggcggcgttcaagaagcagctcgtggagctggcactagtgtagattaatgctacggagcgatcgatctttccctagctagctagtcttttttattttttttgctcgatcgctcaactcagatggtagcatcaccgagctgaatttagttccctctcggcatctcacttagttggttcgtttgttaatttccagtttc

SEQ ID NO: 15800 - protein, 395 aa, Zea mays subsp. mays
  peptide (1)..(395): Ceres Seq. ID no. 12407426
MDSASSLVDDTSSGGGGGGGASTDKLRALAVFAAASGTPLERMGSGASAVVDAAEPGAEADSGSGAAAVSVGGKLPSSRYKGVVPQPNGRWGAQIYERHQRVWLGTFAGEADAARAYDVAAQRFRGRDAVTNFRPLADADPDAAAELRFLASRSKAEVVDMLRKHTYFDELAQNKRAFAAASAATASSLANNPSSYASLSPATATAAAAAAREHLFDKTVTPSDVGKLNRLVIPKQHAEKHFPLQLPSAGGESKGVLLNLEDAAGKVWRFRYSYWNSSQSYVLTKGWSRFVKEKGLQAGDVVGFYRSAAGADTKLFIDCKLRPNSVVAASTAGPSPRAPVAKAVRLFGVDLLTAPATAAAAPAEAVAVAGCKRARDLGSPPQAAFKKQLVELALV

SEQ ID NO: 15801 - protein, 353 aa, Zea mays subsp. mays
  peptide (1)..(353): Ceres Seq. ID no. 12407427
MGSGASAVVDAAEPGAEADSGSGAAAVSVGGKLPSSRYKGVVPQPNGRWGAQIYERHQRVWLGTFAGEADAARAYDVAAQRFRGRDAVTNFRPLADADPDAAAELRFLASRSKAEVVDMLRKHTYFDELAQNKRAFAAASAATASSLANNPSSYASLSPATATAAAAAAREHLFDKTVTPSDVGKLNRLVIPKQHAEKHFPLQLPSAGGESKGVLLNLEDAAGKVWRFRYSYWNSSQSYVLTKGWSRFVKEKGLQAGDVVGFYRSAAGADTKLFIDCKLRPNSVVAASTAGPSPRAPVAKAVRLFGVDLLTAPATAAAAPAEAVAVAGCKRARDLGSPPQAAFKKQLVELALV

SEQ ID NO: 15802 - protein, 235 aa, Zea mays subsp. mays
  peptide (1)..(235): Ceres Seq. ID no. 12407428
MLRKHTYFDELAQNKRAFAAASAATASSLANNPSSYASLSPATATAAAAAAREHLFDKTVTPSDVGKLNRLVIPKQHAEKHFPLQLPSAGGESKGVLLNLEDAAGKVWRFRYSYWNSSQSYVLTKGWSRFVKEKGLQAGDVVGFYRSAAGADTKLFIDCKLRPNSVVAASTAGPSPRAPVAKAVRLFGVDLLTAPATAAAAPAEAVAVAGCKRARDLGSPPQAAFKKQLVELALV

SEQ ID NO: 15803 - DNA, 1352 bp, Zea mays subsp. mays
  misc_feature (1)..(1352): Ceres Seq. ID no. 12406751
  misc_feature (1)..(1352): Ortholog of  Ceres SEQ ID NO 15169655 as cited in SEQ ID NO 64922
  misc_feature (1)..(1352): Ortholog of  Ceres SEQ ID NO 13596004 as cited in SEQ ID NO 68212
gagcagagcagcagtgaccagtgagctgcttgtccaagaatcgctcccactcccggctgtcgggagagcgcagcccagctagccgcctccgcttcttggaggtcgatggccgcgaaggggttgagggaggtggggaggaggagggcggcggaggtcgggcggcgctgcttgtctggcgggagcgctgggccgccggcgccggcggcgaagcggaaggagggagggaaggcggtgaacctgttcacggccgtcaaccaggcgctccacatcgccctcgacaccgacccccgcgcctacgtcttcggagaggacgtcgggttcggcggcgtcttccgctgcacgacaggcctcgccgatcggttcggcaagagcagagtgttcaacacgccgctgtgtgagcagggtattgctggatttgccatcggcctagcagcgatgggcaatcgagctatcgcagaaatccagtttgcggactacatctttccagcctttgatcagattgtcaatgaagcagctaagttcagatatcggagtggaaatgaatttaactgtggaggcttaacgattcgaactccctatggtgctgttgggcatggtggtcattaccattcacagtcaccagaggctttcttctgtcacgttcctggactcaaggttgtcataccacggagtccgcgcgaggctaaggggttgctgttggccagcatccgagatccaaacccagttgtattttttgagccaaagtggctgtatcgtttggctgttgaagaagttcctgaggaggattacatgctgccgttatccgaggcagaagtgattagggaaggaagtgatataacgcttgttggatggggagctcagcttgcggtgctgaaagaagcctgtgaagatgctgcaaaggacggggtgtcttgcgagctcattgatctgaaaacactcgtaccatgggacaaggaaacggtagaggcctcggtgaagaagaccgggaagctcctcgttagccacgaggctccagtcaccgggggcttcggcgcggagatcgccgcgtccattgccgagcgctgcttccagaggttagaagcacccgtggcgagagtctgcggtctcgacacccctttccctctcgtgtacgagccattttacatgcccaccaagaacaaggtcctggatgcgataaaagccaccatagatttctgaaacatgttgcttgatcgatacagagtactctagttacatgtgcacggtttgtgctggtctgggtctgtagcctgcctgaggatgagcgatccacaaaccggcttatttgtattcaacaatacagcgataaataaagccgcaaggtgcaaaattgt

SEQ ID NO: 15804 - protein, 363 aa, Zea mays subsp. mays
  peptide (1)..(363): Ceres Seq. ID no. 12406752
MAAKGLREVGRRRAAEVGRRCLSGGSAGPPAPAAKRKEGGKAVNLFTAVNQALHIALDTDPRAYVFGEDVGFGGVFRCTTGLADRFGKSRVFNTPLCEQGIAGFAIGLAAMGNRAIAEIQFADYIFPAFDQIVNEAAKFRYRSGNEFNCGGLTIRTPYGAVGHGGHYHSQSPEAFFCHVPGLKVVIPRSPREAKGLLLASIRDPNPVVFFEPKWLYRLAVEEVPEEDYMLPLSEAEVIREGSDITLVGWGAQLAVLKEACEDAAKDGVSCELIDLKTLVPWDKETVEASVKKTGKLLVSHEAPVTGGFGAEIAASIAERCFQRLEAPVARVCGLDTPFPLVYEPFYMPTKNKVLDAIKATIDF

SEQ ID NO: 15805 - protein, 253 aa, Zea mays subsp. mays
  peptide (1)..(253): Ceres Seq. ID no. 12406753
MGNRAIAEIQFADYIFPAFDQIVNEAAKFRYRSGNEFNCGGLTIRTPYGAVGHGGHYHSQSPEAFFCHVPGLKVVIPRSPREAKGLLLASIRDPNPVVFFEPKWLYRLAVEEVPEEDYMLPLSEAEVIREGSDITLVGWGAQLAVLKEACEDAAKDGVSCELIDLKTLVPWDKETVEASVKKTGKLLVSHEAPVTGGFGAEIAASIAERCFQRLEAPVARVCGLDTPFPLVYEPFYMPTKNKVLDAIKATIDF

SEQ ID NO: 15806 - DNA, 1501 bp, Zea mays subsp. mays
  misc_feature (1)..(1501): Ceres Seq. ID no. 12381108
  misc_feature (1)..(1501): Ortholog of  Ceres SEQ ID NO 13637939 as cited in SEQ ID NO 54930
cgtttgtctcttccccagtcgcgcaccgcgggccgcggttcgcctggcggctggcgtaaggtagcggctgcgacgtgagtgggcctatatcagcgcggcactcacggggaggcggtgccaacccatatccatcacggcgaagagacctcgggagtgagtgggccgctgggagagcagacaacactgcaacggggtgcgcgcccgcccgtgccgttctccgtcgtcaccgttcgcccgccgccgatccatggggtgggcgctggctctgcacggcggcgccggggacgtgccgcgcacgctgccgcccgagagcagggagccgcgcctcgccacactccgccgctgcctcgacatcggcaccgccgcgctccgggagggccgcaccgcgctcgacgttgtcgagctcgtcgtgagggagctggaggactgcccgcacttcaacgccggccggggctccgtgctcacctccgccggcaccgtcgagatggaggcctgcgtcatggagggcgccaccctgcactgcggcgcggtctccgggctctccaccgttgccaacgccgtctccctcgccagactcgtcatggagaagacgccgcacatctacctcgccttcgacggcgccgaggccttcgccagggaacagggggtggagactaaggatccaagccactttatcacggacaacaatatcgagcgtgaggcaggccaaagaggccaacagggtgcagatcgactacacccagccagcagcaggccaaagccaaaaggcccaggccgtggtggacgacaactgccagacgggcacggtagggtgcgtggccgtggacgcggcgggcaacctcgctacggcgacgtccacgggccgggctggtgaacaagatgcccggcaggatcggcgacacgcctctggtgggcgccggcacgtacgccaacgcgctgtgcgcggtgtccgccacgggcaagggcgaggagatcatccgccgcacggtggcgcgcgacgtcgcggcgctgatggagcgcggggacgcgctcccggctgcggcgacgccgcggcgcgcgtcgtggcgggggcggcccgcggccccgtggggctggtggccgtgtcgcgccagggggaggtttgtatggcgcacaacaccaccgccatgttcagggcgtgcgccaccgaggccggccacaccgaagtcggcatctggacggacgccgccgacgcaggcacgggcgcggacggagagactgtcagcgtcgcgctctagctctaggcatttcatccccgtgtggcgtattttatcgttcgcgtcccattattgccccctgtccgatagacaacttgttctcgattcggtaatttcaccgtgcttcagctgcgtgtgtttggaaaaattgattcggtttcgggtattgttaagagatcgatgggagaagtgaaacattgttgggcgttcagtatgcttttgtaataccttttgttttcttaaataaagtcctaaggagtgttggg

SEQ ID NO: 15807 - protein, 208 aa, Zea mays subsp. mays
  peptide (1)..(208): Ceres Seq. ID no. 12381109
MGWALALHGGAGDVPRTLPPESREPRLATLRRCLDIGTAALREGRTALDVVELVVRELEDCPHFNAGRGSVLTSAGTVEMEACVMEGATLHCGAVSGLSTVANAVSLARLVMEKTPHIYLAFDGAEAFAREQGVETKDPSHFITDNNIEREAGQRGQQGADRLHPASSRPKPKGPGRGGRQLPDGHGRVRGRGRGGQPRYGDVHGPGW

SEQ ID NO: 15808 - protein, 182 aa, Zea mays subsp. mays
  peptide (1)..(182): Ceres Seq. ID no. 12381110
MPGRIGDTPLVGAGTYANALCAVSATGKGEEIIRRTVARDVAALMERGDALPAAATPRRASWRGRPAAPWGWWPCRARGRFVWRTTPPPCSGRAPPRPATPKSASGRTPPTQARARTERLSASRSSSRHFIPVWRILSFASHYCPLSDRQLVLDSVISPCFSCVCLEKLIRFRVLLRDRWEK

SEQ ID NO: 15809 - protein, 138 aa, Zea mays subsp. mays
  peptide (1)..(138): Ceres Seq. ID no. 12381111
MERGDALPAAATPRRASWRGRPAAPWGWWPCRARGRFVWRTTPPPCSGRAPPRPATPKSASGRTPPTQARARTERLSASRSSSRHFIPVWRILSFASHYCPLSDRQLVLDSVISPCFSCVCLEKLIRFRVLLRDRWEK

SEQ ID NO: 15810 - DNA, 1589 bp, Zea mays subsp. mays
  misc_feature (1)..(1589): Ceres Seq. ID no. 12383341
  misc_feature (1)..(1589): Ortholog of  Ceres SEQ ID NO 14306797 as cited in SEQ ID NO 53354
  misc_feature (1)..(1589): Ortholog of  Ceres SEQ ID NO 15176525 as cited in SEQ ID NO 54495
  misc_feature (1)..(1589): Ortholog of  Ceres SEQ ID NO 15169519 as cited in SEQ ID NO 67237
gcacgagaccattacctagaacatcctaatcgaaaaaccaaaccaacgcgcgcctatttcaagccacggaacctcctagcctacgcaggccgcagctcccacgtcccaacaacttgccaattcgcaccgcgggaccggcgccgtcttgttgctccgctccggccgtgacacgagcgcacccgccaccaccgccagcccctcctcccccgtcgactcgagccacaggacaaggcatcccaaccgccgcccatctcctatcgtcatctgccgatccctcctcggttcctcacagtcacagagcctcacgtcacgtgtacctcccccaacgcaacccagcccaacccagcccaaaacctagcgggcgaggggccggggaaccgaccgccggacgcggagatggaccacgcggcggaggcgcagcggacggacctgatgacgatcacgcggcacgtgctcaacgagcagagccgccacccggagtcccgcggcgacttcaccatcctcctctcccacatcgtcctcggctgcaagttcgtcgccgccgcggtcaacaaggccggcctcgccaagctcatcggcctcgccggagagaccaacgtccagggcgaggagcaaaagaagctggatgtcctgtccaacgaggtcttcgtgaaggcgctcgtcagcagcggccgcacctgtgtcctcgtgtctgaagagaacgaggaggccatcttcgtcgacccggccctccgcgggaagtactgcgtctgcttcgacccgctggatggctcctccaacatcgactgtggtgtctcaatcggaacgatctttgggatttacatggtcaaagacaaggacaacgtgaccttggaggatgtgctgcagcctggaacaaacatgcttgctgctggctactgcatgtacgggagttcctgcacgcttgtgctgagcactgggaacggagtcaatggcttcactctcgatccttcccttggagagttcattttgactcatccaaatatcaagataccaaagaaagggaagatctattcagtgaacgaagggaacgcaaaaaactgggatgggcctacagctaaattcgtggagaaatgcaagtatcctgaggatggttcaccgcctagatccttgagatatatcggaagtatggttgctgatgtccatcgcaccttactatacgggggcatatttttgtacccagcagaccagaagagtccaaacgggaaactacgcgttctgtatgaagtcttcccgatgtcattcctgatggaacaagctggaggccaggccttcacaggcaaacaacgggcccttgaacttgctcccgctaaacttcacgacagatccccagtgttcctcgggagctacgatgacgttgaggagatcaaagcactgtacgcttcaatgtcaaacagcggttgacctttctgcctgaggaaacgagcgagatcaaaagcaccgtacgcttcagagtcaactgcttgatctttatagattgtaataaaataataaaagagtttgtaaaaaaaacaacaacactgcttgatctttctgcatgaggataaaaagcgcatagtttccccggttgg

SEQ ID NO: 15811 - protein, 341 aa, Zea mays subsp. mays
  peptide (1)..(341): Ceres Seq. ID no. 12383342
MDHAAEAQRTDLMTITRHVLNEQSRHPESRGDFTILLSHIVLGCKFVAAAVNKAGLAKLIGLAGETNVQGEEQKKLDVLSNEVFVKALVSSGRTCVLVSEENEEAIFVDPALRGKYCVCFDPLDGSSNIDCGVSIGTIFGIYMVKDKDNVTLEDVLQPGTNMLAAGYCMYGSSCTLVLSTGNGVNGFTLDPSLGEFILTHPNIKIPKKGKIYSVNEGNAKNWDGPTAKFVEKCKYPEDGSPPRSLRYIGSMVADVHRTLLYGGIFLYPADQKSPNGKLRVLYEVFPMSFLMEQAGGQAFTGKQRALELAPAKLHDRSPVFLGSYDDVEEIKALYASMSNSG

SEQ ID NO: 15812 - protein, 329 aa, Zea mays subsp. mays
  peptide (1)..(329): Ceres Seq. ID no. 12383343
MTITRHVLNEQSRHPESRGDFTILLSHIVLGCKFVAAAVNKAGLAKLIGLAGETNVQGEEQKKLDVLSNEVFVKALVSSGRTCVLVSEENEEAIFVDPALRGKYCVCFDPLDGSSNIDCGVSIGTIFGIYMVKDKDNVTLEDVLQPGTNMLAAGYCMYGSSCTLVLSTGNGVNGFTLDPSLGEFILTHPNIKIPKKGKIYSVNEGNAKNWDGPTAKFVEKCKYPEDGSPPRSLRYIGSMVADVHRTLLYGGIFLYPADQKSPNGKLRVLYEVFPMSFLMEQAGGQAFTGKQRALELAPAKLHDRSPVFLGSYDDVEEIKALYASMSNSG

SEQ ID NO: 15813 - protein, 199 aa, Zea mays subsp. mays
  peptide (1)..(199): Ceres Seq. ID no. 12383344
MVKDKDNVTLEDVLQPGTNMLAAGYCMYGSSCTLVLSTGNGVNGFTLDPSLGEFILTHPNIKIPKKGKIYSVNEGNAKNWDGPTAKFVEKCKYPEDGSPPRSLRYIGSMVADVHRTLLYGGIFLYPADQKSPNGKLRVLYEVFPMSFLMEQAGGQAFTGKQRALELAPAKLHDRSPVFLGSYDDVEEIKALYASMSNSG

SEQ ID NO: 15814 - DNA, 1998 bp, Zea mays subsp. mays
  misc_feature (1)..(1998): Ceres Seq. ID no. 12406235
  misc_feature (1)..(1998): Ortholog of  Ceres SEQ ID NO 14313491 as cited in SEQ ID NO 0
aagatctttcccaaaattccagtggaatccgcacagcggagcgctgcctgagtccgtccccgttgcttgggtgcctgtgccggacgcccgcagtcccaccatcccaactctcaaccccagcgcagcagcctgcaccacaccagaaaccacaccaccacgctcaccgccgtgagcccgtgacccccacgtccccccacaccacggcacgtcggcaccagcttaactcccggtccgcggcgacacctcaccatcgcgcgcgcacacacacgagcgtgcgccgctccctgttcctcgtgacccccctccccgcctcccctctctctctctcacacacacacacaagtcggtgctgcagcagcagcagtcgcagtccagccgtgagctcttgccgtgcgagcgattcaccgcagggcgcacgggaatccaatcaaatcccccaggaaggtagccccgcggccgcccgttcctcgctccgccccgcgccgacgcctctccccgatcccgatctgtgcgcccgcaccctgcgtgggatggaggcggcgccgcggcggcagcagcaggaggaggaggggtgcccgtgcggcgggcccgaggccgcggaccacttcgagcggctccacgacgcggtgctgctcgacgtcctcaaccgcatcggcgacgtcaaggcgctcggccgctgcgccctcgtctcgcgccgcttccacgcgctcgtgccgctcgtcgactccgtcttcgtccgcgtcgactgcgtcatccccgacgacccaccctcttcctcctccgcgggcgccgcaccgggctccccgccgcaccaggcgccggcgccaaccgcgtgcgggcgcggcgcgctcgcgcgcgtcgcgcgcgccctgctcggcggcgtcgctaggcccatccacgcgctcggccagatcctctcctccgccgcggcgaccgtctcccggcgctccgagccactgcccgcttccccgccgcccgcgcccgtcgcggacgtctcccaccactcgccctccgaggtgctccgctccttcagggagctgcggcgccttcacatcgagctgcccacgggcgagctcggcattgacgacggcgtgctccttaagtggaaggccgacttcggctccaccctcggcagctgcgtcatcctcggcgcctcgtcggtctcgtccaagccgccggcagggtccgctcaggcggaaactgctgcggccgacagcacgcccgccgctcccgataccggtagggagactgaagagccgggaagccctgcctgattctctctacacaaatggagggctcaagctccgcgttgtctggaccatcagctccctgattgccgcgtcggcgaggcattacttgctgcacccgattatctgtaatcacggaacgcttgagagcttggacctgacagatgccgacgggcaaggggtgctcaccatggacaagaggcagctgcaggaactgcgggtgcggcccgtctctccatcagggagctcgcaccgcacactcatgccggcactcagtatgcgtctgcactacgcaccactcattgaactgcctgggggaacgctgctgaaaggtgcaacactagtggcgatcagaccaagcgaggatgccttgagggagggccaaggggttgcaggtcctgctggtacatgctggatttcagaggcctttgaggagccatatcggactgcggcaaaggtgctcctcaagagaagggcatattgccttgaaatgaactcgttctgagcaccagggattcacttccacagagttctacccatctgacaggatgggggaagtgagatgcccttcggttaatatatgggaattcatcattcagtgcaaaaattggaccaactctccccatcattaatttatctgatctcggtgaagagatgacttcgtgtacctgtacctttagggttgtaattacagatacgtatttgtgctggactactacacgcggaacggaatgctatttggccgattccg

SEQ ID NO: 15815 - protein, 423 aa, Zea mays subsp. mays
  peptide (1)..(423): Ceres Seq. ID no. 12406236
DLSQNSSGIRTAERCLSPSPLLGCLCRTPAVPPSQLSTPAQQPAPHQKPHHHAHRREPVTPTSPHTTARRHQLNSRSAATPHHRARTHTSVRRSLFLVTPLPASPLSLSHTHTSRCCSSSSRSPAVSSCRASDSPQGARESNQIPQEGSPAAARSSLRPAPTPLPDPDLCARTLRGMEAAPRRQQQEEEGCPCGGPEAADHFERLHDAVLLDVLNRIGDVKALGRCALVSRRFHALVPLVDSVFVRVDCVIPDDPPSSSSAGAAPGSPPHQAPAPTACGRGALARVARALLGGVARPIHALGQILSSAAATVSRRSEPLPASPPPAPVADVSHHSPSEVLRSFRELRRLHIELPTGELGIDDGVLLKWKADFGSTLGSCVILGASSVSSKPPAGSAQAETAAADSTPAAPDTGRETEEPGSPA

SEQ ID NO: 15816 - protein, 247 aa, Zea mays subsp. mays
  peptide (1)..(247): Ceres Seq. ID no. 12406237
MEAAPRRQQQEEEGCPCGGPEAADHFERLHDAVLLDVLNRIGDVKALGRCALVSRRFHALVPLVDSVFVRVDCVIPDDPPSSSSAGAAPGSPPHQAPAPTACGRGALARVARALLGGVARPIHALGQILSSAAATVSRRSEPLPASPPPAPVADVSHHSPSEVLRSFRELRRLHIELPTGELGIDDGVLLKWKADFGSTLGSCVILGASSVSSKPPAGSAQAETAAADSTPAAPDTGRETEEPGSPA

SEQ ID NO: 15817 - DNA, 1742 bp, Zea mays subsp. mays
  misc_feature (1)..(1742): Ceres Seq. ID no. 13498411
  misc_feature (1)..(1742): Ortholog of  Ceres SEQ ID NO 14314550 as cited in SEQ ID NO 52321
aaaaaagcgtcgcggagccacgaccgacgacccctattttggcacgcccgtcccccgcttatacgccgcgccggcgaggtcgctgctccgaatcaccttcccttcctattccctctctctctctctctctnnntctctctctctactctntctctctctctcccgcccgctccnnggcctcctcctctacccgccccacaaaccaaggccctccgctgtctgcacggcgacggcggtgcatgggcggcgggcgcgccgggacgacgacgacgacgaccgcgccgccatgaccaccaccaccacggccgcggccgcggtcgcgcagctctgcgccgggccacggcggcgcaagcaggcagcaggggctcggctcgacctgcgctgggcgcgcctgctccgcctcgccgtcgtcaccagggtgctccgcctcgcgcgcgaccagctgctcgcctgctcctcctgcgggggcggcaccgccgcccgccgccggtaccgccgcctcggcccgcccaccagcgccagcgccggtcccgtgctgtcacccgtcgacagggacgacgactgcgccgcggacgccgaggccgcggcccctcgcgacgcggccgacgacgaagacaacgttgtcagcctcaaggtcagcctgctcggcgactgccagattggcaagaccagcttcatggttaagtatgtgggagatgacggggaggagcagaacggcttgcagatgacgggcctgaatctcatggacaagacgatgcccgtcaggggagcaaggattgcctacagcatctgggatgtggcaggagaccaccagtccgtcgaccacgtcccaatcgcgtgcaaggacgccgtggcgatcctgtacatgttcgatctcacgagccgctgcacgcttaataacattgtagattggtacgggagggcgaggaaatggaataagacggctattccaatcctaatcgggacaaagtttgatgactttgctcagcttcctcttgagatgcaatgggccatcgttaaccaggccagagcatacgcaagagcgatgaaggcgaccctcttcttctcgagcgcgacgcacaacatcaacgtgaacaagatcttcaagttcatcacggccaagctcttcaacctcccgtggacggtggagcgcaacctcaccatcggcgagcccatcatagacttctgacgaccccttcctctaactagtaactcggcagcacacgcacgacgacccttggtatatatcatgggttgacagggtcgtgtctttcgatcctcttgccctgtgcgagccgccggagccatgaagtgaccgagcatgcccgtcgtcctcttcctcctggtggccggctgcagcaggcaagatgccctttgtaaatatagccataggtgacggtcccgcgtgcgtgcggccgtgcgggagcgtcgtcaaatgggaagaaaaccgcgaggtgtgactgtgatgtaacaccccgtctgtaacattcgccagagtatataggaaatccatgttaatataccctccattccaactgacaaaggcatgcgctggcgcctgncggcttnctnccggtgcagaacctcttctttctgctcacccnacgnagctgcgtgcttgcatgcgtcttgaggcgtgcaagcagttcaggttcctccgttcctgtagttggttatttgtacatctgtgagttatttgcacgacgagtcaatttatgctaccccgtcacaactcncaagct

SEQ ID NO: 15818 - protein, 395 aa, Zea mays subsp. mays
  peptide (1)..(395): Ceres Seq. ID no. 13498412
  misc_feature (44)..(44): Xaa is any aa, unknown or other
  misc_feature (50)..(50): Xaa is any aa, unknown or other
  misc_feature (58)..(58): Xaa is any aa, unknown or other
KKRRGATTDDPYFGTPVPRLYAAPARSLLRITFPSYSLSLSLSXSLSLLXLSLSRPLXGLLLYPPHKPRPSAVCTATAVHGRRARRDDDDDDRAAMTTTTTAAAAVAQLCAGPRRRKQAAGARLDLRWARLLRLAVVTRVLRLARDQLLACSSCGGGTAARRRYRRLGPPTSASAGPVLSPVDRDDDCAADAEAAAPRDAADDEDNVVSLKVSLLGDCQIGKTSFMVKYVGDDGEEQNGLQMTGLNLMDKTMPVRGARIAYSIWDVAGDHQSVDHVPIACKDAVAILYMFDLTSRCTLNNIVDWYGRARKWNKTAIPILIGTKFDDFAQLPLEMQWAIVNQARAYARAMKATLFFSSATHNINVNKIFKFITAKLFNLPWTVERNLTIGEPIIDF

SEQ ID NO: 15819 - protein, 300 aa, Zea mays subsp. mays
  peptide (1)..(300): Ceres Seq. ID no. 13498413
MTTTTTAAAAVAQLCAGPRRRKQAAGARLDLRWARLLRLAVVTRVLRLARDQLLACSSCGGGTAARRRYRRLGPPTSASAGPVLSPVDRDDDCAADAEAAAPRDAADDEDNVVSLKVSLLGDCQIGKTSFMVKYVGDDGEEQNGLQMTGLNLMDKTMPVRGARIAYSIWDVAGDHQSVDHVPIACKDAVAILYMFDLTSRCTLNNIVDWYGRARKWNKTAIPILIGTKFDDFAQLPLEMQWAIVNQARAYARAMKATLFFSSATHNINVNKIFKFITAKLFNLPWTVERNLTIGEPIIDF

SEQ ID NO: 15820 - protein, 227 aa, Zea mays subsp. mays
  peptide (1)..(227): Ceres Seq. ID no. 13498414
  misc_feature (44)..(44): Xaa is any aa, unknown or other
  misc_feature (45)..(45): Xaa is any aa, unknown or other
  misc_feature (50)..(50): Xaa is any aa, unknown or other
  misc_feature (58)..(58): Xaa is any aa, unknown or other
  misc_feature (59)..(59): Xaa is any aa, unknown or other
KKASRSHDRRPLFWHARPPLIRRAGEVAAPNHLPFLFPLSLSLXXSLSTXSLSLPPAXXPPPLPAPQTKALRCLHGDGGAWAAGAPGRRRRRPRRHDHHHHGRGRGRAALRRATAAQAGSRGSARPALGAPAPPRRRHQGAPPRARPAARLLLLRGRHRRPPPVPPPRPAHQRQRRSRAVTRRQGRRLRRGRRGRGPSRRGRRRRQRCQPQGQPARRLPDWQDQLHG

SEQ ID NO: 15821 - DNA, 1789 bp, Zea mays subsp. mays
  misc_feature (1)..(1789): Ceres Seq. ID no. 12364617
  misc_feature (1)..(1789): Ortholog of  Ceres SEQ ID NO 13599900 as cited in SEQ ID NO 531
  misc_feature (1)..(1789): Ortholog of  Ceres SEQ ID NO 13596509 as cited in SEQ ID NO 62004
  misc_feature (1)..(1789): Ortholog of  Ceres SEQ ID NO 13659971 as cited in SEQ ID NO 67565
  misc_feature (1)..(1789): Ortholog of  Ceres SEQ ID NO 13500385 as cited in SEQ ID NO 67583
gcacgagaccattacctagaacatcctaatcgaaaatcgccacccaaaagccaccgcgatcccgtgcttccttctcgcacctgcggatctactctccgcacctgcggatctaccccccggcgaaacaagcgccccgacgcctcagggaatgcggagcgatgaggcggcgctcaggcactgacgtcgccggtcagcgcgagctgcgcggcgaccgaacctgccatcgcaagcacgtcgaggacgggtagactcgtccatccttccttcctcctgttagtcgtcgtagggtagtttgcactttgcagatagctagctagtagttaggggatcaggcatgggtgagggcgaggcggaggtgaagggcggggtgctgcagggccgctacgagctcggccgcgtgctgggtcacggcaacttcgggcgcgtccacgcggcgcgggacctgcgcaccgggcgggccgtggcggtgaaggtgctcgacaaggacaagatgctgcgcacgggcatgatggagcagatcaagcgcgagatcgccgtcatgaagcgcgtgtcccaccccaacatcgtggagctccacgaggtgatggccacgcgctccaagatctacctcgcgctggagctcgtccgcggaggggagctcttcgcgcggatcgtgcgcgccgggcgcgtcaaggaggacgtggcgcggcgctacttccggcagctcatacacgccgtggacttctgccacgcgcggggcgtgtaccaccgcgacctgaagctcgagaacctcctcctggacgacgcggggaacctcaaggtcgtcgactttggcctcagcgcgctggccgaccacgcgcgcagcgacgggctgctgcacacgctctgcggcacgcccgggtacgtcgcgccggaggtgttccggaacaagggctacgacggcgccaaggctgacatctggtcgtgcggcgtcatcctctacgtcctcctcgcagggtcgctgccgttcccggacgacaacgttgccgccatgttccggaagatgagccgcggcgactaccggtgcccgccgtggctgtccacggaggcgcgcaggctcatccccaagctgctcgaccccgaccccgacacccgcatcaccatcgcccagctcgtcgagacgccgtggttcaacaagccgtccgtctcgaggtccgtcagagccgccgccggcgcaaccgagccgccggccgagcctgcctcctccgcaaaggacggcggcgacaaggacgagccaccggagacgatgaacgcgttccacctgatctccctctccgcggggttcgacctctcaccgctgttcgacgtggaaggcggtccggcgagggggccccgggagggcggcatgcggttcgcgacgcgggagcccgcgagcggcgtcgtctcccgtctcgaggaggtggccgcccgcggcggcgggcggatgcgggtgaccaagagcggcgcccgcggcgttcggctcgagggcgcggagcgcgggggccgcaagggccggctagccgtggcggccgacatcttctgcgtggcgccgtcggtgctcgtcgtcgacgtgaagaaggacggcggcgactccctcgagtaccgctccttctgcagcgaggagctccggccggcgctcaaagacatcgtctgggcggccgacccccagcccgccgtcgtgtgacgcccgtgctgccgcctgcccgctcattgtttctggatcgtagtggtgccatagtttagtcagtgtcagttccatttccaaagtgattgcgtcactgttctcgattcg

SEQ ID NO: 15822 - protein, 448 aa, Zea mays subsp. mays
  peptide (1)..(448): Ceres Seq. ID no. 12364618
MGEGEAEVKGGVLQGRYELGRVLGHGNFGRVHAARDLRTGRAVAVKVLDKDKMLRTGMMEQIKREIAVMKRVSHPNIVELHEVMATRSKIYLALELVRGGELFARIVRAGRVKEDVARRYFRQLIHAVDFCHARGVYHRDLKLENLLLDDAGNLKVVDFGLSALADHARSDGLLHTLCGTPGYVAPEVFRNKGYDGAKADIWSCGVILYVLLAGSLPFPDDNVAAMFRKMSRGDYRCPPWLSTEARRLIPKLLDPDPDTRITIAQLVETPWFNKPSVSRSVRAAAGATEPPAEPASSAKDGGDKDEPPETMNAFHLISLSAGFDLSPLFDVEGGPARGPREGGMRFATREPASGVVSRLEEVAARGGGRMRVTKSGARGVRLEGAERGGRKGRLAVAADIFCVAPSVLVVDVKKDGGDSLEYRSFCSEELRPALKDIVWAADPQPAVV

SEQ ID NO: 15823 - protein, 396 aa, Zea mays subsp. mays
  peptide (1)..(396): Ceres Seq. ID no. 12364619
MLRTGMMEQIKREIAVMKRVSHPNIVELHEVMATRSKIYLALELVRGGELFARIVRAGRVKEDVARRYFRQLIHAVDFCHARGVYHRDLKLENLLLDDAGNLKVVDFGLSALADHARSDGLLHTLCGTPGYVAPEVFRNKGYDGAKADIWSCGVILYVLLAGSLPFPDDNVAAMFRKMSRGDYRCPPWLSTEARRLIPKLLDPDPDTRITIAQLVETPWFNKPSVSRSVRAAAGATEPPAEPASSAKDGGDKDEPPETMNAFHLISLSAGFDLSPLFDVEGGPARGPREGGMRFATREPASGVVSRLEEVAARGGGRMRVTKSGARGVRLEGAERGGRKGRLAVAADIFCVAPSVLVVDVKKDGGDSLEYRSFCSEELRPALKDIVWAADPQPAVV

SEQ ID NO: 15824 - protein, 391 aa, Zea mays subsp. mays
  peptide (1)..(391): Ceres Seq. ID no. 12364620
MMEQIKREIAVMKRVSHPNIVELHEVMATRSKIYLALELVRGGELFARIVRAGRVKEDVARRYFRQLIHAVDFCHARGVYHRDLKLENLLLDDAGNLKVVDFGLSALADHARSDGLLHTLCGTPGYVAPEVFRNKGYDGAKADIWSCGVILYVLLAGSLPFPDDNVAAMFRKMSRGDYRCPPWLSTEARRLIPKLLDPDPDTRITIAQLVETPWFNKPSVSRSVRAAAGATEPPAEPASSAKDGGDKDEPPETMNAFHLISLSAGFDLSPLFDVEGGPARGPREGGMRFATREPASGVVSRLEEVAARGGGRMRVTKSGARGVRLEGAERGGRKGRLAVAADIFCVAPSVLVVDVKKDGGDSLEYRSFCSEELRPALKDIVWAADPQPAVV

SEQ ID NO: 15825 - DNA, 1201 bp, Zea mays subsp. mays
  misc_feature (1)..(1201): Ceres Seq. ID no. 12407124
  misc_feature (1)..(1201): Ortholog of  Ceres SEQ ID NO 15179139 as cited in SEQ ID NO 1093
  misc_feature (1)..(1201): Ortholog of  Ceres SEQ ID NO 15226793 as cited in SEQ ID NO 58689
acgaattccccattcccttcccccatcgcatcgagagccaggccagccagccacctctgctaggtctccatggccgccgcgctcaggtccccggcctcggccaaggtctcgagccccgccgccgcctccacgtgcgccaggcgtccagagtcgcggtgggcgggttccggcagcatccgcggagccgtgtcggccccgtggccgtgcgggcgtcgctgttctcgcccaagcccgcggcggccaaggacgcgcggccgaccaaggtgcaggagctgtacgtgtacgagatgaacgagcgggaccgcgagagccccgcgtacctgcgcctcagcgccaagcagacggagaacgcgctgggcgacctggtccccttcacaaacaaggtccgtcgtcgttgtgttccttgctttgctttttgcttttgcttttgcttttgccttgatcggtgcctccgcttagccgctcttcctccccacccacccatgcacccaggtttacaacggcagcctggacaagcggctgggcatcaccgccggcatctgcgtgctcatccagcacgtccccgaccgcaacggcgaccggtacgaggccatctacagcttctacttcggcgactacggccacatctcggtgcagggcgcgtacctgacctacgaggagtcgtacctggccgtcacgggcggntccggcgtacttcgagggcgcctacggccaggtcaagctccaccagatcgtcttccccttcaagatcttctacaccttctacctccggggcatcccggacctgcccagggacctgctctgcacgcccgtcccgccctcccccaccgtcgagcccacgcccgccgccagggccgccgagccgcacgcctgcgtcaacaactacaccaactgactgatcaactccagcccaggaaccatctctgcctgccatgcctgtccctcactcgatttgtatgtttgtatggcttangtccttcgattcgtacgttcgtgcgtggtagcaccaataaacatgcgatcgattgagttgtgtgtgcttctccattcattcacttgctctttctgcagctcgtgatcgagttgtgtgtgctccattcccaaattatgtatgatcgattagtagcgttaggggttaaccagtagccgctgtgtacttgtgtcacccttggacaaacaatgagatatttctttgtcgtcg

SEQ ID NO: 15826 - protein, 298 aa, Zea mays subsp. mays
  peptide (1)..(298): Ceres Seq. ID no. 12407125
  misc_feature (228)..(228): Xaa is any aa, unknown or other
EFPIPFPHRIESQASQPPLLGLHGRRAQVPGLGQGLEPRRRLHVRQASRVAVGGFRQHPRSRVGPVAVRASLFSPKPAAAKDARPTKVQELYVYEMNERDRESPAYLRLSAKQTENALGDLVPFTNKVRRRCVPCFAFCFCFCFCLDRCLRLAALPPHPPMHPGLQRQPGQAAGHHRRHLRAHPARPRPQRRPVRGHLQLLLRRLRPHLGAGRVPDLRGVVPGRHGRXRRTSRAPTARSSSTRSSSPSRSSTPSTSGASRTCPGTCSARPSRPPPPSSPRPPPGPPSRTPASTTTPTD

SEQ ID NO: 15827 - protein, 203 aa, Zea mays subsp. mays
  peptide (1)..(203): Ceres Seq. ID no. 12407126
  misc_feature (133)..(133): Xaa is any aa, unknown or other
MNERDRESPAYLRLSAKQTENALGDLVPFTNKVRRRCVPCFAFCFCFCFCLDRCLRLAALPPHPPMHPGLQRQPGQAAGHHRRHLRAHPARPRPQRRPVRGHLQLLLRRLRPHLGAGRVPDLRGVVPGRHGRXRRTSRAPTARSSSTRSSSPSRSSTPSTSGASRTCPGTCSARPSRPPPPSSPRPPPGPPSRTPASTTTPTD

SEQ ID NO: 15828 - DNA, 983 bp, Zea mays subsp. mays
  misc_feature (1)..(983): Ceres Seq. ID no. 12350640
  misc_feature (1)..(983): Ortholog of  Ceres SEQ ID NO 13585286 as cited in SEQ ID NO 62478
  misc_feature (1)..(983): Ortholog of  Ceres SEQ ID NO 13503500 as cited in SEQ ID NO 68001
  misc_feature (1)..(983): Ortholog of  Ceres SEQ ID NO 15174327 as cited in SEQ ID NO 0
accagagagccacagcaccagcggcaggcacccaaagcccaggaccgccaatggccgaccgcgtgtaccccgccgccaagccgaacccgcctccaggcgcggcgggcaacagcaacggcgcgcaggcgtcgtcgttccctgcgcccaagtcgcagatgtaccagcggcccatctaccgtccgcaggcccccgcgaagcggcagcgcgggcggtcgtgccggtgcagcttgtgctgctgcttctgctgggcgctggtggtggtgatcctgctggcgttcgtggccgcggtgtgcggcggcgtcttctacctgctgtaccggccgcagcggccgtcgttcagcgtgtcgtcagtgcggctggcgtcgctgaacctgacgtcgtcggcgacggcgcccgtgctgagcgacgccatcacgctgaccgtgacggcgcggaacccgaacaagaagatggtgtacctgtacgacgacctgaccctgctggtggccacggccgccaacgccgtgccgctggggagcgccaccgtgcccgggttcgcgcacgcggccggcaacaccaccgtgctgaccgccaccgtctccgccagcgcggtgggcgtggaccccagcggcgccagctccgacatcaagcggtccggcggcgggtcgttctccgtggtggtggacgcggacaccagcgccggcgtccgggtgggcgggcttaagacgaagaagatcggcatccaggtgcactgcgagggcatcaagctgacggcaccgcctccgccaccgccggcgcccaagagggccaaggggaagaacagcaccgccgcgctcgcgcctgctccggcgccgtccgccgccgacgcgacgccggcgaagacggccacggtgagcacggcggcgcactcgtgcaaggttagggtccgcgtcaagatctggaagtggactttctaggtacgggcagcgggaggataggacacacctttaggggctgcagcgcgc

SEQ ID NO: 15829 - protein, 310 aa, Zea mays subsp. mays
  peptide (1)..(310): Ceres Seq. ID no. 12350641
QRATAPAAGTQSPGPPMADRVYPAAKPNPPPGAAGNSNGAQASSFPAPKSQMYQRPIYRPQAPAKRQRGRSCRCSLCCCFCWALVVVILLAFVAAVCGGVFYLLYRPQRPSFSVSSVRLASLNLTSSATAPVLSDAITLTVTARNPNKKMVYLYDDLTLLVATAANAVPLGSATVPGFAHAAGNTTVLTATVSASAVGVDPSGASSDIKRSGGGSFSVVVDADTSAGVRVGGLKTKKIGIQVHCEGIKLTAPPPPPPAPKRAKGKNSTAALAPAPAPSAADATPAKTATVSTAAHSCKVRVRVKIWKWTF

SEQ ID NO: 15830 - protein, 294 aa, Zea mays subsp. mays
  peptide (1)..(294): Ceres Seq. ID no. 12350642
MADRVYPAAKPNPPPGAAGNSNGAQASSFPAPKSQMYQRPIYRPQAPAKRQRGRSCRCSLCCCFCWALVVVILLAFVAAVCGGVFYLLYRPQRPSFSVSSVRLASLNLTSSATAPVLSDAITLTVTARNPNKKMVYLYDDLTLLVATAANAVPLGSATVPGFAHAAGNTTVLTATVSASAVGVDPSGASSDIKRSGGGSFSVVVDADTSAGVRVGGLKTKKIGIQVHCEGIKLTAPPPPPPAPKRAKGKNSTAALAPAPAPSAADATPAKTATVSTAAHSCKVRVRVKIWKWTF

SEQ ID NO: 15831 - protein, 259 aa, Zea mays subsp. mays
  peptide (1)..(259): Ceres Seq. ID no. 12350643
MYQRPIYRPQAPAKRQRGRSCRCSLCCCFCWALVVVILLAFVAAVCGGVFYLLYRPQRPSFSVSSVRLASLNLTSSATAPVLSDAITLTVTARNPNKKMVYLYDDLTLLVATAANAVPLGSATVPGFAHAAGNTTVLTATVSASAVGVDPSGASSDIKRSGGGSFSVVVDADTSAGVRVGGLKTKKIGIQVHCEGIKLTAPPPPPPAPKRAKGKNSTAALAPAPAPSAADATPAKTATVSTAAHSCKVRVRVKIWKWTF

SEQ ID NO: 15832 - DNA, 1084 bp, Zea mays subsp. mays
  misc_feature (1)..(1084): Ceres Seq. ID no. 12382191
  misc_feature (1)..(1084): Ortholog of  Ceres SEQ ID NO 12609041 as cited in SEQ ID NO 51310
  misc_feature (1)..(1084): Ortholog of  Ceres SEQ ID NO 14312140 as cited in SEQ ID NO 57002
  misc_feature (1)..(1084): Ortholog of  Ceres SEQ ID NO 14312224 as cited in SEQ ID NO 57255
ggaagaagcttcgaaccccttctggccatctctcgtcctcctttcaattcttgagctttgtgcttccatctcctctcctctgttctcttctttgtctctgcgtgcctgttcttgtcgtctcgctcgatcgtaagtgcaacggaataagaatggcgtcgccgtcagcgtcaggagagaagaagactacgatcctggtggcgaggaagggccggctgcggcagcgctacgacggcgagtaccgcctggtggccgggtgcgtgccgtaccgcgtggacgcggacggccagacgcagctgctcatggtgtccacgcccaacagggacgacctcgtcttccccaagggcgggtgggaggacgacgaggacgtgcacgaggcggcgtgccgcgaagcgctggaggaggccggcgtcaggggcgccatcaaccgaagtgcgctcgggatgtgggtgttcaggagcaagagcagtccggtgagcagcgacagcccccggggcgcctgcaagggctacatcttcgcgctggaggtggcggaggagctggagcagtggccggagcaggacacccacggcaggcagtgggtctccccggcggacgcgtaccgcctctgccgctacgactggatgcgcgaggcgctgtcggcactgctcgaccgcctcacggaggagcccgagccccccaagtcccccgccgcggacggcctcggcgagcacgcaggcgtgtgcatgatggtcaaggcgaccacagccgctgcggatcgagcggtggcgctctgctagtggcatcattctgaacatgtgcaaatcctcatcatctgggtcgtcaggctcggctgttcgttcgaacttggtgtggttggtcggtgaatgcagtgtatggaaacttgtctcgtcaatccagggcttgtaaatgatgtcggttacgccacgtgttaaatcaaatggctacaactgtccgtagtgcgtagctgagagtttccttgtcaaatctattgaggtttccactgtttgatcctcgcttcgtgtgctaaccttctcgacttctttcaactgtccccccctatatacaatatcttagttttgttttt

SEQ ID NO: 15833 - protein, 257 aa, Zea mays subsp. mays
  peptide (1)..(257): Ceres Seq. ID no. 12382192
KKLRTPSGHLSSSFQFLSFVLPSPLLCSLLCLCVPVLVVSLDRKCNGIRMASPSASGEKKTTILVARKGRLRQRYDGEYRLVAGCVPYRVDADGQTQLLMVSTPNRDDLVFPKGGWEDDEDVHEAACREALEEAGVRGAINRSALGMWVFRSKSSPVSSDSPRGACKGYIFALEVAEELEQWPEQDTHGRQWVSPADAYRLCRYDWMREALSALLDRLTEEPEPPKSPAADGLGEHAGVCMMVKATTAAADRAVALC

SEQ ID NO: 15834 - protein, 208 aa, Zea mays subsp. mays
  peptide (1)..(208): Ceres Seq. ID no. 12382193
MASPSASGEKKTTILVARKGRLRQRYDGEYRLVAGCVPYRVDADGQTQLLMVSTPNRDDLVFPKGGWEDDEDVHEAACREALEEAGVRGAINRSALGMWVFRSKSSPVSSDSPRGACKGYIFALEVAEELEQWPEQDTHGRQWVSPADAYRLCRYDWMREALSALLDRLTEEPEPPKSPAADGLGEHAGVCMMVKATTAAADRAVALC

SEQ ID NO: 15835 - protein, 158 aa, Zea mays subsp. mays
  peptide (1)..(158): Ceres Seq. ID no. 12382194
MVSTPNRDDLVFPKGGWEDDEDVHEAACREALEEAGVRGAINRSALGMWVFRSKSSPVSSDSPRGACKGYIFALEVAEELEQWPEQDTHGRQWVSPADAYRLCRYDWMREALSALLDRLTEEPEPPKSPAADGLGEHAGVCMMVKATTAAADRAVALC

SEQ ID NO: 15836 - DNA, 1199 bp, Zea mays subsp. mays
  misc_feature (1)..(1199): Ceres Seq. ID no. 12386722
  misc_feature (1)..(1199): Ortholog of  Ceres SEQ ID NO 15171762 as cited in SEQ ID NO 57846
  misc_feature (1)..(1199): Ortholog of  Ceres SEQ ID NO 12597287 as cited in SEQ ID NO 63982
gcacgagaccattacctagaacatcctaatcgaaaacttcccgttccccaattcgaaatcgagtcgggtactcgggtcggtcttgccgtgcgtgcgtggctgcgcgaaccagcccacgctcccactccccgcccgccaccgccgggtccctctagggttttgccgcgatgtcgctccggccgagcgagcgggagcagatgcggaagggcaactacaagcagacggtggacgccgaggagagccgccgccgccgcgagggccagatggtcgacatccgcaaggccaagcgagaggaaagcctccagaagaagcgccgcgatgggttccccgccgccggcgccgtgccgccgatgggccactccaccgcactccagcagaagctcgatggcttgccggcgatggtacaggccgttcactccaacgaccccactgtgcagcttgaggccaccacgcagttcaggaagctgctctccatagagcgtagtcccccaattgaagaggtgatcagcacaggagtcgtgccccgattcattgagttccttacacgtgaggaccatccacaactccagtttgaggctgcatgggcgctcaccaacattgcatcaggcacatcagagaacactaaggtggtggttgagagtggtgctgtgcccatctttgttaagctcctcaactccaatagcgaggatgttcgtgaacaggctgtatgggctttaggtaatgttgctggtgactccccaaagtgccgtgatctggtgctaggccatggtgggctattccccttgctgcaacagcttaatgagcatgctaagctctcgatgctgaggaatgccacatggacactatcaaacttctgccgtgggaagccacaaccgaactttgatcaggtcaaaccagcattgccagcacttcagcaacttatccactctcaggatgaggaggtcctaactgatgcctgttgggctctatcatacctatctgatgggactaatgacaaaatccaagctgttattgaatctggcgtgttccctcgccttgtggaacttctgatgcatccttcagcctctgtactgattccagctctgcgcacggtgggtaacatcgtaactggggacgacatgcagactcagtgtgtcattgacaatcaagcacttccatgccttttgaacctactgaccaccacaccaaaacccgcatcc

SEQ ID NO: 15837 - protein, 344 aa, Zea mays subsp. mays
  peptide (1)..(344): Ceres Seq. ID no. 12386723
MSLRPSEREQMRKGNYKQTVDAEESRRRREGQMVDIRKAKREESLQKKRRDGFPAAGAVPPMGHSTALQQKLDGLPAMVQAVHSNDPTVQLEATTQFRKLLSIERSPPIEEVISTGVVPRFIEFLTREDHPQLQFEAAWALTNIASGTSENTKVVVESGAVPIFVKLLNSNSEDVREQAVWALGNVAGDSPKCRDLVLGHGGLFPLLQQLNEHAKLSMLRNATWTLSNFCRGKPQPNFDQVKPALPALQQLIHSQDEEVLTDACWALSYLSDGTNDKIQAVIESGVFPRLVELLMHPSASVLIPALRTVGNIVTGDDMQTQCVIDNQALPCLLNLLTTTPKPAS

SEQ ID NO: 15838 - protein, 334 aa, Zea mays subsp. mays
  peptide (1)..(334): Ceres Seq. ID no. 12386724
MRKGNYKQTVDAEESRRRREGQMVDIRKAKREESLQKKRRDGFPAAGAVPPMGHSTALQQKLDGLPAMVQAVHSNDPTVQLEATTQFRKLLSIERSPPIEEVISTGVVPRFIEFLTREDHPQLQFEAAWALTNIASGTSENTKVVVESGAVPIFVKLLNSNSEDVREQAVWALGNVAGDSPKCRDLVLGHGGLFPLLQQLNEHAKLSMLRNATWTLSNFCRGKPQPNFDQVKPALPALQQLIHSQDEEVLTDACWALSYLSDGTNDKIQAVIESGVFPRLVELLMHPSASVLIPALRTVGNIVTGDDMQTQCVIDNQALPCLLNLLTTTPKPAS

SEQ ID NO: 15839 - protein, 312 aa, Zea mays subsp. mays
  peptide (1)..(312): Ceres Seq. ID no. 12386725
MVDIRKAKREESLQKKRRDGFPAAGAVPPMGHSTALQQKLDGLPAMVQAVHSNDPTVQLEATTQFRKLLSIERSPPIEEVISTGVVPRFIEFLTREDHPQLQFEAAWALTNIASGTSENTKVVVESGAVPIFVKLLNSNSEDVREQAVWALGNVAGDSPKCRDLVLGHGGLFPLLQQLNEHAKLSMLRNATWTLSNFCRGKPQPNFDQVKPALPALQQLIHSQDEEVLTDACWALSYLSDGTNDKIQAVIESGVFPRLVELLMHPSASVLIPALRTVGNIVTGDDMQTQCVIDNQALPCLLNLLTTTPKPAS

SEQ ID NO: 15840 - DNA, 1258 bp, Zea mays subsp. mays
  misc_feature (1)..(1258): Ceres Seq. ID no. 12382152
  misc_feature (1)..(1258): Ortholog of  Ceres SEQ ID NO 15176306 as cited in SEQ ID NO 52784
  misc_feature (1)..(1258): Ortholog of  Ceres SEQ ID NO 13582624 as cited in SEQ ID NO 56287
  misc_feature (1)..(1258): Ortholog of  Ceres SEQ ID NO 14307280 as cited in SEQ ID NO 59443
  misc_feature (1)..(1258): Ortholog of  Ceres SEQ ID NO 14316536 as cited in SEQ ID NO 60272
  misc_feature (1)..(1258): Ortholog of  Ceres SEQ ID NO 13597264 as cited in SEQ ID NO 63897
  misc_feature (1)..(1258): Ortholog of  Ceres SEQ ID NO 13598570 as cited in SEQ ID NO 65434
  misc_feature (1)..(1258): Ortholog of  Ceres SEQ ID NO 13656452 as cited in SEQ ID NO 65745
  misc_feature (1)..(1258): Ortholog of  Ceres SEQ ID NO 13660333 as cited in SEQ ID NO 67464
  misc_feature (1)..(1258): Ortholog of  Ceres SEQ ID NO 13596238 as cited in SEQ ID NO 68834
  misc_feature (1)..(1258): Ortholog of  Ceres SEQ ID NO 15174329 as cited in SEQ ID NO 0
gcacgagaccattacctagaacatcctaatcgaaaaatagaactagagccagctccttgttgcccatggccatgacgagagcactggccatggtggccatgttggccactgctgccttgttcttcatgtccgctcgcgcacagcagtgcggtatgcaggccggcggcgcgctctgccccgactgcctctgctgcagccagtggggctattgcggctccactcccgactactgtaccggcggctgccagagccagtgcatcggcagcggctgcggcggcggcggcggtggtacccctgctactcccccgagcggcccggtgtctgaaatcatctccgagtccctgttcaacgagatgctgctgcaccgcaacgacgtggcgtgcccggccaccggcttctacacctacgacgcgttcatcgcggccgcgaacgcgttcccgggcttcggcaccacgggcggcgccgacacgcagaagcgcgagctggcggcgttcctggcgcagacgtcgcacgagaccacgggcgggtgggacacggcgcccgacgggccctacacctgggcctactgcttcaaggaggaggtcggcggcgtgtgggggccggactactgccagcccagcccccagtggccgtgcgccgacggccagaagtactacggccgcgggcccatccagctatcctggaactacaactacgggcccgccggggaggccatcggccaggaccttctgggcaacccaggtctggttgccgccgactccactgtctccttcgagacggcgctctggtactggatgacggccgcagccgcccaagccgtcctgccacgacgtcatcacgggccagtgggcgccctcgcccgacgacgtggccgcagggaggctgccggggtatggcgtcctcaccaacatcatcaacggcggcctcgagtgcggccacggcgccgacgctcgtgttgccagccggatcggcttctacaaacgctactgcgacatgtttggtctcagctacggcgacaacttggactgctacgaccagagccccttcggaaacacaatcttaagcaccaccaataataccacctcatatcacgttgacgcctaataagtaacaagagctacctgttactacaactgcaagacacagacatcgtgtagtgcacatgtgcgtcaaatctctaaactttgtacacccagaataaaactctgtaatctgaaactttgcacacccagaataaaagttttcgatttcaaactcc

SEQ ID NO: 15841 - protein, 336 aa, Zea mays subsp. mays
  peptide (1)..(336): Ceres Seq. ID no. 12382153
MAMTRALAMVAMLATAALFFMSARAQQCGMQAGGALCPDCLCCSQWGYCGSTPDYCTGGCQSQCIGSGCGGGGGGTPATPPSGPVSEIISESLFNEMLLHRNDVACPATGFYTYDAFIAAANAFPGFGTTGGADTQKRELAAFLAQTSHETTGGWDTAPDGPYTWAYCFKEEVGGVWGPDYCQPSPQWPCADGQKYYGRGPIQLSWNYNYGPAGEAIGQDLLGNPGLVAADSTVSFETALWYWMTAAAAQAVLPRRHHGPVGALARRRGRREAAGVWRPHQHHQRRPRVRPRRRRSCCQPDRLLQTLLRHVWSQLRRQLGLLRPEPLRKHNLKHHQ

SEQ ID NO: 15842 - protein, 334 aa, Zea mays subsp. mays
  peptide (1)..(334): Ceres Seq. ID no. 12382154
MTRALAMVAMLATAALFFMSARAQQCGMQAGGALCPDCLCCSQWGYCGSTPDYCTGGCQSQCIGSGCGGGGGGTPATPPSGPVSEIISESLFNEMLLHRNDVACPATGFYTYDAFIAAANAFPGFGTTGGADTQKRELAAFLAQTSHETTGGWDTAPDGPYTWAYCFKEEVGGVWGPDYCQPSPQWPCADGQKYYGRGPIQLSWNYNYGPAGEAIGQDLLGNPGLVAADSTVSFETALWYWMTAAAAQAVLPRRHHGPVGALARRRGRREAAGVWRPHQHHQRRPRVRPRRRRSCCQPDRLLQTLLRHVWSQLRRQLGLLRPEPLRKHNLKHHQ

SEQ ID NO: 15843 - protein, 328 aa, Zea mays subsp. mays
  peptide (1)..(328): Ceres Seq. ID no. 12382155
MVAMLATAALFFMSARAQQCGMQAGGALCPDCLCCSQWGYCGSTPDYCTGGCQSQCIGSGCGGGGGGTPATPPSGPVSEIISESLFNEMLLHRNDVACPATGFYTYDAFIAAANAFPGFGTTGGADTQKRELAAFLAQTSHETTGGWDTAPDGPYTWAYCFKEEVGGVWGPDYCQPSPQWPCADGQKYYGRGPIQLSWNYNYGPAGEAIGQDLLGNPGLVAADSTVSFETALWYWMTAAAAQAVLPRRHHGPVGALARRRGRREAAGVWRPHQHHQRRPRVRPRRRRSCCQPDRLLQTLLRHVWSQLRRQLGLLRPEPLRKHNLKHHQ

SEQ ID NO: 15844 - DNA, 1340 bp, Zea mays subsp. mays
  misc_feature (1)..(1340): Ceres Seq. ID no. 12373073
  misc_feature (1)..(1340): Ortholog of  Ceres SEQ ID NO 15178260 as cited in SEQ ID NO 59907
  misc_feature (1)..(1340): Ortholog of  Ceres SEQ ID NO 14313548 as cited in SEQ ID NO 68496
atagatcgatcacacagcctgcaggcacagacaagagttaggctgttctacctgatcatatgaccctccagcaattctctcatccacacacaaactgaagcaagaattattgcttatctatatcctgtctgtcctttcctctatttcccccctcccctttctatttccattgtgcagcttgttattagtagatagcagtggatcgatgtgtgatggaggaaacaagctagctagctagctaccagctgaagcagcagggagaagaaggatagagagagagagagagagaaaacatcttcttcatccatagtctcggcctttcttcaccaggtcgtctgcagatctgtctcctgtgaccttccagaggccaagctaggccaggaaggaaaaatggcgtccccgtcgagcaccagcaacaactcggccttctcccctgtggcggcgtcggccgggacgacgatgcctggtgccggggcgccgtgcgcggcgtgcaagttcctgcggcgcaagtgcctgccggggtgcgtgttcgcgccctacttcccgccggaggagccgcagaagttcgccaacgtgcacaaggtgttcggcgccagcaacgtgaccaagctgctgaacgagctgctgccgcaccagcgggaggacgccgtgagctcgctcgcctacgaggccgaggcgcgcgtcaaggaccccgtctacggctgcgtcggcgccatctccgtgctgcagcgccaggtccaccgcctccagaaggagctggacgccgcgcacgccgagctcctccgctacgcctgcggcgacgtcgccgccggcatccccaccgcgctccccgtcgtcagcgccgcccccaggctctccacggcgccaatgacgacgacgagccccggccagttcgccgccggcatgtacggcagcggcaggaggcttggggtcgtcgacggactagcagcgccaccgctgcctccgtcgggcggcggcggcggctgctacttcatgcggaaccaccacaacaacgtcgtcattagtagctccccaggcgctgacgtggcgcccgtcctgccttacgcttccgtggctaattgggcggtgaatgccatcagcgcgtcgacgaccaccacctccggatcagagagcattgggttggatcacaaggaagagggagacagcagcatgtgaagtgaagggaagcgctgcgctgccgtgaatggtaaggcgctgtttgtttctctctgagtaattttaattctgcacggcggccatgcccatgcatgatgtatagctactgtatgtgctagctagtttgtgtgttttaattatatacatatatagctgttcttatc

SEQ ID NO: 15845 - protein, 261 aa, Zea mays subsp. mays
  peptide (1)..(261): Ceres Seq. ID no. 12373074
MASPSSTSNNSAFSPVAASAGTTMPGAGAPCAACKFLRRKCLPGCVFAPYFPPEEPQKFANVHKVFGASNVTKLLNELLPHQREDAVSSLAYEAEARVKDPVYGCVGAISVLQRQVHRLQKELDAAHAELLRYACGDVAAGIPTALPVVSAAPRLSTAPMTTTSPGQFAAGMYGSGRRLGVVDGLAAPPLPPSGGGGGCYFMRNHHNNVVISSSPGADVAPVLPYASVANWAVNAISASTTTTSGSESIGLDHKEEGDSSM

SEQ ID NO: 15846 - protein, 238 aa, Zea mays subsp. mays
  peptide (1)..(238): Ceres Seq. ID no. 12373075
MPGAGAPCAACKFLRRKCLPGCVFAPYFPPEEPQKFANVHKVFGASNVTKLLNELLPHQREDAVSSLAYEAEARVKDPVYGCVGAISVLQRQVHRLQKELDAAHAELLRYACGDVAAGIPTALPVVSAAPRLSTAPMTTTSPGQFAAGMYGSGRRLGVVDGLAAPPLPPSGGGGGCYFMRNHHNNVVISSSPGADVAPVLPYASVANWAVNAISASTTTTSGSESIGLDHKEEGDSSM

SEQ ID NO: 15847 - DNA, 1870 bp, Zea mays subsp. mays
  misc_feature (1)..(1870): Ceres Seq. ID no. 12406420
  misc_feature (1)..(1870): Ortholog of  Ceres SEQ ID NO 14315279 as cited in SEQ ID NO 52534
  misc_feature (1)..(1870): Ortholog of  Ceres SEQ ID NO 12583190 as cited in SEQ ID NO 56386
acgctctcgcgagtcgcgacgacatcctccgcggagcttgcgcgggtacggcacggagatggccgcggccgggccgacgacgtccccggccacggcgggcgccgtggaggagctcacgcggctgtaccgggagctgccgccgcgcccggccgtggaggaggtggaggcggcggcggcggtgctggcgtcggcggccgcggaggaggaggcgcgcctcgccggagatcgacagggaggaggcgctggcgcgcgggggcgcgccgcccgagctcctcgacgtgctgtgggaggcccggcgcagctccgtgcgcctccgcgcgctgcagcagcgcaaggaggccgcgcacgtcctcgagctcgagaggcggttcaggctcttcgacgacctcatccagcgggcgtcgcgtcttctgtcccccggcggtggtgccggggccaggagcggcacaggtggtgccgcggtggaccacgacgaggtcgtcgaggtcgacgccacccggaacacggagctggacgccgcgccagccgagattggtcgcgggagcaagggcggcttgggactggaacccaagtccgtctcgtcgctgcgtcgtgctgcttcggcaggtactgacacagaaaagctgggccttatccaagtggcaagccttatagagtcatcggcaaagaaggggactacagagctcaatctccggggtaagctggtggaccaagttgaatggctccctgtctcgcttgggaagttacaggatgtgactgagcttgatctatctgagaataggatcatggcactcccatcaacaattggtagccttagatacttgacaaagctcgacctccactcaaaccagctgatcaatctgcctgataccttcggggaactttccagcctgattgatcttgacttgcgtgcaaaccagctaaagtctcttcctacatcatttggaaatctcacgagcctcgccaatcttgacctgagctcgaatctgttgaaggtccttcctgattgtttaggaaagttgaaaaacttgagaaggttaattgctgagacgaatgagcttgaggagctaccctatactattggatcgtgcacctctctcgtggagcttagactggattttaatcagctcaaagccctcccagaagccattgggaagttggaaaacctggaaatcctgacgttacactacaatagaatcaaaggcctgcctacaacaattggccatcttaccaggttgagggagctggatgtcagtttcaacgaagttgagactatacctgagaacatttgctttgcagccagccttgtgaagttgaatgtcagcaggaactttgccgacttaagagccctgccaaaatcaataggggaacttgagatgctagaggagctggacatcagtatcaaccagatacgagtgcttccagactcttttgggcatctctcaaagctacgtgtgtttcatgctgatgaaactccactggaagtaccgcccaaagaagttgtaaagctaggggctcaggagctggttaattatatgaagaatatggttgctgcaagggaagtgagccagaatcaaacagataagaggagcttctggacctggctccgctcactgtttggttgttacaaaaagaatcaaggattgggaccagttccagcctagctgaaccatatcgtccgcatgtattgtcatgaattattcagttttgctccatctctcaagtcagcgacgaaatgaggcatgactactattattatttcaactttatgtttgtgtatacaatggataaatattgtagcgctttcttgtacataagattaggttatgtgtaagttcatctgtacgaaacactatcatgttaatccatg

SEQ ID NO: 15848 - protein, 553 aa, Zea mays subsp. mays
  peptide (1)..(553): Ceres Seq. ID no. 12406421
ALASRDDILRGACAGTARRWPRPGRRRPRPRRAPWRSSRGCTGSCRRARPWRRWRRRRRCWRRRPRRRRRASPEIDREEALARGGAPPELLDVLWEARRSSVRLRALQQRKEAAHVLELERRFRLFDDLIQRASRLLSPGGGAGARSGTGGAAVDHDEVVEVDATRNTELDAAPAEIGRGSKGGLGLEPKSVSSLRRAASAGTDTEKLGLIQVASLIESSAKKGTTELNLRGKLVDQVEWLPVSLGKLQDVTELDLSENRIMALPSTIGSLRYLTKLDLHSNQLINLPDTFGELSSLIDLDLRANQLKSLPTSFGNLTSLANLDLSSNLLKVLPDCLGKLKNLRRLIAETNELEELPYTIGSCTSLVELRLDFNQLKALPEAIGKLENLEILTLHYNRIKGLPTTIGHLTRLRELDVSFNEVETIPENICFAASLVKLNVSRNFADLRALPKSIGELEMLEELDISINQIRVLPDSFGHLSKLRVFHADETPLEVPPKEVVKLGAQELVNYMKNMVAAREVSQNQTDKRSFWTWLRSLFGCYKKNQGLGPVPA

SEQ ID NO: 15849 - protein, 292 aa, Zea mays subsp. mays
  peptide (1)..(292): Ceres Seq. ID no. 12406422
MALPSTIGSLRYLTKLDLHSNQLINLPDTFGELSSLIDLDLRANQLKSLPTSFGNLTSLANLDLSSNLLKVLPDCLGKLKNLRRLIAETNELEELPYTIGSCTSLVELRLDFNQLKALPEAIGKLENLEILTLHYNRIKGLPTTIGHLTRLRELDVSFNEVETIPENICFAASLVKLNVSRNFADLRALPKSIGELEMLEELDISINQIRVLPDSFGHLSKLRVFHADETPLEVPPKEVVKLGAQELVNYMKNMVAAREVSQNQTDKRSFWTWLRSLFGCYKKNQGLGPVPA

SEQ ID NO: 15850 - DNA, 1200 bp, Zea mays subsp. mays
  misc_feature (1)..(1200): Ceres Seq. ID no. 12357037
  misc_feature (1)..(1200): Ortholog of  Ceres SEQ ID NO 12558659 as cited in SEQ ID NO 20727
  misc_feature (1)..(1200): Ortholog of  Ceres SEQ ID NO 12608945 as cited in SEQ ID NO 51209
  misc_feature (1)..(1200): Ortholog of  Ceres SEQ ID NO 14314534 as cited in SEQ ID NO 52434
  misc_feature (1)..(1200): Ortholog of  Ceres SEQ ID NO 14308640 as cited in SEQ ID NO 60489
  misc_feature (1)..(1200): Ortholog of  Ceres SEQ ID NO 15175034 as cited in SEQ ID NO 62432
  misc_feature (1)..(1200): Ortholog of  Ceres SEQ ID NO 12619999 as cited in SEQ ID NO 66123
  misc_feature (1)..(1200): Ortholog of  Ceres SEQ ID NO 13656436 as cited in SEQ ID NO 69154
acgacgaccacatctccccgctgggacctggtgctcggcggcgtgcgccccactacccaaccaactgaaccatgcacaagagcactgcacgacgcccgcacggcaccgaccccgcaccaagccaacggaaaccgagcacccgcacccgcccggggtggaattgggaactgaggaaaaaaaaaacacccacacccacacccgcgtccgcgtgctctctctgccccatccgcgcgcccctcctcctccaccgcccgtcccactcccgccgccgccgccgcccggccgtctgctggcgatggcgtaccgggcggacgacgactacgactacctcttcaaggtggtgctcatcggcgactccggcgtcggcaagtcgaacctgctctcgcgcttcacgcgcaacgagttcagcctcggagtccaagtccaccatcggcgtcgagttcgccacccgcagcatccacgtcgaggacaaggtcgtcaaggcccagatctgggacaccgccggccaggaaagataccgcgctatcacgagcgcgtactaccgcggagcggtaggggcgctggtcgtgtacgacgtcacgcggcacgtcaccttcgagaacgtggagcggtggatgagggagctgagggaccacacggacgccaacatcgtcatgatgctggtagggaacaaggcggacctgcgccacctcagggccgtcccgaccgaggacgccaaggccttcgccgagcgccagaacgccttcttcatggagacgtcggccctggaggcgatgaacgtggaggacgccttcaccgaggtgctcgcgcagatctaccgcgtcgtcagcaagaaggcgctcgacatcggcgacgaccccgccgcgcctcccaggggccataccatcaacgtcggcggcaaggacgacgtgtccgcggtcaagaagtctgcctgctgctcgtcttagcttgggaggacaggatagagcgtgtacttgggtttggttgttgatacttcagcactagagggcacatgacgttattgcagtcatggtcctcgatctgtattcattcgtttccaggtgtctcgttgattttgccatttgatacattgattcattcaggacttgggcctttctggtatagtgtagggacaccttgttccttttatttcttgtacctgcatactgtcgcttctcttatcaaactagctgcattact

SEQ ID NO: 15851 - protein, 329 aa, Zea mays subsp. mays
  peptide (1)..(329): Ceres Seq. ID no. 12357038
RRPHLPAGTWCSAACAPLPNQLNHAQEHCTTPARHRPRTKPTETEHPHPPGVELGTEEKKNTHTHTRVRVLSLPHPRAPPPPPPVPLPPPPPPGRLLAMAYRADDDYDYLFKVVLIGDSGVGKSNLLSRFTRNEFSLGVQVHHRRRVRHPQHPRRGQGRQGPDLGHRRPGKIPRYHERVLPRSGRGAGRVRRHAARHLRERGAVDEGAEGPHGRQHRHDAGREQGGPAPPQGRPDRGRQGLRRAPERLLHGDVGPGGDERGGRLHRGARADLPRRQQEGARHRRRPRRASQGPYHQRRRQGRRVRGQEVCLLLVLAWEDRIERVLGFGC

SEQ ID NO: 15852 - protein, 291 aa, Zea mays subsp. mays
  peptide (1)..(291): Ceres Seq. ID no. 12357039
MHKSTARRPHGTDPAPSQRKPSTRTRPGWNWELRKKKTPTPTPASACSLCPIRAPLLLHRPSHSRRRRRPAVCWRWRTGRTTTTTTSSRWCSSATPASASRTCSRASRATSSASESKSTIGVEFATRSIHVEDKVVKAQIWDTAGQERYRAITSAYYRGAVGALVVYDVTRHVTFENVERWMRELRDHTDANIVMMLVGNKADLRHLRAVPTEDAKAFAERQNAFFMETSALEAMNVEDAFTEVLAQIYRVVSKKALDIGDDPAAPPRGHTINVGGKDDVSAVKKSACCSS

SEQ ID NO: 15853 - protein, 231 aa, Zea mays subsp. mays
  peptide (1)..(231): Ceres Seq. ID no. 12357040
MAYRADDDYDYLFKVVLIGDSGVGKSNLLSRFTRNEFSLGVQVHHRRRVRHPQHPRRGQGRQGPDLGHRRPGKIPRYHERVLPRSGRGAGRVRRHAARHLRERGAVDEGAEGPHGRQHRHDAGREQGGPAPPQGRPDRGRQGLRRAPERLLHGDVGPGGDERGGRLHRGARADLPRRQQEGARHRRRPRRASQGPYHQRRRQGRRVRGQEVCLLLVLAWEDRIERVLGFGC

SEQ ID NO: 15854 - DNA, 1086 bp, Zea mays subsp. mays
  misc_feature (1)..(1086): Ceres Seq. ID no. 12350847
  misc_feature (1)..(1086): Ortholog of  Ceres SEQ ID NO 12593058 as cited in SEQ ID NO 63090
atcacctcagtcctcacactgacatttcactctcggctgctggagtgtcggccgctgccatctgcctgccgctcactcccacgcgccgcaatgtgccactccccactcggcgccgccaccaccaccgcgggggcgctagcgctcctcttcctcctgccgctagcctcggccgccgccgccggcggcggcaccgcggcgaaggcgacgcccaacatcacggcgctcatgtccaagggcgggtgcaaggcgttcgcgtcgctgctggacaagtcccccgacgctctgtcggcgttcgagtcggcggtgagcggcggcgtgacggcgttctgcccgacggacgaggccgtgcgcgggttcatgcccagctaccggaacctgagcgcggacggcaaggcgtcgctgctgctgtttccacgcggtgcccgtgtactacacgctgcggggcctgaaatccagcaacgggcccatgaacacgctggccaccgacggcgccgccagcaactacaacctgacggtgcagaacgcgggcgaccaggtgacgctgcggacgccggcggccgacgcgccggcccgcgtgcgctccaccgtctacgacagggaccccgtcgccatctacgccgtggacgcggtgctggagcccgtggagctgttcgaccccgtggcggacgcgccgacccctgcgcccgcgccggcgccggcgctggcgcctaggtccgccaagcggacgcggcaccagcggcggcgcggagcggacgcgcctggcccggccgccgccgacgcctcgccggccgaccagaggaaggactacaagaagaacgcggcggccccgtgccgcacgcggtggctcgcgaccgccgccgccgctatcgccgtggccgccgccttggctgcttagggcggggtggtttaaagattgctcggccacccagctgttgtctttggatggagacgccatgcctttttggttnttggtcannnncggttgcttattacttcatcgattactgccgttgttagtatgaagtatgaacaaggtcgatatgtgacctggtggtgtacatcaaaactcaaatcttgttgattcgt

SEQ ID NO: 15855 - protein, 236 aa, Zea mays subsp. mays
  peptide (1)..(236): Ceres Seq. ID no. 12350848
ITSVLTLTFHSRLLECRPLPSACRSLPRAAMCHSPLGAATTTAGALALLFLLPLASAAAAGGGTAAKATPNITALMSKGGCKAFASLLDKSPDALSAFESAVSGGVTAFCPTDEAVRGFMPSYRNLSADGKASLLLFPRGARVLHAAGPEIQQRAHEHAGHRRRRQQLQPDGAERGRPGDAADAGGRRAGPRALHRLRQGPRRHLRRGRGAGARGAVRPRGGRADPCARAGAGAGA

SEQ ID NO: 15856 - protein, 206 aa, Zea mays subsp. mays
  peptide (1)..(206): Ceres Seq. ID no. 12350849
MCHSPLGAATTTAGALALLFLLPLASAAAAGGGTAAKATPNITALMSKGGCKAFASLLDKSPDALSAFESAVSGGVTAFCPTDEAVRGFMPSYRNLSADGKASLLLFPRGARVLHAAGPEIQQRAHEHAGHRRRRQQLQPDGAERGRPGDAADAGGRRAGPRALHRLRQGPRRHLRRGRGAGARGAVRPRGGRADPCARAGAGAGA

SEQ ID NO: 15857 - protein, 161 aa, Zea mays subsp. mays
  peptide (1)..(161): Ceres Seq. ID no. 12350850
MSKGGCKAFASLLDKSPDALSAFESAVSGGVTAFCPTDEAVRGFMPSYRNLSADGKASLLLFPRGARVLHAAGPEIQQRAHEHAGHRRRRQQLQPDGAERGRPGDAADAGGRRAGPRALHRLRQGPRRHLRRGRGAGARGAVRPRGGRADPCARAGAGAGA

SEQ ID NO: 15858 - DNA, 1243 bp, Zea mays subsp. mays
  misc_feature (1)..(1243): Ceres Seq. ID no. 13491142
  misc_feature (1)..(1243): Ortholog of  Ceres SEQ ID NO 13594163 as cited in SEQ ID NO 60426
  misc_feature (1)..(1243): Ortholog of  Ceres SEQ ID NO 13596273 as cited in SEQ ID NO 67892
gtccacagcagagtagagtagcacacgcactcgcctcttgtgtctttctttgtgagctgtggtgtggtggtcgagacacacacagcagcagcaacaacaacatacatacatgcacgctagcctcgcctcctacgccgcggcagctatgccggcgctggacctccgccccgagatagcgcacgcgcaccagcccgtcatgtcgccctctcaccacggctgggacggcaatggcgccacagccgtgcccacaccgatgcccaagaggctggacgggaaggtggccattgtgacgggcggcgcgcgcgggatcggcgaggccatcgtgcggctgttcgccaagcacggggcccgggtggtgatcgcggacatcgacgacgccgcgggggaggcgctggcgtcggcgctgggcccgcaggtcagcttcgtgcgctgcgacgtgtccgtggaggacgacgtccggcgcgccgtggactgggcgctgtcgcgccacggcggccgcctcgacgtctactgcaacaacgccggggtgctgggccgccagacgcgcgccgccaggagcatcctgtccttcgacgcggccgagttcgaccgcgtgctccgcgtcaacgcgctgggcgccgcgctcgggatgaagcacgcggcgcgcgccatggcgccgcgccgcgcggggagcatcgtctccgtcgccagcgtcgcggccgtgctgggcggcctcggcccgcacgcctacaccgcctccaagcacgccatcgtcgggctcaccaagaacgccgcctgcgagctgcgcgcgcacggggtccgggtcaactgcgtctcgcccttcggcgtcgccacgcccatgctcatcaacgcctggcgccagggccacgacgacgccaccgccgacgccgaccgagacctcgacctcgacctcgacgtcaccgtgcccagcgaccaggaggtggagaagatggaggaggtggtcaggggcctggccacgctcaagggccccacgctcaggcccagggacatcgccgaggcggtgctcttcctggccagcgacgaggccaggtatatatcgggccacaaccttgtcgtggacggcggcgtcaccacatccaggaacctcatcggcttgtgaatcaatgtcaatccgttccaaatatcccattcccatggctaggctaattagagaaggagagagagaaaactgctattagttgtacttgaagtgatcgattttcatttggttgattgattcatc

SEQ ID NO: 15859 - protein, 336 aa, Zea mays subsp. mays
  peptide (1)..(336): Ceres Seq. ID no. 13491143
MHASLASYAAAAMPALDLRPEIAHAHQPVMSPSHHGWDGNGATAVPTPMPKRLDGKVAIVTGGARGIGEAIVRLFAKHGARVVIADIDDAAGEALASALGPQVSFVRCDVSVEDDVRRAVDWALSRHGGRLDVYCNNAGVLGRQTRAARSILSFDAAEFDRVLRVNALGAALGMKHAARAMAPRRAGSIVSVASVAAVLGGLGPHAYTASKHAIVGLTKNAACELRAHGVRVNCVSPFGVATPMLINAWRQGHDDATADADRDLDLDLDVTVPSDQEVEKMEEVVRGLATLKGPTLRPRDIAEAVLFLASDEARYISGHNLVVDGGVTTSRNLIGL

SEQ ID NO: 15860 - protein, 324 aa, Zea mays subsp. mays
  peptide (1)..(324): Ceres Seq. ID no. 13491144
MPALDLRPEIAHAHQPVMSPSHHGWDGNGATAVPTPMPKRLDGKVAIVTGGARGIGEAIVRLFAKHGARVVIADIDDAAGEALASALGPQVSFVRCDVSVEDDVRRAVDWALSRHGGRLDVYCNNAGVLGRQTRAARSILSFDAAEFDRVLRVNALGAALGMKHAARAMAPRRAGSIVSVASVAAVLGGLGPHAYTASKHAIVGLTKNAACELRAHGVRVNCVSPFGVATPMLINAWRQGHDDATADADRDLDLDLDVTVPSDQEVEKMEEVVRGLATLKGPTLRPRDIAEAVLFLASDEARYISGHNLVVDGGVTTSRNLIGL

SEQ ID NO: 15861 - protein, 307 aa, Zea mays subsp. mays
  peptide (1)..(307): Ceres Seq. ID no. 13491145
MSPSHHGWDGNGATAVPTPMPKRLDGKVAIVTGGARGIGEAIVRLFAKHGARVVIADIDDAAGEALASALGPQVSFVRCDVSVEDDVRRAVDWALSRHGGRLDVYCNNAGVLGRQTRAARSILSFDAAEFDRVLRVNALGAALGMKHAARAMAPRRAGSIVSVASVAAVLGGLGPHAYTASKHAIVGLTKNAACELRAHGVRVNCVSPFGVATPMLINAWRQGHDDATADADRDLDLDLDVTVPSDQEVEKMEEVVRGLATLKGPTLRPRDIAEAVLFLASDEARYISGHNLVVDGGVTTSRNLIGL

SEQ ID NO: 15862 - DNA, 1226 bp, Zea mays subsp. mays
  misc_feature (1)..(1226): Ceres Seq. ID no. 12407532
  misc_feature (1)..(1226): Ortholog of  Ceres SEQ ID NO 15178083 as cited in SEQ ID NO 56185
  misc_feature (1)..(1226): Ortholog of  Ceres SEQ ID NO 15225046 as cited in SEQ ID NO 57061
  misc_feature (1)..(1226): Ortholog of  Ceres SEQ ID NO 15179881 as cited in SEQ ID NO 66861
ctctacccgccgccacattcatcagtagaaaccacctatcctgcctgctctacctacctccgctccccagccatgacggtgctggacgccgagtcgcggttccatgtcctggcggtggacgacagcatcatcgacaggaagctcatcgagatgctgctcaagagctcgtcttaccaagtgaccacggtggagtccgggaacaaggcgctggagctgctggggctgagggacaacggcgcggaggacgcgtcgccgccgtcatcctcctcctcatcttcgtcgtcgtcctcccctgaccatcaggagatcgacgtgagtctcatcatcactgactactgcatgcccggcatgacaggatacgatctgctcaagcgagtgaaggggtcctcatcgctcaaggacattccggtggtgatcatgtcgtctgagaacgtgcctgcccggatcagcaggtgcttgcaggatggcgcggaggagttcttcctgaagcccgtgaagccggccgacatgaagaagctcaagtcacacctgctgaagcggaagcagcccaagcagaagaacaagcctcaggcgcaggcggtggagtctcctgagcagcagctggacccgcatccgcagccggtgcacgagctggagctggaggaagccgcggcagatcgcaacggcgtgaacaagaggaaggcagcggccatggaggaggggctgaccgtggtggtgacggcgccggagagcaccaagccgaggaggctgtctacgagcagcctgactgtggagacctgatcaaccgtggctacggctacgcacattaatctagcagtggatgcaagccccagtcccagcctcgccgccaagaaacacaaagtcgtgcctgctgcttttggttctgggagctaacggagggaagtgacaaacaattaaattatatgtagcggctgctgcttcggcctgcaaattttgttgcgctaacggtcatggacatggacatggacaccatcccttgtgttcgttaatcgttcggaaggggaaaagaagaagaagctgtagatataaaaaaaaggacaggcggctaattgttaatttccgcatggcttaattctggcaacgacatgctggctcaatcaaaaacctgtgacggacagacggatggatcaactgatgatgatgttgttttggctcggttcttcttccttgtacactgagtattcagatgaacatgttgtaatctg

SEQ ID NO: 15863 - protein, 259 aa, Zea mays subsp. mays
  peptide (1)..(259): Ceres Seq. ID no. 12407533
LYPPPHSSVETTYPACSTYLRSPAMTVLDAESRFHVLAVDDSIIDRKLIEMLLKSSSYQVTTVESGNKALELLGLRDNGAEDASPPSSSSSSSSSSSPDHQEIDVSLIITDYCMPGMTGYDLLKRVKGSSSLKDIPVVIMSSENVPARISRCLQDGAEEFFLKPVKPADMKKLKSHLLKRKQPKQKNKPQAQAVESPEQQLDPHPQPVHELELEEAAADRNGVNKRKAAAMEEGLTVVVTAPESTKPRRLSTSSLTVET

SEQ ID NO: 15864 - protein, 235 aa, Zea mays subsp. mays
  peptide (1)..(235): Ceres Seq. ID no. 12407534
MTVLDAESRFHVLAVDDSIIDRKLIEMLLKSSSYQVTTVESGNKALELLGLRDNGAEDASPPSSSSSSSSSSSPDHQEIDVSLIITDYCMPGMTGYDLLKRVKGSSSLKDIPVVIMSSENVPARISRCLQDGAEEFFLKPVKPADMKKLKSHLLKRKQPKQKNKPQAQAVESPEQQLDPHPQPVHELELEEAAADRNGVNKRKAAAMEEGLTVVVTAPESTKPRRLSTSSLTVET

SEQ ID NO: 15865 - protein, 209 aa, Zea mays subsp. mays
  peptide (1)..(209): Ceres Seq. ID no. 12407535
MLLKSSSYQVTTVESGNKALELLGLRDNGAEDASPPSSSSSSSSSSSPDHQEIDVSLIITDYCMPGMTGYDLLKRVKGSSSLKDIPVVIMSSENVPARISRCLQDGAEEFFLKPVKPADMKKLKSHLLKRKQPKQKNKPQAQAVESPEQQLDPHPQPVHELELEEAAADRNGVNKRKAAAMEEGLTVVVTAPESTKPRRLSTSSLTVET

SEQ ID NO: 15866 - DNA, 1178 bp, Zea mays subsp. mays
  misc_feature (1)..(1178): Ceres Seq. ID no. 12391353
  misc_feature (1)..(1178): Ortholog of  Ceres SEQ ID NO 12616162 as cited in SEQ ID NO 63260
aacctggttcaaacacctcgcttcactagaggaataatctagcagcttctgttgcctccaaattgtccggagaaaggagttgaagcagtgtgagagggccctgagacgatggcgaacctgttcctcaagcaggcaaagcagtacgtggcgacgcggccggtctacccgccggagctcttcgacttcatcgcctccaagacccctcgccgcgacatggcctgggatgtcggcaccggcaacggccaggccgcagcgtcgctggcgaagctgtacaagcacgtggtgggcacggacacgagcgcgcagcagctcgcctacgcgacgcgcctcagcaacacccgctacgtgcacaccccagcggacctgcccctggaggggatccacgccaccgtggccccgccggcctccgtcgacctcgtcaccgtcgcgcaggccttccactggctcgacctcccgcgcttctacgcgcaggcccgctccgtgctgcgccccggccacggcgtgctcgccgccctggtgctacaccgagccacgcgtcgacgccgccgtcgacgccgtgttctggcgcctgtaccacgggtcccagggatactgggcgcccaaccgccggatggtcgacgacgagtaccggagcgccgacttcccgttcgacccggtcgaaggggagaaccacacgggcccgttccagttctccacgcaccgccggatggacctcgatgactacctcatgtatatcacgtcctggtccgcctaccagactgcccaggataacggcgtcgagctgctcgatgcgcccaccgtccaggagttcgcggcggcgtggggcggcgatgccaaggaggtgaagaccgtcacgtaccccatcttcctcaggattggcaaggtcaggtcggagtgagctgcacggaaaaatgaaacttgacaaactatggatacactacggacgcgccgacgattgatgatcgatcatctaggaatcgatgcttataacctttttgaataatgttttattcgattgcagatgtttgttcttcacaattgtatttcaaattctaatgcatgcactattctgttcgactttttttttctctgtgtcttcctgatagtgtaaatttcaatatctatactgtgatgacaaaatatccacaataacccatgtgactgaaatctttggtttt

SEQ ID NO: 15867 - protein, 224 aa, Zea mays subsp. mays
  peptide (1)..(224): Ceres Seq. ID no. 12391354
MSAPATARPQRRWRSCTSTWWARTRARSSSPTRRASATPATCTPQRTCPWRGSTPPWPRRPPSTSSPSRRPSTGSTSRASTRRPAPCCAPATACSPPWCYTEPRVDAAVDAVFWRLYHGSQGYWAPNRRMVDDEYRSADFPFDPVEGENHTGPFQFSTHRRMDLDDYLMYITSWSAYQTAQDNGVELLDAPTVQEFAAAWGGDAKEVKTVTYPIFLRIGKVRSE

SEQ ID NO: 15868 - protein, 203 aa, Zea mays subsp. mays
  peptide (1)..(203): Ceres Seq. ID no. 12391355
MANLFLKQAKQYVATRPVYPPELFDFIASKTPRRDMAWDVGTGNGQAAASLAKLYKHVVGTDTSAQQLAYATRLSNTRYVHTPADLPLEGIHATVAPPASVDLVTVAQAFHWLDLPRFYAQARSVLRPGHGVLAALVLHRATRRRRRRRRVLAPVPRVPGILGAQPPDGRRRVPERRLPVRPGRRGEPHGPVPVLHAPPDGPR

SEQ ID NO: 15869 - protein, 168 aa, Zea mays subsp. mays
  peptide (1)..(168): Ceres Seq. ID no. 12391356
MAWDVGTGNGQAAASLAKLYKHVVGTDTSAQQLAYATRLSNTRYVHTPADLPLEGIHATVAPPASVDLVTVAQAFHWLDLPRFYAQARSVLRPGHGVLAALVLHRATRRRRRRRRVLAPVPRVPGILGAQPPDGRRRVPERRLPVRPGRRGEPHGPVPVLHAPPDGPR

SEQ ID NO: 15870 - DNA, 1648 bp, Zea mays subsp. mays
  misc_feature (1)..(1648): Ceres Seq. ID no. 12360034
  misc_feature (1)..(1648): Ortholog of  Ceres SEQ ID NO 13598326 as cited in SEQ ID NO 68812
aagactgcagcaggagcggagcgggcggagaggttccgggttttcggggtggggtttgggagatgcctcccgtgaagaagtccaagaaggggaagcgaaatccaaggatggcaagctcaagattgtcagggcgcggggcgcgccgccggcgctgccgccggagctccgcgccctcgacaccgagtggtggtacgctttcctgaacaagcaagtcgagctagagcatgctgtgcctccagatgagggggaagcattcaggcacttcttcaggacttcaaggaagacttttgactacatctgctccattgttagggaagatctgatctcaaggccaccgtctggactgatcaacattgaggggaggctgctcagtgtggagaagcaagtggcaattgccatgaggaggcttgcgtccggtgattcccaggtgtcagtagggactgcttttggtgtgggccagtctactgtttcacaagtgacatggagatttatcgagtcgatggaagatagggctaggtatcatctggcatggccaagtcaagagagacttgagcagatcaaagctgtgctggaggatgcttatggcctgccgaattgttgtggtggtgttgatgccacccacgtaatcatgacacttcctgctgttgagtcatctgcagattggtgtgatcatgcaaagaactacagtatgttcctgcaagggattgttgatgatcagatgaggtttattgatattgttactggttggcctggcagcatgacattctcacgcctgatgaaatgctctgggtttttcaagctctgtgaagctggggaacgtttgaatggctctgtcaaagtttcagcagagggtgcagagatcagggaatacattgctggtgactcatgttatcctctactcccatggcttatgactccattcgaaggaaaacatctgcctgccccattgcaaaactttaatgcccgccaaaaagctgcaaggctgcttggaacaaatgcgttggcgcggctgaagggatcctggaggatcttacacaaagtcatgtggaggcctgacaagaacaagctgccaagtataattcttgtttgctgtctgcttcacaatatactcatagactgccatgatgaattgcttccaagtgttcaacttcccgaacatcatgatactggctataatcgagaaaactgcgagcaggtggatcctaatggcaaagtgatgagagaaaacattacagcacatctccaacactgtgaagcttccaagtttctctgcaactgagctaagttagcttgttgttttgctgggattttgatgatgcatcattattccttttaccttatgcaatttcccttagtttctgttattgtagtgagactttctgattgcaattcagtaaagattctctagaaatggcatggttcagtactatagaaaatagctagttggaaaattacaaggactagccctcatgcttgggtttatgttcttcaggataatgccagtcctcatcatgctgagtgccatgaagttgcataatgtaacaaaattcatgaatgatctggtatcttatttttttgaattatttgatatcttaagttaggttggtttataaggtcccagtttatatgatgtgacctttattgttgg

SEQ ID NO: 15871 - protein, 425 aa, Zea mays subsp. mays
  peptide (1)..(425): Ceres Seq. ID no. 12360035
RLQQERSGRRGSGFSGWGLGDASREEVQEGEAKSKDGKLKIVRARGAPPALPPELRALDTEWWYAFLNKQVELEHAVPPDEGEAFRHFFRTSRKTFDYICSIVREDLISRPPSGLINIEGRLLSVEKQVAIAMRRLASGDSQVSVGTAFGVGQSTVSQVTWRFIESMEDRARYHLAWPSQERLEQIKAVLEDAYGLPNCCGGVDATHVIMTLPAVESSADWCDHAKNYSMFLQGIVDDQMRFIDIVTGWPGSMTFSRLMKCSGFFKLCEAGERLNGSVKVSAEGAEIREYIAGDSCYPLLPWLMTPFEGKHLPAPLQNFNARQKAARLLGTNALARLKGSWRILHKVMWRPDKNKLPSIILVCCLLHNILIDCHDELLPSVQLPEHHDTGYNRENCEQVDPNGKVMRENITAHLQHCEASKFLCN

SEQ ID NO: 15872 - protein, 293 aa, Zea mays subsp. mays
  peptide (1)..(293): Ceres Seq. ID no. 12360036
MRRLASGDSQVSVGTAFGVGQSTVSQVTWRFIESMEDRARYHLAWPSQERLEQIKAVLEDAYGLPNCCGGVDATHVIMTLPAVESSADWCDHAKNYSMFLQGIVDDQMRFIDIVTGWPGSMTFSRLMKCSGFFKLCEAGERLNGSVKVSAEGAEIREYIAGDSCYPLLPWLMTPFEGKHLPAPLQNFNARQKAARLLGTNALARLKGSWRILHKVMWRPDKNKLPSIILVCCLLHNILIDCHDELLPSVQLPEHHDTGYNRENCEQVDPNGKVMRENITAHLQHCEASKFLCN

SEQ ID NO: 15873 - protein, 259 aa, Zea mays subsp. mays
  peptide (1)..(259): Ceres Seq. ID no. 12360037
MEDRARYHLAWPSQERLEQIKAVLEDAYGLPNCCGGVDATHVIMTLPAVESSADWCDHAKNYSMFLQGIVDDQMRFIDIVTGWPGSMTFSRLMKCSGFFKLCEAGERLNGSVKVSAEGAEIREYIAGDSCYPLLPWLMTPFEGKHLPAPLQNFNARQKAARLLGTNALARLKGSWRILHKVMWRPDKNKLPSIILVCCLLHNILIDCHDELLPSVQLPEHHDTGYNRENCEQVDPNGKVMRENITAHLQHCEASKFLCN

SEQ ID NO: 15874 - DNA, 1423 bp, Zea mays subsp. mays; identical to SEQ ID NO: 9654
  misc_feature (1)..(1423): Ceres Seq. ID no. 13570861
  misc_feature (1)..(1423): Ortholog of  Ceres SEQ ID NO 15177854 as cited in SEQ ID NO 51851
  misc_feature (1)..(1423): Ortholog of  Ceres SEQ ID NO 15177087 as cited in SEQ ID NO 51932
  misc_feature (1)..(1423): Ortholog of  Ceres SEQ ID NO 13662937 as cited in SEQ ID NO 64415
  misc_feature (1)..(1423): Ortholog of  Ceres SEQ ID NO 13595984 as cited in SEQ ID NO 68340
  misc_feature (1)..(1423): Ortholog of  Ceres SEQ ID NO 12635014 as cited in SEQ ID NO 0

SEQ ID NO: 15875 - protein, 371 aa, Zea mays subsp. mays; identical to SEQ ID NO: 9655
  peptide (1)..(371): Ceres Seq. ID no. 13570862

SEQ ID NO: 15876 - protein, 355 aa, Zea mays subsp. mays; identical to SEQ ID NO: 9656
  peptide (1)..(355): Ceres Seq. ID no. 13570863

SEQ ID NO: 15877 - DNA, 1444 bp, Zea mays subsp. mays
  misc_feature (1)..(1444): Ceres Seq. ID no. 12390163
  misc_feature (1)..(1444): Ortholog of  Ceres SEQ ID NO 14306793 as cited in SEQ ID NO 53342
gcaattaaccctcactaaagggaacaaaagctggagctccaccgcggtggcggccgctctagaactagtggatcccccgggctgcaggaattcgcacgagaccattacctagaacatcctaatcgaaaacatatgaatagaaaagaacccctttgcgcaaggcaaacccccacccagctcacctcggcgatggcatcggcggcggccgtggagtgggaggcggcggcgcggaaggtgctggtggcgcgcaagccctggcttcgggctacctacggcctgcccaacctgcctccccgtgctcctctacctccgcatggcgcaggttcccttcgacatccacgtcgacacctccttccccgatgccgatcacataccatatgttgaatttggggattgcgtggctttcaacaacgagaaaggaggcgtaattgagtatctcaaggatgagaaaattgttgacttgaactcaaatcacccaaatatttcatccaccactgtgctagacacgaaggccatggtttcgtcctggcttgctaatgctttgctgtatgaactctgggtggttagtgatggaagcattgcaaatgatatctacttctctgatctcccttggcccattggaaagatactccattggaataaaactagacatgtgaagcagctacttggtataacaaagctcaatgctgcagaaaaagaagaggagatataccagaaggcaagtgctgcatatgagtcattgtctttcagattaggggatcaagtctttctatttgataatagccctacagatgttgatgctcttttccttggacatgttctttttgttctcagtgcgttgcctgatacatctgtgctgaggggcactttgcagaagcatgacaacttggtgagctttgctgagcatcacaaggtccagttgctggaagcctcatcatcatcatcatcagggttaggatcatcacctagcccatcatcatccacccccaggagaagaccatctgctgaccacagttataagccaaaacccagagccaagaaggaaacggacggaggaggaaaagaaattcaggcgaagagcaaagtatttcctggccacacaactcgttgcagttcttgtgttcctttcgctgatgggtggggttgatagttccgagctagacgacgaagatggcttggattatgatgattagatcctccctgtgctgttacacttgattagttccaaggacaaactgcctggttggttcggggtgctgtgagaatttgttccaacactggaaaatgtgttacgcttgattttagctaggaattcactgagttggtcacccatcggcagtttcataagctacttcggctgtaaacatacttgtctctgaaggttttttttttttgggcttcagtgaaccaaacttgtaagcaaattcgaattttggagttttgg

SEQ ID NO: 15878 - protein, 277 aa, Zea mays subsp. mays
  peptide (1)..(277): Ceres Seq. ID no. 12390164
MAQVPFDIHVDTSFPDADHIPYVEFGDCVAFNNEKGGVIEYLKDEKIVDLNSNHPNISSTTVLDTKAMVSSWLANALLYELWVVSDGSIANDIYFSDLPWPIGKILHWNKTRHVKQLLGITKLNAAEKEEEIYQKASAAYESLSFRLGDQVFLFDNSPTDVDALFLGHVLFVLSALPDTSVLRGTLQKHDNLVSFAEHHKVQLLEASSSSSSGLGSSPSPSSSTPRRRPSADHSYKPKPRAKKETDGGGKEIQAKSKVFPGHTTRCSSCVPFADGWG

SEQ ID NO: 15879 - protein, 210 aa, Zea mays subsp. mays
  peptide (1)..(210): Ceres Seq. ID no. 12390165
MVSSWLANALLYELWVVSDGSIANDIYFSDLPWPIGKILHWNKTRHVKQLLGITKLNAAEKEEEIYQKASAAYESLSFRLGDQVFLFDNSPTDVDALFLGHVLFVLSALPDTSVLRGTLQKHDNLVSFAEHHKVQLLEASSSSSSGLGSSPSPSSSTPRRRPSADHSYKPKPRAKKETDGGGKEIQAKSKVFPGHTTRCSSCVPFADGWG

SEQ ID NO: 15880 - DNA, 1721 bp, Zea mays subsp. mays; identical to SEQ ID NO: 9031
  misc_feature (1)..(1721): Ceres Seq. ID no. 12362091
  misc_feature (1)..(1721): Ortholog of  Ceres SEQ ID NO 14301916 as cited in SEQ ID NO 69281

SEQ ID NO: 15881 - protein, 206 aa, Zea mays subsp. mays; identical to SEQ ID NO: 9032
  peptide (1)..(206): Ceres Seq. ID no. 12362092

SEQ ID NO: 15882 - protein, 197 aa, Zea mays subsp. mays; identical to SEQ ID NO: 9033
  peptide (1)..(197): Ceres Seq. ID no. 12362093

SEQ ID NO: 15883 - protein, 142 aa, Zea mays subsp. mays; identical to SEQ ID NO: 9034
  peptide (1)..(142): Ceres Seq. ID no. 12362094

SEQ ID NO: 15884 - DNA, 856 bp, Zea mays subsp. mays
  misc_feature (1)..(856): Ceres Seq. ID no. 12355354
  misc_feature (1)..(856): Ortholog of  Ceres SEQ ID NO 14316320 as cited in SEQ ID NO 60027
aatggttccatttcttatgtcacgtccaaattggaaattccatcacgcctcgccctcgccctcgccctcgccgtccccgaccagaatcgtcacttcgtccggctccggcgatctcctccaccgccgttgtcagcggtccggccgagatggggagcacttcctctatgctcatccaatacgatatcgaggaggtccaggaccattgtaaccacgcattctcgcagcaggagatcgtgtcgctgtaccaccgcttctgtcagctcgaccgcaacggaggtggcttcgtctccgctgacgagttcatgtcggtacctgagttcgccgtaaatcccctctcccagaggctcctgaggatgctggatggtctcaacttcaaggagtttgtagcatttttgtcggcttttagcccccgcacaagcctacaggaaaagattgaatttattttcagggtttatgatactgactgcaacgggaaggttgcttttgatgacatcttaagcatcttgcgagatctgacaggttcatttatgacagagcaacagagacagaaagtcttgactcatgtgttagaagaagctgggtacacaaaaaattcacatttcacactcccagactttatgaagattattggcaattctgagctcaagatggaggttgaagttcctattgactaaaaaccaaataagtatcatctagttgtatcgtgatgtgttgccgagagccccagacctgtatgttcatttgtgttgaattaagtctatggtgtatttatatccttgtaaatcaaatcatgatcatagatgtaattaaggaaacaaatgtacctgttatttggaggattagttgacttgcgctg

SEQ ID NO: 15885 - protein, 223 aa, Zea mays subsp. mays
  peptide (1)..(223): Ceres Seq. ID no. 12355355
WFHFLCHVQIGNSITPRPRPRPRRPRPESSLRPAPAISSTAVVSGPAEMGSTSSMLIQYDIEEVQDHCNHAFSQQEIVSLYHRFCQLDRNGGGFVSADEFMSVPEFAVNPLSQRLLRMLDGLNFKEFVAFLSAFSPRTSLQEKIEFIFRVYDTDCNGKVAFDDILSILRDLTGSFMTEQQRQKVLTHVLEEAGYTKNSHFTLPDFMKIIGNSELKMEVEVPID

SEQ ID NO: 15886 - protein, 175 aa, Zea mays subsp. mays
  peptide (1)..(175): Ceres Seq. ID no. 12355356
MGSTSSMLIQYDIEEVQDHCNHAFSQQEIVSLYHRFCQLDRNGGGFVSADEFMSVPEFAVNPLSQRLLRMLDGLNFKEFVAFLSAFSPRTSLQEKIEFIFRVYDTDCNGKVAFDDILSILRDLTGSFMTEQQRQKVLTHVLEEAGYTKNSHFTLPDFMKIIGNSELKMEVEVPID

SEQ ID NO: 15887 - protein, 169 aa, Zea mays subsp. mays
  peptide (1)..(169): Ceres Seq. ID no. 12355357
MLIQYDIEEVQDHCNHAFSQQEIVSLYHRFCQLDRNGGGFVSADEFMSVPEFAVNPLSQRLLRMLDGLNFKEFVAFLSAFSPRTSLQEKIEFIFRVYDTDCNGKVAFDDILSILRDLTGSFMTEQQRQKVLTHVLEEAGYTKNSHFTLPDFMKIIGNSELKMEVEVPID

SEQ ID NO: 15888 - DNA, 777 bp, Zea mays subsp. mays
  misc_feature (1)..(777): Ceres Seq. ID no. 12360038
  misc_feature (1)..(777): Ortholog of  Ceres SEQ ID NO 13655108 as cited in SEQ ID NO 62996
aaaacgcaaccgcagccgcagccacagcacagcacaacacgtcggcatgtatccgcccaaggccagcgatccggccgccggggcggcgccggtgactggcttccccgtcggcgggcctgccgcctcctcccagtggtcatccggcctgttggactgcttcgacgactgcggcctctgctgcctgacgtgctggtgcccgtgcatcacgttcgggcgcgtggcggagatcgtggaccgcggcgcgacgtcgtgcggcacggcgggggcgctgtacgcggtgctggcctacttcacgggctgccagtggatctactcgtgcacgtaccgcgccaagatgcgcgcccagctcggcctccccgagaccccctgctgcgactgcctcgtccacttctgctgcgagccgtgcgcgctctgccagcagtacaaggagctcaaggcccgcggcttcgaccccgacctcggctgggaacgcaacgccactatcactatgctgcctccgtccgcacaggggatggggcgctgaccgctgaccggccggccagcctctgcgtaaataaataattaatgcttatatatgtatgtacgtgtttctttcagccggaacaaaatctctatatatatgtcgtgtcaagatcagcatcgggccgtacgttcgtttttgtactgtgttccttgtgtcctccgttccgaataaacaataatatatatatatatatatatatatatatatgacatgtaatatttatatattgcttgcattggtggtgcaccaccttt

SEQ ID NO: 15889 - protein, 186 aa, Zea mays subsp. mays
  peptide (1)..(186): Ceres Seq. ID no. 12360039
KTQPQPQPQHSTTRRHVSAQGQRSGRRGGAGDWLPRRRACRLLPVVIRPVGLLRRLRPLLPDVLVPVHHVRARGGDRGPRRDVVRHGGGAVRGAGLLHGLPVDLLVHVPRQDARPARPPRDPLLRLPRPLLLRAVRALPAVQGAQGPRLRPRPRLGTQRHYHYAASVRTGDGALTADRPASLCVNK

SEQ ID NO: 15890 - protein, 173 aa, Zea mays subsp. mays
  peptide (1)..(173): Ceres Seq. ID no. 12360040
KRNRSRSHSTAQHVGMYPPKASDPAAGAAPVTGFPVGGPAASSQWSSGLLDCFDDCGLCCLTCWCPCITFGRVAEIVDRGATSCGTAGALYAVLAYFTGCQWIYSCTYRAKMRAQLGLPETPCCDCLVHFCCEPCALCQQYKELKARGFDPDLGWERNATITMLPPSAQGMGR

SEQ ID NO: 15891 - protein, 158 aa, Zea mays subsp. mays
  peptide (1)..(158): Ceres Seq. ID no. 12360041
MYPPKASDPAAGAAPVTGFPVGGPAASSQWSSGLLDCFDDCGLCCLTCWCPCITFGRVAEIVDRGATSCGTAGALYAVLAYFTGCQWIYSCTYRAKMRAQLGLPETPCCDCLVHFCCEPCALCQQYKELKARGFDPDLGWERNATITMLPPSAQGMGR

SEQ ID NO: 15892 - DNA, 936 bp, Zea mays subsp. mays
  misc_feature (1)..(936): Ceres Seq. ID no. 12408110
  misc_feature (1)..(936): Ortholog of  Ceres SEQ ID NO 13661994 as cited in SEQ ID NO 60568
  misc_feature (1)..(936): Ortholog of  Ceres SEQ ID NO 12584790 as cited in SEQ ID NO 62648
atctaaaaaacacctagcggaaaaagaaaaggaaaaaagtcgcccctccgttgggacctaattcacgcgtttcagggctcctcccatttcgtcggcttcgtttgtcgtcgtcgtaagctgcagctagtgtggactggagatccaccactccaccagtccggtccatctgctggacctcgattggtttcttcttacctaggaacatccggggatgtcgactcctgcgaggaagaggctgatgagggatttcaagcggttgatgcaggaccctccggccggcataagtggcgccccgcaggataacaacataatgctgtggaatgctgtcatatttggacctgatgataccccgtgggatggaggtacgtttaagctgactctccagtttaatgaagaatatccaaacaaaccaccaactgtgcgatttgtttctaggatgttccatcctaacatttatgctgatggaagcatatgcttagatatcctgcagaatcagtggagtccgatatatgatgtagctgcgatactcacgtcaatccagtcattgttgtgcgatccaaacccgaattcgcccgctaactctgaagccgcccgcatgttcagcgagaacaagcgagagtacaaccgcaaagttcgggaggtcgtggagcagagctggacggcggactgatgatgccctgtgttgcgtcgcgctgtgctgcgcagctgctcactgcgccccgcgtccgtccattccataccaaaaaaagaaaatggcaaagccgaactcagctgttgctgctttcgttgccctgtgtcaagacgactgcttctctatgaacattttaccttcctgtgctgtatctggaatacaaacttaattatctctagcactgtggcaacatcttatcttatatgaaatttcctccgggaaaacgagaatgatttgcttgggtg

SEQ ID NO: 15893 - protein, 152 aa, Zea mays subsp. mays
  peptide (1)..(152): Ceres Seq. ID no. 12408111
MSTPARKRLMRDFKRLMQDPPAGISGAPQDNNIMLWNAVIFGPDDTPWDGGTFKLTLQFNEEYPNKPPTVRFVSRMFHPNIYADGSICLDILQNQWSPIYDVAAILTSIQSLLCDPNPNSPANSEAARMFSENKREYNRKVREVVEQSWTAD

SEQ ID NO: 15894 - protein, 143 aa, Zea mays subsp. mays
  peptide (1)..(143): Ceres Seq. ID no. 12408112
MRDFKRLMQDPPAGISGAPQDNNIMLWNAVIFGPDDTPWDGGTFKLTLQFNEEYPNKPPTVRFVSRMFHPNIYADGSICLDILQNQWSPIYDVAAILTSIQSLLCDPNPNSPANSEAARMFSENKREYNRKVREVVEQSWTAD

SEQ ID NO: 15895 - protein, 136 aa, Zea mays subsp. mays
  peptide (1)..(136): Ceres Seq. ID no. 12408113
MQDPPAGISGAPQDNNIMLWNAVIFGPDDTPWDGGTFKLTLQFNEEYPNKPPTVRFVSRMFHPNIYADGSICLDILQNQWSPIYDVAAILTSIQSLLCDPNPNSPANSEAARMFSENKREYNRKVREVVEQSWTAD

SEQ ID NO: 15896 - DNA, 1129 bp, Zea mays subsp. mays
  misc_feature (1)..(1129): Ceres Seq. ID no. 12366033
  misc_feature (1)..(1129): Ortholog of  Ceres SEQ ID NO 15173410 as cited in SEQ ID NO 61812
  misc_feature (1)..(1129): Ortholog of  Ceres SEQ ID NO 13596922 as cited in SEQ ID NO 62353
gcacgagaccattacctagaacatcctaatcgaaaaacaccgatcctcccagctgcatctgcattgcattgcatgcacaggtcgcgcccaccatcagtagcggtcgccgccatgcagagactcgtgcgcgtcctcgtggtgctgggcgtggccgccgcggcgtcggcgcaaggcccgacggcggcgccaacgacgcccacgcccacgccggcaacccccgcggcgcccgcgcccacgacggcgtccagcaacatcacgggcgtgctggccaaggccgggcagttcaacaccttcatccggctgctcaagtccacgggcgtggcgtcgcagatcgacaaccaggtcgccaacggcgggaacggggtcacggtgttcgcgcccacggacaacgcgttccagtcgctgccctcgggcacgctcaactcgctgtcggaccaggacaagaacgcgctggtgcagtaccacgtggtgtccgccgccatccccatgtcgcagttcgacaccgtcagcaacccgctccgcacgcaggccggcagcgcctcgccgggggagttcccactcaacgtcacctcctccgagggccagcaggtcaacgtcaccacgggcgtcgtcaccgccaccgtcgacaactccctctactcgggcgacagcctcgtcgtctaccaggtcaacaaggtgctgctccccatgaagctcttcggcgccgcggatgcgcccgcgcccgcgccgctcgcgccggccaagaagaagggcaagacgccggcggccgtcgctcgactcgcccgacgcggcggaggcgtccccggacgccacgaccacgtcgctcgcgcccgcgaggctgacggcggggtggcctcgccacggctcttgcgctcgccgtcgtgtggtgggggctgtagtcacggcgaggagtgtctcgtgaggtctctccggtggccgtgacatctatacattttttttttcgttcgcgggtcttgtttgtcttttcgtttttactttattgcccatttttggatgaattgttcttccctgtcattcaaattgctaggagtatgtcatgtcatgtaacgtccttgtcccatttttatgtaattttaactaaataaatatgagttgtgtatatttcagt

SEQ ID NO: 15897 - protein, 313 aa, Zea mays subsp. mays
  peptide (1)..(313): Ceres Seq. ID no. 12366034
ARDHYLEHPNRKTPILPAASALHCMHRSRPPSVAVAAMQRLVRVLVVLGVAAAASAQGPTAAPTTPTPTPATPAAPAPTTASSNITGVLAKAGQFNTFIRLLKSTGVASQIDNQVANGGNGVTVFAPTDNAFQSLPSGTLNSLSDQDKNALVQYHVVSAAIPMSQFDTVSNPLRTQAGSASPGEFPLNVTSSEGQQVNVTTGVVTATVDNSLYSGDSLVVYQVNKVLLPMKLFGAADAPAPAPLAPAKKKGKTPAAVARLARRGGGVPGRHDHVARAREADGGVASPRLLRSPSCGGGCSHGEECLVRSLRWP

SEQ ID NO: 15898 - protein, 289 aa, Zea mays subsp. mays
  peptide (1)..(289): Ceres Seq. ID no. 12366035
MHRSRPPSVAVAAMQRLVRVLVVLGVAAAASAQGPTAAPTTPTPTPATPAAPAPTTASSNITGVLAKAGQFNTFIRLLKSTGVASQIDNQVANGGNGVTVFAPTDNAFQSLPSGTLNSLSDQDKNALVQYHVVSAAIPMSQFDTVSNPLRTQAGSASPGEFPLNVTSSEGQQVNVTTGVVTATVDNSLYSGDSLVVYQVNKVLLPMKLFGAADAPAPAPLAPAKKKGKTPAAVARLARRGGGVPGRHDHVARAREADGGVASPRLLRSPSCGGGCSHGEECLVRSLRWP

SEQ ID NO: 15899 - protein, 276 aa, Zea mays subsp. mays
  peptide (1)..(276): Ceres Seq. ID no. 12366036
MQRLVRVLVVLGVAAAASAQGPTAAPTTPTPTPATPAAPAPTTASSNITGVLAKAGQFNTFIRLLKSTGVASQIDNQVANGGNGVTVFAPTDNAFQSLPSGTLNSLSDQDKNALVQYHVVSAAIPMSQFDTVSNPLRTQAGSASPGEFPLNVTSSEGQQVNVTTGVVTATVDNSLYSGDSLVVYQVNKVLLPMKLFGAADAPAPAPLAPAKKKGKTPAAVARLARRGGGVPGRHDHVARAREADGGVASPRLLRSPSCGGGCSHGEECLVRSLRWP

SEQ ID NO: 15900 - DNA, 1452 bp, Zea mays subsp. mays
  misc_feature (1)..(1452): Ceres Seq. ID no. 12406744
  misc_feature (1)..(1452): Ortholog of  Ceres SEQ ID NO 13638402 as cited in SEQ ID NO 60300
  misc_feature (1)..(1452): Ortholog of  Ceres SEQ ID NO 12618349 as cited in SEQ ID NO 64838
  misc_feature (1)..(1452): Ortholog of  Ceres SEQ ID NO 15176161 as cited in SEQ ID NO 0
tccccgcgcgcccgcgcgcgagctcgttcgtgcgcggccgccggcgttggcgacgacgaccgaggagccatggcggccaagggcggcgccacgccgtcccccggcggcacggggcccgcggcggggaacggccgcctcttcacggtggggctagtcacggcctggtactcctccaacatcggcgtgctcctgctcaacaagtacctcctcagcaactacggcttcaagtaccccatcttcctcaccatgtgccacatgtccgcctgcgccctgctctcctacgccgccatcgcctggctgcgcgtcgtgcccatgcagctcgtgcgctcccgcgtccagctcgccaagatcgccgcgctcagcctcgtcttctgcggctccgtcgtctccgggaacgtctcgctgcgctacctccccgtgtccttcaaccaggccgtcggcgccaccacgcccttctttaccgccgtcttcgcgtacatcatgaccgtcaagcgcgagtcgtggatcacctacctcaccctcgtgcccgtcgttactggagtcatcatcgccagcggcggcgagcctagctttcatctgtttggattcatcatgtgcataggagcaactgcagcaagggcgttgaagacagtactgcaaggaattcttctgtcttctgatggggagaagcttaattctatgaatctgttattgtacatggctccaattgctgttattttcttgcttcctgcaactatctttatggaggataatgttgttggcatcacaattcagcttgcaaagaaggatttcacgattgtttggttgctactgttcaattcttgcttgtcatattttgtcaatttgaccaatttcttggtgaccaaacatactagcgcactgactctacaggttctcggaaatgcaaagggtgccgtggcagtcgtcatctcaatcatgatattcaggaatcctgtgtccataacaggaatgctcggttacactctcacagtttttggcgtcattctttacagtgaatccaaaaagcgcagcaacaagccgtgaccaccctagaagacagtaaatacggccatcatttctttgtcctgccagcgcctagagctaatatatgatgagaaactacaccggtggcgatcacaacaaacccaatgccgtaccgcctcagcaattggacatcaagggtagaagtccaataatacctgtagtattaaattggcatgtacgaggcattttttttaatggcattgatggatagaatacatatattttttgtgttagagaagtgtggctcagactgccagcattggttagtacgtttagctcttgggatattgcctcttctattcatcggctactgtaacttctattttcttttgttctgaagactacctgtaccagactttgatccaggttccagggcctaattaatatattgacactgaatttaagctt

SEQ ID NO: 15901 - protein, 347 aa, Zea mays subsp. mays
  peptide (1)..(347): Ceres Seq. ID no. 12406745
SPRARARARSCAAAGVGDDDRGAMAAKGGATPSPGGTGPAAGNGRLFTVGLVTAWYSSNIGVLLLNKYLLSNYGFKYPIFLTMCHMSACALLSYAAIAWLRVVPMQLVRSRVQLAKIAALSLVFCGSVVSGNVSLRYLPVSFNQAVGATTPFFTAVFAYIMTVKRESWITYLTLVPVVTGVIIASGGEPSFHLFGFIMCIGATAARALKTVLQGILLSSDGEKLNSMNLLLYMAPIAVIFLLPATIFMEDNVVGITIQLAKKDFTIVWLLLFNSCLSYFVNLTNFLVTKHTSALTLQVLGNAKGAVAVVISIMIFRNPVSITGMLGYTLTVFGVILYSESKKRSNKP

SEQ ID NO: 15902 - protein, 324 aa, Zea mays subsp. mays
  peptide (1)..(324): Ceres Seq. ID no. 12406746
MAAKGGATPSPGGTGPAAGNGRLFTVGLVTAWYSSNIGVLLLNKYLLSNYGFKYPIFLTMCHMSACALLSYAAIAWLRVVPMQLVRSRVQLAKIAALSLVFCGSVVSGNVSLRYLPVSFNQAVGATTPFFTAVFAYIMTVKRESWITYLTLVPVVTGVIIASGGEPSFHLFGFIMCIGATAARALKTVLQGILLSSDGEKLNSMNLLLYMAPIAVIFLLPATIFMEDNVVGITIQLAKKDFTIVWLLLFNSCLSYFVNLTNFLVTKHTSALTLQVLGNAKGAVAVVISIMIFRNPVSITGMLGYTLTVFGVILYSESKKRSNKP

SEQ ID NO: 15903 - protein, 265 aa, Zea mays subsp. mays
  peptide (1)..(265): Ceres Seq. ID no. 12406747
MCHMSACALLSYAAIAWLRVVPMQLVRSRVQLAKIAALSLVFCGSVVSGNVSLRYLPVSFNQAVGATTPFFTAVFAYIMTVKRESWITYLTLVPVVTGVIIASGGEPSFHLFGFIMCIGATAARALKTVLQGILLSSDGEKLNSMNLLLYMAPIAVIFLLPATIFMEDNVVGITIQLAKKDFTIVWLLLFNSCLSYFVNLTNFLVTKHTSALTLQVLGNAKGAVAVVISIMIFRNPVSITGMLGYTLTVFGVILYSESKKRSNKP

SEQ ID NO: 15904 - DNA, 1745 bp, Zea mays subsp. mays
  misc_feature (1)..(1745): Ceres Seq. ID no. 12369474
  misc_feature (1)..(1745): Ortholog of  Ceres SEQ ID NO 13574398 as cited in SEQ ID NO 0
gcacgagaccattacctagaacatcctaatcgaaaaattccattccctgcgctagcccggcgcccgctcgccctgcctgccactcccgccgcgtgctgcctaccagcaggccaggccaggcacccctgccctgtccgccaccagcacaaccgcgtgcgccggtccggtcggtgcatgccaggatggagaccccttcgtcgacgtgcgacgagggctccgagctcgacgcgcgctcgcactccgactacgccgacttcgacgacctggacctcccgccgcggggccgccaccgccgggaaccgtcctccgacgcgtcctccgagtgcagcggggagcccgggagcccgtacgcctcctcgccgtacccgcgctggccggtgtgcacgcttcctgcgagggtgccgccgccggccgcgccgctgctcaagaggctcggcacgacgcggcgcggcgcccgtgtcggcgcgtgtgacgggaaggccggcgacggcgagctgcagctgatcaaggagaggttctccaagcttctcttgggcgaggacatgtcggggagcggcaagggggtctcgacctccgtggccatctccaacgccatcaccaacctctacgcgactgtctttgggagctgccacaggctgaagcccctgccgccggagaagaagtccatgtggcggcgggagatggactgcctcctctccgtctgcgactacatcgttgagttcttcccttccaaggagatcttgcccgacggcagcatacgagaggtgatggcgacccgaccgcgatccgacatctacgtcaacctccccgccctcgagaagctggacgacatgttgctcgagattctgtacagctttcagaagactgaattctggtacgtcaatgacaaagggcagaaagacgattccgtcgcgacgccgtgccgtccggtgagccaccgcggcgaggagaagtggtggctgcccgtgccgtgcgtcgccaagcccgggctgacggagacggcgcggcgagacctgcagcagaagcgcgactgcgcgagccagatccacaaggcggccatggccatcaacaatgccgttcttgcggagatacggatccccgacctgtacaaggaagcactacccaagtgcgggcgtgccagcgtgggggatctgatctatcggcacatgtcgttcccgggcaagttctcgccggagtacctgctggactgcctggagatctcgtcggagcacgaggccctggaggcggcggaccgcgtggaggccgcgatgcacgtgtggcggctgaaggcgagccagaggtcaccctggatcgcggtcaaggacctgatggagtccgacaagaacgtgatgctggcgagacgcgccgaggacgtgctgctctgcctcaagcagcggttccccggcctctcgcagaccacgctcgacgccagcaagatccagtacaacaaggatgttgggcaagcaatactagagagctattcgagggtgctggagagcctagcgtacaacatcgtaacatgtgtagatgacgttctcttcgcagatgaagccgccagaaagatagcatgagtgatcatttgttcatccttcctgcctgatccgggaaaccaaaaaataaggggtccatgtccatgatccatccacagaatgtacattatgccataacttgtagcagtagtaccatctaccaatggatgatagcacgagcagttaactcatctaggcagccatgtcttggttttc

SEQ ID NO: 15905 - protein, 462 aa, Zea mays subsp. mays
  peptide (1)..(462): Ceres Seq. ID no. 12369475
METPSSTCDEGSELDARSHSDYADFDDLDLPPRGRHRREPSSDASSECSGEPGSPYASSPYPRWPVCTLPARVPPPAAPLLKRLGTTRRGARVGACDGKAGDGELQLIKERFSKLLLGEDMSGSGKGVSTSVAISNAITNLYATVFGSCHRLKPLPPEKKSMWRREMDCLLSVCDYIVEFFPSKEILPDGSIREVMATRPRSDIYVNLPALEKLDDMLLEILYSFQKTEFWYVNDKGQKDDSVATPCRPVSHRGEEKWWLPVPCVAKPGLTETARRDLQQKRDCASQIHKAAMAINNAVLAEIRIPDLYKEALPKCGRASVGDLIYRHMSFPGKFSPEYLLDCLEISSEHEALEAADRVEAAMHVWRLKASQRSPWIAVKDLMESDKNVMLARRAEDVLLCLKQRFPGLSQTTLDASKIQYNKDVGQAILESYSRVLESLAYNIVTCVDDVLFADEAARKIA

SEQ ID NO: 15906 - protein, 342 aa, Zea mays subsp. mays
  peptide (1)..(342): Ceres Seq. ID no. 12369476
MSGSGKGVSTSVAISNAITNLYATVFGSCHRLKPLPPEKKSMWRREMDCLLSVCDYIVEFFPSKEILPDGSIREVMATRPRSDIYVNLPALEKLDDMLLEILYSFQKTEFWYVNDKGQKDDSVATPCRPVSHRGEEKWWLPVPCVAKPGLTETARRDLQQKRDCASQIHKAAMAINNAVLAEIRIPDLYKEALPKCGRASVGDLIYRHMSFPGKFSPEYLLDCLEISSEHEALEAADRVEAAMHVWRLKASQRSPWIAVKDLMESDKNVMLARRAEDVLLCLKQRFPGLSQTTLDASKIQYNKDVGQAILESYSRVLESLAYNIVTCVDDVLFADEAARKIA

SEQ ID NO: 15907 - protein, 301 aa, Zea mays subsp. mays
  peptide (1)..(301): Ceres Seq. ID no. 12369477
MWRREMDCLLSVCDYIVEFFPSKEILPDGSIREVMATRPRSDIYVNLPALEKLDDMLLEILYSFQKTEFWYVNDKGQKDDSVATPCRPVSHRGEEKWWLPVPCVAKPGLTETARRDLQQKRDCASQIHKAAMAINNAVLAEIRIPDLYKEALPKCGRASVGDLIYRHMSFPGKFSPEYLLDCLEISSEHEALEAADRVEAAMHVWRLKASQRSPWIAVKDLMESDKNVMLARRAEDVLLCLKQRFPGLSQTTLDASKIQYNKDVGQAILESYSRVLESLAYNIVTCVDDVLFADEAARKIA

SEQ ID NO: 15908 - DNA, 1623 bp, Zea mays subsp. mays
  misc_feature (1)..(1623): Ceres Seq. ID no. 12362233
  misc_feature (1)..(1623): Ortholog of  Ceres SEQ ID NO 14308389 as cited in SEQ ID NO 55226
  misc_feature (1)..(1623): Ortholog of  Ceres SEQ ID NO 13597162 as cited in SEQ ID NO 63955
  misc_feature (1)..(1623): Ortholog of  Ceres SEQ ID NO 14313292 as cited in SEQ ID NO 67393
  misc_feature (1)..(1623): Ortholog of  Ceres SEQ ID NO 14313567 as cited in SEQ ID NO 68074
aagctcaccgctcactcacaagcacgctgcgaaacacagacgcagagacccgcgcacagatcgaagcggaggatgaaggtggaggtggtggagacgacgctggtgccgccgagcgaggcgacgccgcggcacgcgctgtggctgtccaacctggacctggcggtgcccaagacccacaccccgctcgtctactactacccgaggcccgccggcgccggcgccggggaggagggaaagggagagggagaagggtcgttcttcgacccggcgcgcctgcgggaggcgctgtccagggcgctggtgcccttctacccgctggcggggcggctggcggccggcccgggcggccggctcgagatcgactgcaccggcgagggcgcgctgttctgcgtcgcgcgggccgacttcaccggcgacgagatgttcgccgacttcgagccctcccccgaggcgcgccgcctgctcgtgccattcgccgcgtccggcgacccgccctgcgtgctcgccatggtccaggtgaccttcctcaagtgcggcggcgtggccgtgggcacgggcatgcaccacgtgacgatggacggcgccggcgcgatccagttcatccgggcgtggacggcgctggcgcgcggggaggcccccgcgtggacgccgtcgcacgaccggacgctcctgcgcgcgcgctccccgccgcacgtccccgcctgcgagcacccggtctactccccggcctacctcaacggggcgccgcggcccttcgtgacgcgcgtctacgccgtgccgcccaagctgctggcgggcatccggtcgcgctgcgcgccgggcgcgtccacgtactgcgcggtgacggcgcacctgtggcgcgccatgtgcgtcgcccggggcctcccggcgggcagcgacacgcggctgcgcgtcccggccaacgtccggcagcgcctgcgcccgccgctcccggcgtcctacttcggcaacgccatcgtgcgggacctggtcaccgtgcgggtggccgacgtgctgtcgcagccgctgggcttcgtggcggagcggatcaagcgcgcggtggcccgcgtcgacgacgcccgcgtgcgctccgtcgtcgactacctggagcttgagtcggacaagggcaaccaggcggcgcgcggccagttcatgcccgagtccgacctgtgggtcgtcagcttgctcggcatgcccatccacgacgccgacttcggctggggccgccccgggttcgtggcccccgcgcagatgttcggcagcggcacggcgtacgtcacgcagggacgcgacaaggacgaccccatcaacgtgctcttcgcgctcgagccagagtacctgaacaccttcgagaaggccttctacggggagtgaccgtgacgcgaccacgaccagccatggcgaggagtccgatgacgatggaatgggactgtgatgccattgtgatgccatgccgttgtggcatctcccgtggtgtgcactgtaataccatatcatattgcatgtttcggaatgcaagtcaatgcttactgggtgtgtgataaggtgcttcattccagctttgtactagtgtcaccaagcacgtaaataattgaatgagaaactggaacgtgcacggctggg

SEQ ID NO: 15909 - protein, 457 aa, Zea mays subsp. mays
  peptide (1)..(457): Ceres Seq. ID no. 12362234
KLTAHSQARCETQTQRPAHRSKRRMKVEVVETTLVPPSEATPRHALWLSNLDLAVPKTHTPLVYYYPRPAGAGAGEEGKGEGEGSFFDPARLREALSRALVPFYPLAGRLAAGPGGRLEIDCTGEGALFCVARADFTGDEMFADFEPSPEARRLLVPFAASGDPPCVLAMVQVTFLKCGGVAVGTGMHHVTMDGAGAIQFIRAWTALARGEAPAWTPSHDRTLLRARSPPHVPACEHPVYSPAYLNGAPRPFVTRVYAVPPKLLAGIRSRCAPGASTYCAVTAHLWRAMCVARGLPAGSDTRLRVPANVRQRLRPPLPASYFGNAIVRDLVTVRVADVLSQPLGFVAERIKRAVARVDDARVRSVVDYLELESDKGNQAARGQFMPESDLWVVSLLGMPIHDADFGWGRPGFVAPAQMFGSGTAYVTQGRDKDDPINVLFALEPEYLNTFEKAFYGE

SEQ ID NO: 15910 - protein, 433 aa, Zea mays subsp. mays
  peptide (1)..(433): Ceres Seq. ID no. 12362235
MKVEVVETTLVPPSEATPRHALWLSNLDLAVPKTHTPLVYYYPRPAGAGAGEEGKGEGEGSFFDPARLREALSRALVPFYPLAGRLAAGPGGRLEIDCTGEGALFCVARADFTGDEMFADFEPSPEARRLLVPFAASGDPPCVLAMVQVTFLKCGGVAVGTGMHHVTMDGAGAIQFIRAWTALARGEAPAWTPSHDRTLLRARSPPHVPACEHPVYSPAYLNGAPRPFVTRVYAVPPKLLAGIRSRCAPGASTYCAVTAHLWRAMCVARGLPAGSDTRLRVPANVRQRLRPPLPASYFGNAIVRDLVTVRVADVLSQPLGFVAERIKRAVARVDDARVRSVVDYLELESDKGNQAARGQFMPESDLWVVSLLGMPIHDADFGWGRPGFVAPAQMFGSGTAYVTQGRDKDDPINVLFALEPEYLNTFEKAFYGE

SEQ ID NO: 15911 - protein, 370 aa, Zea mays subsp. mays
  peptide (1)..(370): Ceres Seq. ID no. 12362236
AHRSLTSTLRNTDAETRAQIEAEDEGGGGGDDAGAAERGDAAARAVAVQPGPGGAQDPHPARLLLPEARRRRRRGGGKGRGRRVVLRPGAPAGGAVQGAGALLPAGGAAGGRPGRPARDRLHRRGRAVLRRAGRLHRRRDVRRLRALPRGAPPARAIRRVRRPALRARHGPGDLPQVRRRGRGHGHAPRDDGRRRRDPVHPGVDGAGARGGPRVDAVARPDAPARALPAARPRLRAPGLLPGLPQRGAAALRDARLRRAAQAAGGHPVALRAGRVHVLRGDGAPVARHVRRPGPPGGQRHAAARPGQRPAAPAPAAPGVLLRQRHRAGPGHRAGGRRAVAAAGLRGGADQARGGPRRRRPRALRRRLPGA

SEQ ID NO: 15912 - DNA, 1140 bp, Zea mays subsp. mays; identical to SEQ ID NO: 4797
  misc_feature (1)..(1140): Ceres Seq. ID no. 12386869
  misc_feature (1)..(1140): Ortholog of  Ceres SEQ ID NO 14301423 as cited in SEQ ID NO 52204
  misc_feature (1)..(1140): Ortholog of  Ceres SEQ ID NO 12621037 as cited in SEQ ID NO 66448
  misc_feature (1)..(1140): Ortholog of  Ceres SEQ ID NO 12635639 as cited in SEQ ID NO 0
  misc_feature (1)..(1140): Ortholog of  Ceres SEQ ID NO 14305144 as cited in SEQ ID NO 0

SEQ ID NO: 15913 - protein, 274 aa, Zea mays subsp. mays; identical to SEQ ID NO: 4798
  peptide (1)..(274): Ceres Seq. ID no. 12386870

SEQ ID NO: 15914 - protein, 212 aa, Zea mays subsp. mays; identical to SEQ ID NO: 4799
  peptide (1)..(212): Ceres Seq. ID no. 12386871

SEQ ID NO: 15915 - protein, 178 aa, Zea mays subsp. mays; identical to SEQ ID NO: 4800
  peptide (1)..(178): Ceres Seq. ID no. 12386872

SEQ ID NO: 15916 - DNA, 1370 bp, Zea mays subsp. mays
  misc_feature (1)..(1370): Ceres Seq. ID no. 12372818
  misc_feature (1)..(1370): Ortholog of  Ceres SEQ ID NO 14316440 as cited in SEQ ID NO 58263
  misc_feature (1)..(1370): Ortholog of  Ceres SEQ ID NO 14302462 as cited in SEQ ID NO 65678
atattgtaatgaacactcccttacgtgcagtgccgcgagctgacctccacgaggaccgaaacaattatcgccagattggccgcttcacctcgacagccacgccaccaccactgcgggtctgcggcagtcggcacatggagctcctgcgggacagcatctccatggtgtccctggctgtcctggtgaccgcggtgtgcgcgcgcgccgcgtcctcgtggctccgccccggtctccctcgcctggcgtcgttgctcccgatggtcgcctttcttgccgcggctcccctggctttctcctctgcaatcatccggggacttgcaggcttcttcctcgggtggctcggcgtgttcaaggtcgtcctcctggccgtcggccgcggcccgcttgaccccgccctccccgttctcccgttcgtcttcaccacagcgcttcccgttaagctcagatgcagcagcaccggcgctgcagcagcgtgcagggccaaatcggtctccctcgtctcgtgcgcggtcaaggtcgcggtcatagccgccatcctccatgtgtaccagtacacggaccagctgcatctctacactcgcctcgctctgtacagcgtccacatctactgcttcttggacttcctcctcccgtgcatcgcggcggctggcggcgccctcggcatggatatggagccgcagttcgacaagccgtacctggcgtcgtccctacgcgacttctggggccggcggtggaacctcgtggtgtcggacatcctccggccgtctgtctacggccccgtgcgcgcgcgcgccgggaaggcaccggccgtcctggccacgttcctcgtgtccgggctgatgcacgaggtcatgatttactacctcaccctgcgatcacccaccggtgagatgacggccttcttcctgctccatggcgtctgctgtattgccgaggagtcgtgcgcgcggcggtggatgcagtggggttggaggccgccgccgcgacccgtggctacgctgctcgtggtggtgttcgtggccggcaccgcattctggctcttcttcccgcaaatttgcagggaaggaatggaggagttactgctcgaggagtgggcagcggtaggggcgttcttcaacgacgccgcccgaaagctgctccagatgttcacgtgaagacttgaaagtcggcagtcggcaccagcagactcgttccaatcctctagagataattagtagctatggttttagctgtgttcacagagctaacaacaatagcaatagctatttgagaaacatatagtgtgtttggtttgagaaacgaagtggtgtatctctttctcacttttcacttttttatttggtttgtgaattttatttggtttgtgaaat

SEQ ID NO: 15917 - protein, 383 aa, Zea mays subsp. mays
  peptide (1)..(383): Ceres Seq. ID no. 12372819
IVMNTPLRAVPRADLHEDRNNYRQIGRFTSTATPPPLRVCGSRHMELLRDSISMVSLAVLVTAVCARAASSWLRPGLPRLASLLPMVAFLAAAPLAFSSAIIRGLAGFFLGWLGVFKVVLLAVGRGPLDPALPVLPFVFTTALPVKLRCSSTGAAAACRAKSVSLVSCAVKVAVIAAILHVYQYTDQLHLYTRLALYSVHIYCFLDFLLPCIAAAGGALGMDMEPQFDKPYLASSLRDFWGRRWNLVVSDILRPSVYGPVRARAGKAPAVLATFLVSGLMHEVMIYYLTLRSPTGEMTAFFLLHGVCCIAEESCARRWMQWGWRPPPRPVATLLVVVFVAGTAFWLFFPQICREGMEELLLEEWAAVGAFFNDAARKLLQMFT

SEQ ID NO: 15918 - protein, 381 aa, Zea mays subsp. mays
  peptide (1)..(381): Ceres Seq. ID no. 12372820
MNTPLRAVPRADLHEDRNNYRQIGRFTSTATPPPLRVCGSRHMELLRDSISMVSLAVLVTAVCARAASSWLRPGLPRLASLLPMVAFLAAAPLAFSSAIIRGLAGFFLGWLGVFKVVLLAVGRGPLDPALPVLPFVFTTALPVKLRCSSTGAAAACRAKSVSLVSCAVKVAVIAAILHVYQYTDQLHLYTRLALYSVHIYCFLDFLLPCIAAAGGALGMDMEPQFDKPYLASSLRDFWGRRWNLVVSDILRPSVYGPVRARAGKAPAVLATFLVSGLMHEVMIYYLTLRSPTGEMTAFFLLHGVCCIAEESCARRWMQWGWRPPPRPVATLLVVVFVAGTAFWLFFPQICREGMEELLLEEWAAVGAFFNDAARKLLQMFT

SEQ ID NO: 15919 - protein, 339 aa, Zea mays subsp. mays
  peptide (1)..(339): Ceres Seq. ID no. 12372821
MELLRDSISMVSLAVLVTAVCARAASSWLRPGLPRLASLLPMVAFLAAAPLAFSSAIIRGLAGFFLGWLGVFKVVLLAVGRGPLDPALPVLPFVFTTALPVKLRCSSTGAAAACRAKSVSLVSCAVKVAVIAAILHVYQYTDQLHLYTRLALYSVHIYCFLDFLLPCIAAAGGALGMDMEPQFDKPYLASSLRDFWGRRWNLVVSDILRPSVYGPVRARAGKAPAVLATFLVSGLMHEVMIYYLTLRSPTGEMTAFFLLHGVCCIAEESCARRWMQWGWRPPPRPVATLLVVVFVAGTAFWLFFPQICREGMEELLLEEWAAVGAFFNDAARKLLQMFT

SEQ ID NO: 15920 - DNA, 1237 bp, Zea mays subsp. mays
  misc_feature (1)..(1237): Ceres Seq. ID no. 12353106
  misc_feature (1)..(1237): Ortholog of  Ceres SEQ ID NO 12609185 as cited in SEQ ID NO 55761
  misc_feature (1)..(1237): Ortholog of  Ceres SEQ ID NO 12615291 as cited in SEQ ID NO 62444
accatttcacaccctcttgcctccccgtgactacctcgctgtcccctctcagtgtccaagcgacgacaccacgccgccgagatgtggatctcagattccgcctttgtggagccctcatcttcctccccatccgcctctgcctccccgccgccgagcccgccaccagcacgccttctccgccaacgcaaccgccgccgacgccgcaacagccggaaacagggcagtgccagcgccgtcgacggcgtcgccgaccccgaggcggaggacgtgtggcgtggggcgcagtgggaggcggcgtggccggcgaggcgggactcgaaacccgtcgtgctcgcgggcggagacgacgcggtggggcggtccaggagcctcacggacgacgacctcgaggagctcaagggatgcgccgacctgggcttcggcttcaactacgacgagatccccgagctccggagcaccctgccggcgctcgagctgtgctactccatgagccagcgcctccagctggacgacgagaagccgccgcagcagcacgagggcgccgcaccagatgccgccacgccgtcgccgcctgtcaccaactggaagatctccagccccggtgacagccctgacgaggtgaaggcgcggctcaagtactgggcgcaggcggtggcgtgcaccgtccgcctttgcagctgaacggcgccgatccatgcgcgccattcttcgccgtctggaagcacacaccataccggtatgccggccgccaccacacaagaaaccggatgaccagacctaatcgcgaacacgttgctgctgctgtaaagtgatccaggtgcaccgtttcagctgcgacggcgggcgttggcagctgccatgattgcagctgcagagtttggtggagcatcgttggtagtcgtgtagcagcacacataggggctgggtaaatgggttggttgcccaaccgacatgctgtgctctctgttccagctgagcaacctgcctttgcctgatgaaccaaccatccgagtgtgcagcagccatctccagcggaaataaactattgtaattgtactgctagcagtagtgatcaaaataatgtgcagagtaattagtactgcaagcaaatcggggaatcattgtgaatacataaatctgtggatctcattactatactgttatcttaatcattagctggtgtacctgctacctactgcagctgtttggtaataatggtgcagatgctttccttctc

SEQ ID NO: 15921 - protein, 200 aa, Zea mays subsp. mays
  peptide (1)..(200): Ceres Seq. ID no. 12353107
HFTPSCLPVTTSLSPLSVQATTPRRRDVDLRFRLCGALIFLPIRLCLPAAEPATSTPSPPTQPPPTPQQPETGQCQRRRRRRRPRGGGRVAWGAVGGGVAGEAGLETRRARGRRRRGGAVQEPHGRRPRGAQGMRRPGLRLQLRRDPRAPEHPAGARAVLLHEPAPPAGRREAAAAARGRRTRCRHAVAACHQLEDLQPR

SEQ ID NO: 15922 - protein, 199 aa, Zea mays subsp. mays
  peptide (1)..(199): Ceres Seq. ID no. 12353108
MWISDSAFVEPSSSSPSASASPPPSPPPARLLRQRNRRRRRNSRKQGSASAVDGVADPEAEDVWRGAQWEAAWPARRDSKPVVLAGGDDAVGRSRSLTDDDLEELKGCADLGFGFNYDEIPELRSTLPALELCYSMSQRLQLDDEKPPQQHEGAAPDAATPSPPVTNWKISSPGDSPDEVKARLKYWAQAVACTVRLCS

SEQ ID NO: 15923 - protein, 162 aa, Zea mays subsp. mays
  peptide (1)..(162): Ceres Seq. ID no. 12353109
PFHTLLPPRDYLAVPSQCPSDDTTPPRCGSQIPPLWSPHLPPHPPLPPRRRARHQHAFSANATAADAATAGNRAVPAPSTASPTPRRRTCGVGRSGRRRGRRGGTRNPSCSRAETTRWGGPGASRTTTSRSSRDAPTWASASTTTRSPSSGAPCRRSSCATP

SEQ ID NO: 15924 - DNA, 1449 bp, Zea mays subsp. mays
  misc_feature (1)..(1449): Ceres Seq. ID no. 12367750
  misc_feature (1)..(1449): Ortholog of  Ceres SEQ ID NO 14313743 as cited in SEQ ID NO 59555
gcacgagaccattacctagaacatcctaatcgaaaactccacgccgcgcccgcggagctcgacgcccaccggcgctgcccgtcggagccggggggacgcgccggcgccggagctggcgggagcggagctggcggccatcttccgggtgatggcggacctcctcagcgacccagcgtggccgcagctccatccgcggccctgcaccgacacgccgtggccgggcctgcaatgcgagctcgtgcccgacgacgcgcgcgtgctccgcatcacccgcctccacctgggtctcgacgtcgccaccccgccctgcaggcccgaggccagactagaccccgcctcgctgcgcggactaccgcacctccggacgctctccatcttcagctgctttggcgccgcccaagcctccgttgagctgccgcccgcgctgttcacgtcgtcgtcctcgctcgagcagatcgtgctcaagtccaaccccggcctcaccggcctcataccggcgacgttgggcagcctgcggagcctgcgcgtgctcagcctctcgcagaacggcttccgcggcgggatccccagggagctcggcggcctcgccgcgctgcagcagctcgacctcagctacaacaacatcaccggcgagatccccgaggagattggtgcgatgtcgagtctgacgatccttgacctgagctggaacagcatcggcggcggcgtgccggcgacgctgggcaagctccagaggatgcagaaggcggacctgagctacaaccgcctcgccggccgcgtgccgccggaggcggggtcgctgcgggagctggtgttcctggacctgagccacaacagcctcgcgggcccgctgccgagctcgctggccggcctgtccaggctgcagtacctgctgctgcaggacaaccccctcggcacggcggtgccggcggtggtcgggtcgctgcggcggctgcaggtgctgggcctgtccgggtgcaacctgacggggcccatcccgcgcggcgcgttcgcggcgctggccagcctcacggcgctgtcgctggaccggaaccggctggacgggccgatcccggcgagcctggccgcgctgccccaactgggccagctcaacctcagccagaaccggctggccggggagatcgcgctgccgggggagtttgtcgcgcggctcggcaggcgcctcgacgtccggggcaacgacgagctgtgcatcggcaggggcctacagggtagcggctatctgggagcgcccccgtgcgtggacagccacaacggcgacggatcgccggaaatatcaggtgctgctgcggcggccgtcggcctattcgacgggtcggcgtgtcatctttttgtgtcgtgtctggcgttcgtgttccagttgtgatgtgacatgtaactccggtcgctttctccgcccgactgctgcgacgcgagttttttcctgcc

SEQ ID NO: 15925 - protein, 412 aa, Zea mays subsp. mays
  peptide (1)..(412): Ceres Seq. ID no. 12367751
MADLLSDPAWPQLHPRPCTDTPWPGLQCELVPDDARVLRITRLHLGLDVATPPCRPEARLDPASLRGLPHLRTLSIFSCFGAAQASVELPPALFTSSSSLEQIVLKSNPGLTGLIPATLGSLRSLRVLSLSQNGFRGGIPRELGGLAALQQLDLSYNNITGEIPEEIGAMSSLTILDLSWNSIGGGVPATLGKLQRMQKADLSYNRLAGRVPPEAGSLRELVFLDLSHNSLAGPLPSSLAGLSRLQYLLLQDNPLGTAVPAVVGSLRRLQVLGLSGCNLTGPIPRGAFAALASLTALSLDRNRLDGPIPASLAALPQLGQLNLSQNRLAGEIALPGEFVARLGRRLDVRGNDELCIGRGLQGSGYLGAPPCVDSHNGDGSPEISGAAAAAVGLFDGSACHLFVSCLAFVFQL

SEQ ID NO: 15926 - protein, 243 aa, Zea mays subsp. mays
  peptide (1)..(243): Ceres Seq. ID no. 12367752
MSSLTILDLSWNSIGGGVPATLGKLQRMQKADLSYNRLAGRVPPEAGSLRELVFLDLSHNSLAGPLPSSLAGLSRLQYLLLQDNPLGTAVPAVVGSLRRLQVLGLSGCNLTGPIPRGAFAALASLTALSLDRNRLDGPIPASLAALPQLGQLNLSQNRLAGEIALPGEFVARLGRRLDVRGNDELCIGRGLQGSGYLGAPPCVDSHNGDGSPEISGAAAAAVGLFDGSACHLFVSCLAFVFQL

SEQ ID NO: 15927 - protein, 216 aa, Zea mays subsp. mays
  peptide (1)..(216): Ceres Seq. ID no. 12367753
MQKADLSYNRLAGRVPPEAGSLRELVFLDLSHNSLAGPLPSSLAGLSRLQYLLLQDNPLGTAVPAVVGSLRRLQVLGLSGCNLTGPIPRGAFAALASLTALSLDRNRLDGPIPASLAALPQLGQLNLSQNRLAGEIALPGEFVARLGRRLDVRGNDELCIGRGLQGSGYLGAPPCVDSHNGDGSPEISGAAAAAVGLFDGSACHLFVSCLAFVFQL

SEQ ID NO: 15928 - DNA, 1462 bp, Zea mays subsp. mays
  misc_feature (1)..(1462): Ceres Seq. ID no. 12354475
  misc_feature (1)..(1462): Ortholog of  Ceres SEQ ID NO 14316522 as cited in SEQ ID NO 58267
gtgggtctccgtcgtcgtctctctcctcccggccgccggcgcgatgaggcggttgctcggccacctacacccccatgcccagagcctcttcgcttccctgcctcgcaaaccgtccatcgccaccaagctccccttcctcctctcccgccgcctcctttccgatgccgcctcgcctcctgccccctcgctgccgcctcctcccccgccctctgccgacgtcacgaacacagagttgaagaagaggttggagacttactatggggtggatgaagaggctgaattaccatctgtcgctaaggctgttcttgagcggaatctcacgggtgcccatagtgagactgatgatgaccttattgaggagctgcgtagtaagccactccctgaagtccatgaccgggactttgagtctgattttgaggagatgcatgatactgatgaggagctgaatgacctgtacaatacaagggagtatgttgagaagaagatcaagagtgatgagttctttaacatggatgacacaaagtgggatgccatgatcaaggaggccacagacaagggtcacttaactaacatgaaggagtgcgaggaaatcctcgaggacatgctctactgggacaagctacttcctgatgagatcaagcaaaaggtggagaccaaatttaatgagttgggagacatgtgtgagaggggagagatggaacctgagcaagcatatgagatgttcaaagaatttgaggataagatggtcgctgagtgcactgaattaattgaatcaaagatgccaactgacgctgatgaactgactgaatcaggaggtaagaaagttgagttagatgatctacctggcgagggacctgttctaaggtgggaatcacggattgtatttgttcctagtggagatgcatatcatcccaaaaacagaaaagtcaagctcagtgtgactgtgaaggaattgggactttcacgacatgctttccgtcggttgcgtgaggttgttggaaagaggtataattctgggaaagatgagctcacaataatcagtgaaaggtttgaacaccgggaagagaacagaaaagactgcttgaggacactgtatactctaataaaagacgcaatgaaagctgacaaacttgttgaggatgccaggaattcttatgttaaaggaagacttaaggctaatccacaatttatggagcgattgaagaggaagacagataagttgatggcagctgcataaggtgttacagagctccttgttttaacagctcctctctttccctcatcaacatggtgattattctgtattttcaattttattgttggctgtcgcacggggagaataatatgttgtatgcacttagctttgccttctttaatgtcttggcttcttttgtagggtcattcttagtcataaatatatgttgagcatctcgaataacaatgtcaacacacatccccagct

SEQ ID NO: 15929 - protein, 411 aa, Zea mays subsp. mays
  peptide (1)..(411): Ceres Seq. ID no. 12354476
WVSVVVSLLPAAGAMRRLLGHLHPHAQSLFASLPRKPSIATKLPFLLSRRLLSDAASPPAPSLPPPPPPSADVTNTELKKRLETYYGVDEEAELPSVAKAVLERNLTGAHSETDDDLIEELRSKPLPEVHDRDFESDFEEMHDTDEELNDLYNTREYVEKKIKSDEFFNMDDTKWDAMIKEATDKGHLTNMKECEEILEDMLYWDKLLPDEIKQKVETKFNELGDMCERGEMEPEQAYEMFKEFEDKMVAECTELIESKMPTDADELTESGGKKVELDDLPGEGPVLRWESRIVFVPSGDAYHPKNRKVKLSVTVKELGLSRHAFRRLREVVGKRYNSGKDELTIISERFEHREENRKDCLRTLYTLIKDAMKADKLVEDARNSYVKGRLKANPQFMERLKRKTDKLMAAA

SEQ ID NO: 15930 - protein, 397 aa, Zea mays subsp. mays
  peptide (1)..(397): Ceres Seq. ID no. 12354477
MRRLLGHLHPHAQSLFASLPRKPSIATKLPFLLSRRLLSDAASPPAPSLPPPPPPSADVTNTELKKRLETYYGVDEEAELPSVAKAVLERNLTGAHSETDDDLIEELRSKPLPEVHDRDFESDFEEMHDTDEELNDLYNTREYVEKKIKSDEFFNMDDTKWDAMIKEATDKGHLTNMKECEEILEDMLYWDKLLPDEIKQKVETKFNELGDMCERGEMEPEQAYEMFKEFEDKMVAECTELIESKMPTDADELTESGGKKVELDDLPGEGPVLRWESRIVFVPSGDAYHPKNRKVKLSVTVKELGLSRHAFRRLREVVGKRYNSGKDELTIISERFEHREENRKDCLRTLYTLIKDAMKADKLVEDARNSYVKGRLKANPQFMERLKRKTDKLMAAA

SEQ ID NO: 15931 - protein, 271 aa, Zea mays subsp. mays
  peptide (1)..(271): Ceres Seq. ID no. 12354478
MHDTDEELNDLYNTREYVEKKIKSDEFFNMDDTKWDAMIKEATDKGHLTNMKECEEILEDMLYWDKLLPDEIKQKVETKFNELGDMCERGEMEPEQAYEMFKEFEDKMVAECTELIESKMPTDADELTESGGKKVELDDLPGEGPVLRWESRIVFVPSGDAYHPKNRKVKLSVTVKELGLSRHAFRRLREVVGKRYNSGKDELTIISERFEHREENRKDCLRTLYTLIKDAMKADKLVEDARNSYVKGRLKANPQFMERLKRKTDKLMAAA

SEQ ID NO: 15932 - DNA, 1738 bp, Zea mays subsp. mays
  misc_feature (1)..(1738): Ceres Seq. ID no. 12412461
  misc_feature (1)..(1738): Ortholog of  Ceres SEQ ID NO 14302935 as cited in SEQ ID NO 20442
taatcgaaaaaggcagcctctcgctgtgtcagttccgctttgtaactgtagaaggagagtgagctcatcatcaagtcgagacgatgggccgcaccgaggcggcggacggcgccgagtccggcgggctgggggtgggggagacggtgcgcgagctgcgggaggcgtacgagggcggcaggacgcggagcctagcgtggcggcaggcgcagctgcggggcctcctccggctcctcgaggagaaggaggtggaggcgttccaggcgctccacaaggacctcggcaagcaccacgccgaggcgtacagggacgaggtcggggtgctcatcaagtccgccaacggcgcgctgcagcagctcggcaaatggatggccccggagaaggtgcgggtcccgctgatcgcttggccggcgaccgcgcaggtggtgccggagccgctcggggtcgtcctcgtcttctcctgctggaacgtccccttgggcctgtcgctggagccgctgatcggggcgatagcggccgggaacgcggtggctctgaagccgtccgagctctcgccgtgcaccgccaggttcctgggcgacaacatcgggaggtacatggactcctcggcggtgaaggtcgtccagggcggccccgacgtcggagtgcagctcatggagcaccgctgggacaaggtcctcttcaccgggagcccccgcatcgcgcgcgccgtgatggccgcggcgtccaggcacctgacgcccgtcgcgctggagctgggcggcaagtgcccctgcatcttcgacgccatgggcagcgcccgggacctgcagatctcggttaaccgcatgatcgcgggcaagtggtcgtcctgcgccggacaggcctgcatcgccatcgactacgtgctcgtcgaggagcgcttcgcgcccatcctgatcaaggtgctcaagtcgacgctgaagaggttcttcccggaagcggaccacatggcacggatcgtgaacgagcgccacttcgagaggctgagtaaccttctcaaagacaggtccgtggcgccgtccgtcctgcacggcggctccatggacagcaagaacttgtacattgagcccacgatactgctgaacccgccgctggactccgcgatcatgaccgaggagatattcgggcccctgctcccgatcatcacggtcaagaacatcgaggacagcatcgccttcgtgaaggccatgccgaagcctctcgccatctacgcgttcacccgggacgccgccctgcggcggcgaatcgtggacgagacgtcgtccgggagcgtcaccttcaacgacgcggtagtgcagtacgcgatagacgggctcccgttcggcggcgtcggccagagcgggttcgggcagtaccatgggaagtactcgttcgagatgttcagccacaagaaggcggtcatgaagcggggctacctcgtggagctgacactcaggtacccgccgtgggacgagagcaaagtcaccctcatgcgctacctctaccgcttcaactacttcgccttcgtcctctctttcctcggggctcaggcgatgaacttcactccagcatcaacgcaaggatcgcacagggattgggcccaatataggcgatgaactggcattgacagtggatggaggaacaagccaatatagacaatatgcagtagatgtcttgtttgtgaggaacatgtgtcatgccgcacttcaaaaccagtaatatgctaacctgcatcctatct

SEQ ID NO: 15933 - protein, 509 aa, Zea mays subsp. mays
  peptide (1)..(509): Ceres Seq. ID no. 12412462
MGRTEAADGAESGGLGVGETVRELREAYEGGRTRSLAWRQAQLRGLLRLLEEKEVEAFQALHKDLGKHHAEAYRDEVGVLIKSANGALQQLGKWMAPEKVRVPLIAWPATAQVVPEPLGVVLVFSCWNVPLGLSLEPLIGAIAAGNAVALKPSELSPCTARFLGDNIGRYMDSSAVKVVQGGPDVGVQLMEHRWDKVLFTGSPRIARAVMAAASRHLTPVALELGGKCPCIFDAMGSARDLQISVNRMIAGKWSSCAGQACIAIDYVLVEERFAPILIKVLKSTLKRFFPEADHMARIVNERHFERLSNLLKDRSVAPSVLHGGSMDSKNLYIEPTILLNPPLDSAIMTEEIFGPLLPIITVKNIEDSIAFVKAMPKPLAIYAFTRDAALRRRIVDETSSGSVTFNDAVVQYAIDGLPFGGVGQSGFGQYHGKYSFEMFSHKKAVMKRGYLVELTLRYPPWDESKVTLMRYLYRFNYFAFVLSFLGAQAMNFTPASTQGSHRDWAQYRR

SEQ ID NO: 15934 - protein, 415 aa, Zea mays subsp. mays
  peptide (1)..(415): Ceres Seq. ID no. 12412463
MAPEKVRVPLIAWPATAQVVPEPLGVVLVFSCWNVPLGLSLEPLIGAIAAGNAVALKPSELSPCTARFLGDNIGRYMDSSAVKVVQGGPDVGVQLMEHRWDKVLFTGSPRIARAVMAAASRHLTPVALELGGKCPCIFDAMGSARDLQISVNRMIAGKWSSCAGQACIAIDYVLVEERFAPILIKVLKSTLKRFFPEADHMARIVNERHFERLSNLLKDRSVAPSVLHGGSMDSKNLYIEPTILLNPPLDSAIMTEEIFGPLLPIITVKNIEDSIAFVKAMPKPLAIYAFTRDAALRRRIVDETSSGSVTFNDAVVQYAIDGLPFGGVGQSGFGQYHGKYSFEMFSHKKAVMKRGYLVELTLRYPPWDESKVTLMRYLYRFNYFAFVLSFLGAQAMNFTPASTQGSHRDWAQYRR

SEQ ID NO: 15935 - protein, 339 aa, Zea mays subsp. mays
  peptide (1)..(339): Ceres Seq. ID no. 12412464
MDSSAVKVVQGGPDVGVQLMEHRWDKVLFTGSPRIARAVMAAASRHLTPVALELGGKCPCIFDAMGSARDLQISVNRMIAGKWSSCAGQACIAIDYVLVEERFAPILIKVLKSTLKRFFPEADHMARIVNERHFERLSNLLKDRSVAPSVLHGGSMDSKNLYIEPTILLNPPLDSAIMTEEIFGPLLPIITVKNIEDSIAFVKAMPKPLAIYAFTRDAALRRRIVDETSSGSVTFNDAVVQYAIDGLPFGGVGQSGFGQYHGKYSFEMFSHKKAVMKRGYLVELTLRYPPWDESKVTLMRYLYRFNYFAFVLSFLGAQAMNFTPASTQGSHRDWAQYRR

SEQ ID NO: 15936 - DNA, 1808 bp, Zea mays subsp. mays
  misc_feature (1)..(1808): Ceres Seq. ID no. 12406575
  misc_feature (1)..(1808): Ortholog of  Ceres SEQ ID NO 13655852 as cited in SEQ ID NO 64636
gcacgagaccattacctagaacatcctaatcgaaaaacgcgcactgtctctctcgtatcactctccattctacctctctcttccccaatccaggccagccaaccctagcgcaccggcgatggcgtcggacccggcccctgacgacgcggccgcggccgtgaatgggcacggcaacgacaacggacacggtaacggcccgtccccgtcgaagcgcccccgggcggtgatctcggaagccgagatccgcgtcgagttcgcacaccacgacgcagccgtggcgcgcgtcaacaacggcagcttcggctgctgcccggcctcggtcctcgccgcgcaggcccactggcagcgcctcttcctcgcgcagcccgacgccttctacttccacgttctccagcagggccttctccgctcgcgcgccgccgtcgccgaggtggtgggcgctggcgacgtctccgaggtctccctcgtcgataacgccaccacggccgccgccatcgtcctgcagcacgcagcctggagcttcgccgagggtcacttcgcgcgcggggatgcggtgctgatgctccactacgcctatggtgcggtcaagaagtccatccacgcgtacgtcgcgcgtgcgggggccaccgtcgtcgaggtgcccctcccattccccgtcgcgtccgccgacgcaatcattgccgagttccgtgctgcgctcgcggtcgccaaggaaggagggcgtagggtcaggctcgcagtcatcgaccacattacctccatgcccagtgtcgtcatcccagtcaaggagctcgtcgccatctgtcgagaagagggcgttgacaaggtatttgttgacgctgcccactctattgggcaggtgcctgtggacgtgcgcgacattggagccgatttctatacaagcaaccttcataagtggttcttttgcccccctgctgtggcctttttgcatactcgcaaggatgacccgatagcctcccaactccatcaccctgttgtttcccatgagtatgggaatgggctgcctatggagagcggatggattggaacacgggattacagtgcccagcttgttgtgtccgaggctatagattttgtgaatcgatttgagggtggaattgaggctatacgaaaccggaatcatgagaaagttattgagatgggtaggatgcttgctgaggcatgggggacttttcttggctcacctccggaactgtgtggtagcatggttatggtggggatgcctggttgccttggtgttgagagtgatgatgatgcaatgagagtgaggacaatgttgagaaaggatttccaggtggaggtgccggtatactacaactcaagaagggtggaaggacaggagatgacaaaggataaaaatggtgatccagtgacagggtatgtgaggatctcacaccaggtttacaatgtcacagaggactatgagagactgagggatgttgtcaataaacttgtttctgaagggttcaccagcagcaagttgcggccttctgagaagcaagaagcttaggtgtaatgaccttccagccaggtagcatccacctgaaggcgctgtggccgactacttaggtgtggaccggatcagcgcagccagtacggcttcgtgatcgtgacgttgaagaatgtagtgtaccgccaggaactgacatgtgttgtatttggcgttcagtgtaagtaacaataatgccctggcatgttgtcttctctcacattttgggagctgctgtaacctcagaataatctggaatataaggatatttacagctgctgtagattgattgctgggc

SEQ ID NO: 15937 - protein, 470 aa, Zea mays subsp. mays
  peptide (1)..(470): Ceres Seq. ID no. 12406576
MASDPAPDDAAAAVNGHGNDNGHGNGPSPSKRPRAVISEAEIRVEFAHHDAAVARVNNGSFGCCPASVLAAQAHWQRLFLAQPDAFYFHVLQQGLLRSRAAVAEVVGAGDVSEVSLVDNATTAAAIVLQHAAWSFAEGHFARGDAVLMLHYAYGAVKKSIHAYVARAGATVVEVPLPFPVASADAIIAEFRAALAVAKEGGRRVRLAVIDHITSMPSVVIPVKELVAICREEGVDKVFVDAAHSIGQVPVDVRDIGADFYTSNLHKWFFCPPAVAFLHTRKDDPIASQLHHPVVSHEYGNGLPMESGWIGTRDYSAQLVVSEAIDFVNRFEGGIEAIRNRNHEKVIEMGRMLAEAWGTFLGSPPELCGSMVMVGMPGCLGVESDDDAMRVRTMLRKDFQVEVPVYYNSRRVEGQEMTKDKNGDPVTGYVRISHQVYNVTEDYERLRDVVNKLVSEGFTSSKLRPSEKQEA

SEQ ID NO: 15938 - protein, 323 aa, Zea mays subsp. mays
  peptide (1)..(323): Ceres Seq. ID no. 12406577
MLHYAYGAVKKSIHAYVARAGATVVEVPLPFPVASADAIIAEFRAALAVAKEGGRRVRLAVIDHITSMPSVVIPVKELVAICREEGVDKVFVDAAHSIGQVPVDVRDIGADFYTSNLHKWFFCPPAVAFLHTRKDDPIASQLHHPVVSHEYGNGLPMESGWIGTRDYSAQLVVSEAIDFVNRFEGGIEAIRNRNHEKVIEMGRMLAEAWGTFLGSPPELCGSMVMVGMPGCLGVESDDDAMRVRTMLRKDFQVEVPVYYNSRRVEGQEMTKDKNGDPVTGYVRISHQVYNVTEDYERLRDVVNKLVSEGFTSSKLRPSEKQEA

SEQ ID NO: 15939 - protein, 256 aa, Zea mays subsp. mays
  peptide (1)..(256): Ceres Seq. ID no. 12406578
MPSVVIPVKELVAICREEGVDKVFVDAAHSIGQVPVDVRDIGADFYTSNLHKWFFCPPAVAFLHTRKDDPIASQLHHPVVSHEYGNGLPMESGWIGTRDYSAQLVVSEAIDFVNRFEGGIEAIRNRNHEKVIEMGRMLAEAWGTFLGSPPELCGSMVMVGMPGCLGVESDDDAMRVRTMLRKDFQVEVPVYYNSRRVEGQEMTKDKNGDPVTGYVRISHQVYNVTEDYERLRDVVNKLVSEGFTSSKLRPSEKQEA

SEQ ID NO: 15940 - DNA, 1550 bp, Zea mays subsp. mays
  misc_feature (1)..(1550): Ceres Seq. ID no. 12386804
  misc_feature (1)..(1550): Ortholog of  Ceres SEQ ID NO 14314108 as cited in SEQ ID NO 63184
  misc_feature (1)..(1550): Ortholog of  Ceres SEQ ID NO 13658253 as cited in SEQ ID NO 66650
ctgaggcctgagctgcctccatatttgcattcttcaccctcgcttcacgtcaccaccattgccatccaagaacaaattaagcgggacactggaaacaaagagagacatgggccttcgcggcggagctcttgccctgcttctgctcctgttcgtccacggaggccagcgagcagcagaggccggcggggacgcgttcgtgagggtccagggcacccgcttcgtgcaggacggcaagccgttcttcgccaacgggttcaacgcctactggctcatgacattcggcgccgaccccgcgcggaggggcaaggtcacctcggcgctcagccaggccgccggcgccggcctctccgtggccaggacgtgggcgttcagcgacggcggcggcggcggcggcagcgcgctgcagtactctcccggccgctacaacgagaacaccttccaggggctggatttcgtgctgtctgaggcaaggaagcatgggattaagatgattctgagcctcgtgaacaattacgacagctttggagggaggaagcagtacgtgcagtgggcgagggagcgggggcagaccattggatctgacgatgagttcttcactaacccctttgtaaagggcatctacaagaaccatatcaaggccgttctgacgagggtgaacacgatcaccggcgtggcatacaaggacgacccgacgatcatggcgtgggagctgatgaacgagccgcgttgccagtccgacgtgtcgggccacgccatccagtcgtggatcacggagatggcggcgcacgtgaagtccatcgacgggaaccacctgctggaggccggcctggagggcttctacggcgcgtcgtcggcccgcaggtccgcgaacccgtcgggggtaccaggtggggcaccgacttcatcgncaacaaccgggcgcccgggatcgacttcgccaccgtgcactcgtacccggaccagtggctgggcggcctggacgcgcaggcgcagctgnggttcctgggcgcctggctcgacgcccacatcgccgacgcgcgggcggtgctgcgcaagccgctgctggtggccgagttcggcgagtcgcgccacgacccgggctacagcggcggccaacgcgacgcggtgttcggcacggtgtacgccagggtctacgactcggcgcgcgccggaggccccgcggcgggcgcgctcttctggcagctcctggcggaggggatggactcctacggggacggctacgaggtcgtcctcccgcaggcgccgtccaccgccggagtcatcgccacgcagagccggaggctgcagggcctcgccagggcgttcgtgcgcgcgcgcaaggcccaccaggggaaggcgggcaagggcgctaagggtggcggcaactgaaagtggggtgaaacgtgtgtggcgagatcaagaagagtgtgtgtgtgtatgcgtcgatgtctcctcgagatgatttgaagattcatccgggagccaagagttacttctacatactatctagcgttgtcctccatgttttattatttagaggacttgcgttt

SEQ ID NO: 15941 - protein, 451 aa, Zea mays subsp. mays
  peptide (1)..(451): Ceres Seq. ID no. 12386805
  misc_feature (268)..(268): Xaa is any aa, unknown or other
  misc_feature (297)..(297): Xaa is any aa, unknown or other
MGLRGGALALLLLLFVHGGQRAAEAGGDAFVRVQGTRFVQDGKPFFANGFNAYWLMTFGADPARRGKVTSALSQAAGAGLSVARTWAFSDGGGGGGSALQYSPGRYNENTFQGLDFVLSEARKHGIKMILSLVNNYDSFGGRKQYVQWARERGQTIGSDDEFFTNPFVKGIYKNHIKAVLTRVNTITGVAYKDDPTIMAWELMNEPRCQSDVSGHAIQSWITEMAAHVKSIDGNHLLEAGLEGFYGASSARRSANPSGVPGGAPTSSXTTGRPGSTSPPCTRTRTSGWAAWTRRRSXGSWAPGSTPTSPTRGRCCASRCWWPSSASRATTRATAAANATRCSARCTPGSTTRRAPEAPRRARSSGSSWRRGWTPTGTATRSSSRRRRPPPESSPRRAGGCRASPGRSCARARPTRGRRARALRVAATESGVKRVWRDQEECVCVCVDVSSR

SEQ ID NO: 15942 - protein, 396 aa, Zea mays subsp. mays
  peptide (1)..(396): Ceres Seq. ID no. 12386806
  misc_feature (213)..(213): Xaa is any aa, unknown or other
  misc_feature (242)..(242): Xaa is any aa, unknown or other
MTFGADPARRGKVTSALSQAAGAGLSVARTWAFSDGGGGGGSALQYSPGRYNENTFQGLDFVLSEARKHGIKMILSLVNNYDSFGGRKQYVQWARERGQTIGSDDEFFTNPFVKGIYKNHIKAVLTRVNTITGVAYKDDPTIMAWELMNEPRCQSDVSGHAIQSWITEMAAHVKSIDGNHLLEAGLEGFYGASSARRSANPSGVPGGAPTSSXTTGRPGSTSPPCTRTRTSGWAAWTRRRSXGSWAPGSTPTSPTRGRCCASRCWWPSSASRATTRATAAANATRCSARCTPGSTTRRAPEAPRRARSSGSSWRRGWTPTGTATRSSSRRRRPPPESSPRRAGGCRASPGRSCARARPTRGRRARALRVAATESGVKRVWRDQEECVCVCVDVSSR

SEQ ID NO: 15943 - protein, 324 aa, Zea mays subsp. mays
  peptide (1)..(324): Ceres Seq. ID no. 12386807
  misc_feature (141)..(141): Xaa is any aa, unknown or other
  misc_feature (170)..(170): Xaa is any aa, unknown or other
MILSLVNNYDSFGGRKQYVQWARERGQTIGSDDEFFTNPFVKGIYKNHIKAVLTRVNTITGVAYKDDPTIMAWELMNEPRCQSDVSGHAIQSWITEMAAHVKSIDGNHLLEAGLEGFYGASSARRSANPSGVPGGAPTSSXTTGRPGSTSPPCTRTRTSGWAAWTRRRSXGSWAPGSTPTSPTRGRCCASRCWWPSSASRATTRATAAANATRCSARCTPGSTTRRAPEAPRRARSSGSSWRRGWTPTGTATRSSSRRRRPPPESSPRRAGGCRASPGRSCARARPTRGRRARALRVAATESGVKRVWRDQEECVCVCVDVSSR

SEQ ID NO: 15944 - DNA, 967 bp, Zea mays subsp. mays
  misc_feature (1)..(967): Ceres Seq. ID no. 12357364
  misc_feature (1)..(967): Ortholog of  Ceres SEQ ID NO 12635132 as cited in SEQ ID NO 0
ctgacgagctgagcccacggacgagaggggagacgaggaggggcacaccacgcaggagaccggaggagagcgcgcgcgcggatccacctcgatgttggcaagaccatcagcaccgcctttggtgactgctcaaactcctgaagtcggcatcttcattacagctcgcaacgtctcgggtgcactggtcgccaagcttcctggtaacaaaaacaagtgtggaggaagatcgaatgtccggcagcggaacatccaacctgggaaaaggggctgtcgtcgggagtggcgggcgctctcagcagctgaccaagcgcaggcttctaccttggacgtagatgaggagtgcaaacgggtgctcactccattgggtttctccagcgaagacgccgagaagatgctgaagaaagcgtttggctggacccactcgccgtactggagcgaggagagggagaaggaggttccgaccgccgagacggtagctggagtgctggactacatcaggagcctggggctgtcggacgaagaccttggcaggctgctgaagaagttccccgaggttcttgggtgcgacctcgacggcgaggtgaggccgaatgtgggcaagctggacagtgactggggaataaacgggaagaccctgcggagccttctgctgaggaaccccaaggttctgggctacaatgttgactgcagaggggattgcatggcccagtgcacccgctgttgggttaggttctgatgatgattggttttgttcttcgtcgccacatcgttggtcaggaacttgggacttggttttgcttgctggccatttttctgtaagctagcacctgtcgaatgtagcacaatcgctagctgctggatattgggttggccactgttagttcttatgtacgtacaacagattcaagagctaaaccatgctgctgttgtctgtaaaagagttgcaataaatatggccagaattccc

SEQ ID NO: 15945 - protein, 214 aa, Zea mays subsp. mays
  peptide (1)..(214): Ceres Seq. ID no. 12357365
MLARPSAPPLVTAQTPEVGIFITARNVSGALVAKLPGNKNKCGGRSNVRQRNIQPGKRGCRREWRALSAADQAQASTLDVDEECKRVLTPLGFSSEDAEKMLKKAFGWTHSPYWSEEREKEVPTAETVAGVLDYIRSLGLSDEDLGRLLKKFPEVLGCDLDGEVRPNVGKLDSDWGINGKTLRSLLLRNPKVLGYNVDCRGDCMAQCTRCWVRF

SEQ ID NO: 15946 - protein, 114 aa, Zea mays subsp. mays
  peptide (1)..(114): Ceres Seq. ID no. 12357366
MLKKAFGWTHSPYWSEEREKEVPTAETVAGVLDYIRSLGLSDEDLGRLLKKFPEVLGCDLDGEVRPNVGKLDSDWGINGKTLRSLLLRNPKVLGYNVDCRGDCMAQCTRCWVRF

SEQ ID NO: 15947 - DNA, 1971 bp, Zea mays subsp. mays
  misc_feature (1)..(1971): Ceres Seq. ID no. 13501211
  misc_feature (1)..(1971): Ortholog of  Ceres SEQ ID NO 14307843 as cited in SEQ ID NO 20508
  misc_feature (1)..(1971): Ortholog of  Ceres SEQ ID NO 15170811 as cited in SEQ ID NO 52649
  misc_feature (1)..(1971): Ortholog of  Ceres SEQ ID NO 13638331 as cited in SEQ ID NO 58047
  misc_feature (1)..(1971): Ortholog of  Ceres SEQ ID NO 15225845 as cited in SEQ ID NO 65125
  misc_feature (1)..(1971): Ortholog of  Ceres SEQ ID NO 15170135 as cited in SEQ ID NO 67647
aagagacagagagggggagtggtccgaggtcaataggatataactccaggactcctctccatcagaatcagagacgagtcgagtgagggggcagaggccacaaaacagagagtacccaaacgatcgatctgtgcatctccccgtccgtcccgcaaccatctaattcagaagcagacatcaatggcgagcaacggctgcaacggcaacggcaacggcaacggcaacggcaaggcggctccggcgggtgtggtggtaccggagatcaagttcaccaagctcttcatcaacggcgagttcgtcgacgccgcctccggcaagacattcgataccagggacccacggaccggcgacgtgctggcccacgtagcagaggcagacaaagctgatgtggacctggcggtgaagtccgcccgggacgccttcgagcacggcaagtggccccgcatgtcaggctacgagcgcgggcggatcatgagcaagctggcggacctggtggagcagcacacggaggagctggcggcgctggacggtgccgacgccgggaagctgctgctgctgggcaagatcatcgacatccccgcggccacgcagatgctgcgctactacgccggcgccgccgacaagatccacggcgacgtcctgcgcgtctccggcaggtaccagggctacacgctcaaggagcctatcggcgtcgtgggcgtcatcatcccctggaacttccccaccatgatgttcttcctcaaggtcagcccggcgctcgccgcgggctgcaccgtcgtcgtcaagcccgccgagcagacgccgctttccgcgctctactacgcgcacctcgcaaagatggccggcgtccccgacggagtgatcaacgtcgtccccgggttcggccccaccgccggcgccgcgctcgcctcccacatggacgtcgacagcgtggccttcaccggctccacagaggtgggtcgcctcatcatggagtcggccgcgcggagcaacctcaagacggtctcgctggagctcggcggcaagtcgccgctcatcatcttcgacgacgccgacgtcgacatggccgttaacctgtcgaggcttgccgtcttcttcaacaagggagaggtttgcgtggcgggatcgcgcgtgtacgtgcaggaagggatctatgacgagttcgtcaagaaggccgtggaggccgcgcggagctggaaggttggagacccgttcgatgtcaccagcaacatgggccctcaggttgacaaggaccagtttgagagggtcctaaagtacattgagcatggcaagagcgagggagcgactctgctcaccggcggcaagcctgccgccgacaaagggtactacattgagcccaccatctttgtcgatgtcactgaggacatgaagatcgcgcaggaagagatcttcggccccgtcatgtccctcatgaagttcaagacggttgatgaggtgatcgagaaggccaactgcaccaggtacgggctcgccgccgggatcgtgaccaagagcctggacgtcgccaaccgggtgtcccggtcggtgcgcgccggcaccgtgtgggtgaactgctacttcgccttcgacccggacgcgcccttcggcgggtacaagatgagcggcttcggccgggaccaggggctggcagccatggacaagtacctgcaggtcaagagcgtcatcaccgcgctcccggactcgccatggtactgagttgagccagggaccgatggaaccccatcgatctcttcttgtgcagtgtacatgcgtcatgcgtgcgtgctcacacagctgggttgctgctttgtgcttgtgttcgtctctggtttgtggctcatgtgtgttagtctgcaccctatccttctgtacgtagctgccggacatgcaaatagtatgttaagtacaccatataaactcttgttttataaattcaagtttagcttggagccttcactcccttcagccttg

SEQ ID NO: 15948 - protein, 511 aa, Zea mays subsp. mays
  peptide (1)..(511): Ceres Seq. ID no. 13501212
MASNGCNGNGNGNGNGKAAPAGVVVPEIKFTKLFINGEFVDAASGKTFDTRDPRTGDVLAHVAEADKADVDLAVKSARDAFEHGKWPRMSGYERGRIMSKLADLVEQHTEELAALDGADAGKLLLLGKIIDIPAATQMLRYYAGAADKIHGDVLRVSGRYQGYTLKEPIGVVGVIIPWNFPTMMFFLKVSPALAAGCTVVVKPAEQTPLSALYYAHLAKMAGVPDGVINVVPGFGPTAGAALASHMDVDSVAFTGSTEVGRLIMESAARSNLKTVSLELGGKSPLIIFDDADVDMAVNLSRLAVFFNKGEVCVAGSRVYVQEGIYDEFVKKAVEAARSWKVGDPFDVTSNMGPQVDKDQFERVLKYIEHGKSEGATLLTGGKPAADKGYYIEPTIFVDVTEDMKIAQEEIFGPVMSLMKFKTVDEVIEKANCTRYGLAAGIVTKSLDVANRVSRSVRAGTVWVNCYFAFDPDAPFGGYKMSGFGRDQGLAAMDKYLQVKSVITALPDSPWY

SEQ ID NO: 15949 - protein, 423 aa, Zea mays subsp. mays
  peptide (1)..(423): Ceres Seq. ID no. 13501213
MSGYERGRIMSKLADLVEQHTEELAALDGADAGKLLLLGKIIDIPAATQMLRYYAGAADKIHGDVLRVSGRYQGYTLKEPIGVVGVIIPWNFPTMMFFLKVSPALAAGCTVVVKPAEQTPLSALYYAHLAKMAGVPDGVINVVPGFGPTAGAALASHMDVDSVAFTGSTEVGRLIMESAARSNLKTVSLELGGKSPLIIFDDADVDMAVNLSRLAVFFNKGEVCVAGSRVYVQEGIYDEFVKKAVEAARSWKVGDPFDVTSNMGPQVDKDQFERVLKYIEHGKSEGATLLTGGKPAADKGYYIEPTIFVDVTEDMKIAQEEIFGPVMSLMKFKTVDEVIEKANCTRYGLAAGIVTKSLDVANRVSRSVRAGTVWVNCYFAFDPDAPFGGYKMSGFGRDQGLAAMDKYLQVKSVITALPDSPWY

SEQ ID NO: 15950 - protein, 414 aa, Zea mays subsp. mays
  peptide (1)..(414): Ceres Seq. ID no. 13501214
MSKLADLVEQHTEELAALDGADAGKLLLLGKIIDIPAATQMLRYYAGAADKIHGDVLRVSGRYQGYTLKEPIGVVGVIIPWNFPTMMFFLKVSPALAAGCTVVVKPAEQTPLSALYYAHLAKMAGVPDGVINVVPGFGPTAGAALASHMDVDSVAFTGSTEVGRLIMESAARSNLKTVSLELGGKSPLIIFDDADVDMAVNLSRLAVFFNKGEVCVAGSRVYVQEGIYDEFVKKAVEAARSWKVGDPFDVTSNMGPQVDKDQFERVLKYIEHGKSEGATLLTGGKPAADKGYYIEPTIFVDVTEDMKIAQEEIFGPVMSLMKFKTVDEVIEKANCTRYGLAAGIVTKSLDVANRVSRSVRAGTVWVNCYFAFDPDAPFGGYKMSGFGRDQGLAAMDKYLQVKSVITALPDSPWY

SEQ ID NO: 15951 - DNA, 1294 bp, Zea mays subsp. mays
  misc_feature (1)..(1294): Ceres Seq. ID no. 13494804
  misc_feature (1)..(1294): Ortholog of  Ceres SEQ ID NO 14314585 as cited in SEQ ID NO 59345
gcgcaccgtccctcaccgccggcctctgctcctcttccgccgccgcaggatctcgtatcgccggagaccatgtaccgcgccgccgggagccacctccgctccctcaagcatcatggtgcttctaggcttgccagtacaagtgttgcgaagcagtcctcaggtggtctgttcagctggcttcttggtggaaaatcaagcgaactccctccccttgatgttccactcccaggcattagcattccctcacctctaccagattttgtagagccatctaagacaaaagtcactactcttccaaatggcgtcaagatcgcctcggagacatcatcgagcccagcagcatctgtgggtctgtacattgactgtggttccatttacgaaacacctgcttcatctggagtatcacatctgttggagagaatggccttcaagagcacagtgaatcggactcacttacggttagttcgtgaggtagaagccattggaggaaatgtctctgcatcagcttcccgtgaacaaatgagctatacctatgatgcattgaagagctatacaccagaaatggttgaagttctcattgacagtgtaaggaatccagcattcctcgattgggaggtcaaagagcagctccagaacataaaatctgaaatagctgatgcgtctgctaatcctcaaggtctacttctggaggcccttcattcggttggatattccggggcactggcaaaacctttgatggcttcagaatctgctgtaaaccggttggatgttagcagcttggaggaatttgttgctgaacattacactgctcccaggatggttcttgcagcatcaggagttgatcatgatgcgctgatttcagttgtagaaccacttctgtctgaccttccgtgcgtgaaacgtcctgaagagccaaaatctgtgtacgtgggaggagactatcgctgccaagcagattctccaaacacacacatcgcacttgcttttgagatgccaggtggttggaatcaagagaaaactgcaatggttgtgacagtgcttcagatgctcatgggaggaggagggtccttctctgctggtgggcctggaaagggaatgcattctcgattgtatctccgtgtcttgaccaacttccaacagattgaatcattctctgctttcaatagcgtctataacaattcgggcctttttggaatttatgcagtcactagcccagacttttcatcgaaggctgtggatttggcagcaggggaactcctggagattgcgacacctggaaaagttacacaagaac

SEQ ID NO: 15952 - protein, 431 aa, Zea mays subsp. mays
  peptide (1)..(431): Ceres Seq. ID no. 13494805
AHRPSPPASAPLPPPQDLVSPETMYRAAGSHLRSLKHHGASRLASTSVAKQSSGGLFSWLLGGKSSELPPLDVPLPGISIPSPLPDFVEPSKTKVTTLPNGVKIASETSSSPAASVGLYIDCGSIYETPASSGVSHLLERMAFKSTVNRTHLRLVREVEAIGGNVSASASREQMSYTYDALKSYTPEMVEVLIDSVRNPAFLDWEVKEQLQNIKSEIADASANPQGLLLEALHSVGYSGALAKPLMASESAVNRLDVSSLEEFVAEHYTAPRMVLAASGVDHDALISVVEPLLSDLPCVKRPEEPKSVYVGGDYRCQADSPNTHIALAFEMPGGWNQEKTAMVVTVLQMLMGGGGSFSAGGPGKGMHSRLYLRVLTNFQQIESFSAFNSVYNNSGLFGIYAVTSPDFSSKAVDLAAGELLEIATPGKVTQE

SEQ ID NO: 15953 - protein, 408 aa, Zea mays subsp. mays
  peptide (1)..(408): Ceres Seq. ID no. 13494806
MYRAAGSHLRSLKHHGASRLASTSVAKQSSGGLFSWLLGGKSSELPPLDVPLPGISIPSPLPDFVEPSKTKVTTLPNGVKIASETSSSPAASVGLYIDCGSIYETPASSGVSHLLERMAFKSTVNRTHLRLVREVEAIGGNVSASASREQMSYTYDALKSYTPEMVEVLIDSVRNPAFLDWEVKEQLQNIKSEIADASANPQGLLLEALHSVGYSGALAKPLMASESAVNRLDVSSLEEFVAEHYTAPRMVLAASGVDHDALISVVEPLLSDLPCVKRPEEPKSVYVGGDYRCQADSPNTHIALAFEMPGGWNQEKTAMVVTVLQMLMGGGGSFSAGGPGKGMHSRLYLRVLTNFQQIESFSAFNSVYNNSGLFGIYAVTSPDFSSKAVDLAAGELLEIATPGKVTQE

SEQ ID NO: 15954 - protein, 291 aa, Zea mays subsp. mays
  peptide (1)..(291): Ceres Seq. ID no. 13494807
MAFKSTVNRTHLRLVREVEAIGGNVSASASREQMSYTYDALKSYTPEMVEVLIDSVRNPAFLDWEVKEQLQNIKSEIADASANPQGLLLEALHSVGYSGALAKPLMASESAVNRLDVSSLEEFVAEHYTAPRMVLAASGVDHDALISVVEPLLSDLPCVKRPEEPKSVYVGGDYRCQADSPNTHIALAFEMPGGWNQEKTAMVVTVLQMLMGGGGSFSAGGPGKGMHSRLYLRVLTNFQQIESFSAFNSVYNNSGLFGIYAVTSPDFSSKAVDLAAGELLEIATPGKVTQE

SEQ ID NO: 15955 - DNA, 1385 bp, Zea mays subsp. mays; identical to SEQ ID NO: 2381
  misc_feature (1)..(1385): Ceres Seq. ID no. 12348953
  misc_feature (1)..(1385): Ortholog of  Ceres SEQ ID NO 14302021 as cited in SEQ ID NO 68979
  misc_feature (1)..(1385): Ortholog of  Ceres SEQ ID NO 14309296 as cited in SEQ ID NO 0

SEQ ID NO: 15956 - protein, 310 aa, Zea mays subsp. mays; identical to SEQ ID NO: 2382
  peptide (1)..(310): Ceres Seq. ID no. 12348954

SEQ ID NO: 15957 - protein, 202 aa, Zea mays subsp. mays; identical to SEQ ID NO: 2383
  peptide (1)..(202): Ceres Seq. ID no. 12348955

SEQ ID NO: 15958 - protein, 184 aa, Zea mays subsp. mays; identical to SEQ ID NO: 2384
  peptide (1)..(184): Ceres Seq. ID no. 12348956

SEQ ID NO: 15959 - DNA, 1742 bp, Zea mays subsp. mays
  misc_feature (1)..(1742): Ceres Seq. ID no. 12356991
  misc_feature (1)..(1742): Ortholog of  Ceres SEQ ID NO 12608620 as cited in SEQ ID NO 60192
  misc_feature (1)..(1742): Ortholog of  Ceres SEQ ID NO 13662898 as cited in SEQ ID NO 66199
  misc_feature (1)..(1742): Ortholog of  Ceres SEQ ID NO 14313358 as cited in SEQ ID NO 67347
aagcgcccaaggcagcggagagagctagctccctcctcctcctcaggtagcgagcgagcgagcgagcgagctcctctgcccctctgcacacctggcctccccttctccgctgcaggaccgccgttgacgactgctccaccagtactgcgcgcgcccgcgctgcctacccttacctagccagagcgcggcgcgcgagagggagaacgaccaggaggggaggagatcgatcgatcgatcgatcgagatagatggctttcctcaacatggagcagcagacctgggccttcaccttcggtatcctaggtaacataatctcgctgatggtgttcctttcgccgctgccgacgttctaccgcgtgtaccgcaagaagtcgacggaggggttccagtcgaccccgtacgtggtgacgctgttcagctgcatgctgtggatcttctacgcgctgctcaagtccggcgccgagctgctggtgaccatcaacggcgtcgggtgcgtgatcgaggcggcgtacctggcgacgtacctggtgtacgcgcccaaggccgccagggcgctgacggccaagatgctgctgggctcaacgtcggcgtcttcggcctcgccgcgctcgccaccatggtggtctccagcgccggcctccgcgtgcgcgtgctcggatggatctgcgtcagcgtcgcgctcagcgtattcgccgcgccgctcagcatcatgcggcaggtggtccggaccaagagcgtggagttcatgcccttctcgctctccttcttcctggtgctgagcgccgtgatctggttcgcgtacggcgcgctgaagagggacgtgttcgtggcgttccccaacgtgctgggcttcgtcttcggcgtcgcgcagatggcgctgtacatggcgtacaggaacaaggagcccgcggcggcggcggcggcgatagcggtgacggtggatcaggaggcgaagctgccggagcacgccaaggaggtggtggtggccgaggccagggcgagctgcggtgccgaggtgcaccccatcgacatcgatatcgaagctacgccgacgccggtcgaggaggtgcacgagccgcaggtggtcgtggtcgtggtcgtcgacgtggagcctgtcacctgcgccggcgccgccgaggcagatgcgtccggcgttgccgacggcggcgtccctggacccatggcgccgccggagcagctggcgatcaagcccgacatggccatttccgtggaggcgtaggttggttaaagtgtgatagcagagtgagtcgatatcgatcagtagtaggtttgtcgagtcgcctgctgctgctgctacgcgacagcagcggccagatgtactgcctgcatgcatgcagtccctcccgttgactcgacccgtagagatgggatgggatggaagtagccgggcccttgggcgagtagcggcgccttgggttggcacccacgggccagccgtactggcctgtgtgatgaaccggcgagagaaagagatgagataatgtgcgagcgagagagaaggttgggttgtggtagactggtagttgaagaagacggctagctagctagatgctgctgggctctctatctgtctctagatctgtgtgtgtctgtgtaatcgaggattccctcaccttgcttgccgcctcccttttgtgtccttctagtctgatgattgttttcattccatccatgccggcgtcgcagtaataaaaaaaaaattggaatggacgggttcactg

SEQ ID NO: 15960 - protein, 237 aa, Zea mays subsp. mays
  peptide (1)..(237): Ceres Seq. ID no. 12356992
MDLRQRRAQRIRRAAQHHAAGGPDQERGVHALLALLLPGAERRDLVRVRRAEEGRVRGVPQRAGLRLRRRADGAVHGVQEQGARGGGGGDSGDGGSGGEAAGARQGGGGGRGQGELRCRGAPHRHRYRSYADAGRGGARAAGGRGRGRRRGACHLRRRRRGRCVRRCRRRRPWTHGAAGAAGDQARHGHFRGGVGWLKCDSRVSRYRSVVGLSSRLLLLLRDSSGQMYCLHACSPSR

SEQ ID NO: 15961 - protein, 207 aa, Zea mays subsp. mays
  peptide (1)..(207): Ceres Seq. ID no. 12356993
MVVSSAGLRVRVLGWICVSVALSVFAAPLSIMRQVVRTKSVEFMPFSLSFFLVLSAVIWFAYGALKRDVFVAFPNVLGFVFGVAQMALYMAYRNKEPAAAAAAIAVTVDQEAKLPEHAKEVVVAEARASCGAEVHPIDIDIEATPTPVEEVHEPQVVVVVVVDVEPVTCAGAAEADASGVADGGVPGPMAPPEQLAIKPDMAISVEA

SEQ ID NO: 15962 - protein, 176 aa, Zea mays subsp. mays
  peptide (1)..(176): Ceres Seq. ID no. 12356994
MAFLNMEQQTWAFTFGILGNIISLMVFLSPLPTFYRVYRKKSTEGFQSTPYVVTLFSCMLWIFYALLKSGAELLVTINGVGCVIEAAYLATYLVYAPKAARALTAKMLLGSTSASSASPRSPPWWSPAPASACACSDGSASASRSAYSPRRSASCGRWSGPRAWSSCPSRSPSSWC

SEQ ID NO: 15963 - DNA, 1472 bp, Zea mays subsp. mays
  misc_feature (1)..(1472): Ceres Seq. ID no. 12405326
  misc_feature (1)..(1472): Ortholog of  Ceres SEQ ID NO 13655237 as cited in SEQ ID NO 62892
  misc_feature (1)..(1472): Ortholog of  Ceres SEQ ID NO 13597268 as cited in SEQ ID NO 63929
  misc_feature (1)..(1472): Ortholog of  Ceres SEQ ID NO 13659840 as cited in SEQ ID NO 66970
  misc_feature (1)..(1472): Ortholog of  Ceres SEQ ID NO 13660544 as cited in SEQ ID NO 67401
  misc_feature (1)..(1472): Ortholog of  Ceres SEQ ID NO 13584744 as cited in SEQ ID NO 69137
  misc_feature (1)..(1472): Ortholog of  Ceres SEQ ID NO 13624708 as cited in SEQ ID NO 0
  misc_feature (1)..(1472): Ortholog of  Ceres SEQ ID NO 15180683 as cited in SEQ ID NO 0
aatgcttcgaaaattgtgtcatcccacaccgtgttcacctcctcacacggtctagagtcaagtcaactcactctcctagtcttcgatccagatcccatcgggttggactgtgtacactcttaaaacttcatcagctcccgagcaatctcagcccgtacatcaggttcttggatctctcccgagctgggatccgtcaagttttctgctccagcggcgacaattcgtcaggaatggccaacaagccgagtcttctgagcactctgccgactaacccaccagcacagtttctgaaagatatcacggacggcttctctgaaactcaaatgcttggtgaaggtgcatttggaactgtttacaagggcattctgcaagatgggcagccaattgcggtgaagaagcttgcagagaatgcgccggtggcacctgagaagcagttcaagattggggttgggaacccttatggccatgcagcatccgaatatagtcaggatactcggctactgccgtgaaccgcaaaggaaagtgattgagcagagtggaagatacattattgtagacgtggttgagagcttactgtactatgaatacgttcctaatggaaaccttgaaaagtatatttccgatgcatcagcttctagacctgattggaagacatgcttcgagataatcaagggcatctgccagggcttacgttacctacataaggaaatggataggccaattgttcatttggatcttcatcctaccaacatattgttggatgagaacatggtgccgaaaatcacggatttcggcctgtccagactctttggtgaagaacaaaccagaataaacacaattaatgttgtgggaaagaaagggtacatggctccagaatatctatataggggtgaaatttcaacccggtcagatatatatagcttaggtctagtaatcatggagattataacaggcaagaacagttcttcaagcgacaaagatatgtctgcaagggactttgtagataaaggtgcgtgagacgtggacagatgagcacatagcatccaagcactcagcactagatgcagtcagcctccaggaagtaagaacatgcattgaaattgggctaaaatgtgtggatattgatcagaacaagagaccttctatagttgaaattgttgacaagctcaatggaaggcatgctcactgaatgatgaactcctgcatactatacatgcaagtgaaaattatgttgcggacccatggagatttgctctagatggaatcatggacaaaataattgtatgtgttaccgattatgtacttttgaataatgtgttcctcgtgttgtgtcactttttcaggagttccttgatttgtcattgtgtttttctttcttttgacacaaatctgcatgcataacctgttgaaaaattgtgtgcatactagttatttgttttttctcatgttatgtgaatactatttttttacct

SEQ ID NO: 15964 - protein, 202 aa, Zea mays subsp. mays
  peptide (1)..(202): Ceres Seq. ID no. 12405327
MRRWHLRSSSRLGLGTLMAMQHPNIVRILGYCREPQRKVIEQSGRYIIVDVVESLLYYEYVPNGNLEKYISDASASRPDWKTCFEIIKGICQGLRYLHKEMDRPIVHLDLHPTNILLDENMVPKITDFGLSRLFGEEQTRINTINVVGKKGYMAPEYLYRGEISTRSDIYSLGLVIMEIITGKNSSSSDKDMSARDFVDKGA

SEQ ID NO: 15965 - protein, 185 aa, Zea mays subsp. mays
  peptide (1)..(185): Ceres Seq. ID no. 12405328
MAMQHPNIVRILGYCREPQRKVIEQSGRYIIVDVVESLLYYEYVPNGNLEKYISDASASRPDWKTCFEIIKGICQGLRYLHKEMDRPIVHLDLHPTNILLDENMVPKITDFGLSRLFGEEQTRINTINVVGKKGYMAPEYLYRGEISTRSDIYSLGLVIMEIITGKNSSSSDKDMSARDFVDKGA

SEQ ID NO: 15966 - protein, 183 aa, Zea mays subsp. mays
  peptide (1)..(183): Ceres Seq. ID no. 12405329
MQHPNIVRILGYCREPQRKVIEQSGRYIIVDVVESLLYYEYVPNGNLEKYISDASASRPDWKTCFEIIKGICQGLRYLHKEMDRPIVHLDLHPTNILLDENMVPKITDFGLSRLFGEEQTRINTINVVGKKGYMAPEYLYRGEISTRSDIYSLGLVIMEIITGKNSSSSDKDMSARDFVDKGA

SEQ ID NO: 15967 - DNA, 764 bp, Zea mays subsp. mays
  misc_feature (1)..(764): Ceres Seq. ID no. 12406736
  misc_feature (1)..(764): Ortholog of  Ceres SEQ ID NO 13662677 as cited in SEQ ID NO 63824
cttgcccggtctccgccttttcggagaccgcacccaatggccggctcaaccaaggtgctggccgccatcctgctcgtcgacctcgtcgccttcggcctcgccatcggcgcggtgcagagccgcccctcggcgaggctggagacggacgagaggcaggagtggacctactgcgtgtaccgcacggacgccgccacggcgctgggtggcgccgcgctcgcgctggtgttcgtgggacaggcggtggccgccgccgccagtcgctgcttctgctgcgggtccgtgctgcggcccggcggcgccagggcctgcgcgctcgtcctcttcatctcctcctgggtgacattcgtcatcgctgaggcgtgcttgctagctggtcttttgcaatccgcctaccacactggctaccggaaggtgtttttccagaacccgccggactgcgagacggtgcggaggggcacgttcggagccggcgctgcttttgcccttttcacctgcgtgctcacctcggcctactactactgcttctccaaggcgcggatctactaccaccgcccggaagccgccatcggcatgactccgttgtaaacagatttaccggtctctctgcagtaacagttttgatagcaactatatatgtctgttaggtttttgcatatattatgttgggctggtatgtgacagtttttcaggaccatgtatctgactgagttgaactcaatgaaatatgatggctgctggtgctggaccggctcatccttagttcc

SEQ ID NO: 15968 - protein, 194 aa, Zea mays subsp. mays
  peptide (1)..(194): Ceres Seq. ID no. 12406737
LARSPPFRRPHPMAGSTKVLAAILLVDLVAFGLAIGAVQSRPSARLETDERQEWTYCVYRTDAATALGGAALALVFVGQAVAAAASRCFCCGSVLRPGGARACALVLFISSWVTFVIAEACLLAGLLQSAYHTGYRKVFFQNPPDCETVRRGTFGAGAAFALFTCVLTSAYYYCFSKARIYYHRPEAAIGMTPL

SEQ ID NO: 15969 - protein, 182 aa, Zea mays subsp. mays
  peptide (1)..(182): Ceres Seq. ID no. 12406738
MAGSTKVLAAILLVDLVAFGLAIGAVQSRPSARLETDERQEWTYCVYRTDAATALGGAALALVFVGQAVAAAASRCFCCGSVLRPGGARACALVLFISSWVTFVIAEACLLAGLLQSAYHTGYRKVFFQNPPDCETVRRGTFGAGAAFALFTCVLTSAYYYCFSKARIYYHRPEAAIGMTPL

SEQ ID NO: 15970 - protein, 117 aa, Zea mays subsp. mays
  peptide (1)..(117): Ceres Seq. ID no. 12406739
CPVSAFSETAPNGRLNQGAGRHPARRPRRLRPRHRRGAEPPLGEAGDGREAGVDLLRVPHGRRHGAGWRRARAGVRGTGGGRRRQSLLLLRVRAAARRRQGLRARPLHLLLGDIRHR

SEQ ID NO: 15971 - DNA, 478 bp, Zea mays subsp. mays
  misc_feature (1)..(478): Ceres Seq. ID no. 12578891
  misc_feature (1)..(478): Ortholog of  Ceres SEQ ID NO 13599533 as cited in SEQ ID NO 343
  misc_feature (1)..(478): Ortholog of  Ceres SEQ ID NO 15224985 as cited in SEQ ID NO 55771
  misc_feature (1)..(478): Ortholog of  Ceres SEQ ID NO 12598184 as cited in SEQ ID NO 64590
atcccaaagagcaagagcacgcagtagtgcagcagcactgaagcactacttcctgcactcactgtgctagctgctcaaaccgtagtagtaacagtccatcaccayaccayaccaccaatggctcccaaggttgcgctcttccttgccctaagcctcctgttcgctgccaccgcgcatggctgcgaaccctactgttccggcccagtcgtcccaacaccaccagtcgtgccgactccgtcgtcgcatagccacgggcgctgcccgatcgacgcgctcaagctcaaggtgtgcgccaatgtgctgggcctcgtcaaggtcggcctaccgcaatacgagcaatgctgcccattgctggaggggctggtggaccttgacgccgcattgtgcctctgcaccgccatcaaggcaaacgtcctcggcatccacctcaacgtgccccttagcctcaacctcatcctcaacaactgcggcaagattt

SEQ ID NO: 15972 - protein, 120 aa, Zea mays subsp. mays
  peptide (1)..(120): Ceres Seq. ID no. 13580079
MAPKVALFLALSLLFAATAHGCEPYCSGPVVPTPPVVPTPSSHSHGRCPIDALKLKVCANVLGLVKVGLPQYEQCCPLLEGLVDLDAALCLCTAIKANVLGIHLNVPLSLNLILNNCGKI

SEQ ID NO: 15973 - protein, 101 aa, Zea mays subsp. mays
  peptide (1)..(101): Ceres Seq. ID no. 13580080
MAANPTVPAQSSQHHQSCRLRRRIATGAARSTRSSSRCAPMCWASSRSAYRNTSNAAHCWRGWWTLTPHCASAPPSRQTSSASTSTCPLASTSSSTTAARF

SEQ ID NO: 15974 - protein, 61 aa, Zea mays subsp. mays
  peptide (1)..(61): Ceres Seq. ID no. 13580081
MCWASSRSAYRNTSNAAHCWRGWWTLTPHCASAPPSRQTSSASTSTCPLASTSSSTTAARF

SEQ ID NO: 15975 - DNA, 1732 bp, Zea mays subsp. mays
  misc_feature (1)..(1732): Ceres Seq. ID no. 12566433
  misc_feature (1)..(1732): Ortholog of  Ceres SEQ ID NO 14311572 as cited in SEQ ID NO 51713
  misc_feature (1)..(1732): Ortholog of  Ceres SEQ ID NO 14308664 as cited in SEQ ID NO 55450
  misc_feature (1)..(1732): Ortholog of  Ceres SEQ ID NO 15226673 as cited in SEQ ID NO 66997
  misc_feature (1)..(1732): Ortholog of  Ceres SEQ ID NO 14302998 as cited in SEQ ID NO 67440
acgtactgctctcctagctagcttagctactaccagctccgatcctgtgctgccgccgccatggagaatccctacacgagcttcttcaacagccatccgcagcaccaccgctactactaccaccccgcgccgccagcgccggcgccagccgcctaccacccctccctgcctttcttcgctgcgcaccgccagccacctgctccgacggcgcccgccccgccctcgccaccgctccgggaagccctgccgctgctctccctggcccccacgcggcatgaggagcgggagcgccgcgcccggccaccggcaccagcgttggaggattctgaagagaaccgggacgagggagaagaagagcaggaggaggaggagggccccaccgcgagcagcaagagcaaccacggccagcaccagcgcctgggagtgggacgacagcgagggttcttcgccgacctgaacgccagcgcggcgggtgacgatgacgacccgatggacgtggaggctgcagccgacggctccggctccgcggcggcgggcgacgacgtgaccgtggcgctgcgcatcggtctgccgctgccgggacctgccgagctggtctcggacctctcctcttccggcggcgcccgcaggcaacagcaccagcacgacggcggcggcggcgaggaggaggaggaggatgaggagggtgacggggagaacggtggcggcggcgaggaggaaggaaccaccgcggcggcgccgctagggttcccgtcctcgccgattgggcggctcaacaaggggcagtactggatcccgacgccgtcgcagatcctcatcggcccgacgcagttctcctgccccgtctgcttcaagaccttcaaccgctacaacaacatgcagatgcacatgtggggtcacgggtcacagtaccgcaagggcccggagtcgctgcggggcatccagccgacggccatgctgcggctgccgtgctactgctgctcgccggggtgccgcaacaacatcgaccacccgcgcgccaagccgctcaaggacttccgcacgctgcagacgcactacaagcgcaagcacggcctcaagcccttcctctgccgccgctgcggcaaggccttcgccgtcaagggcgactggcgcacgcacgagaagaactgcggcaggctctggtactgcctctgcggctccgagttcaagcacaagcgctcgctcaaggaccacgcccgcgccttcggccgcggccacggcttcgtcggcggcggccctcctggcgccgggtgcggcgggggactcgacgacgacgatgacggcgctgtttccgacgtcgagcacgacggtgccgccacggcggccaggtcgatgtgaccgatccatgcagctgccatctatggatcgatcgagctctctatattcctagccggccggcaggtcaatattatatatacttattagtaggccgaccgactggtgcaagtgcaaaagaaaatctgttgtaccatatagtaacagattatcaagctgttctttcattttgcagctgctgtagcgctactgctatatagagtcggttctcttcgtctgctccgtcctagttaagtgcagcacacggctcatccctggcacgagaaataaatcacgggcatgcgtgtgtcaacagctagaatatgtgctcgattgatgcacagtgtgttagaatttattgtccattttctaataatattttttactgttgaagttc

SEQ ID NO: 15976 - protein, 432 aa, Zea mays subsp. mays
  peptide (1)..(432): Ceres Seq. ID no. 12566434
MENPYTSFFNSHPQHHRYYYHPAPPAPAPAAYHPSLPFFAAHRQPPAPTAPAPPSPPLREALPLLSLAPTRHEERERRARPPAPALEDSEENRDEGEEEQEEEEGPTASSKSNHGQHQRLGVGRQRGFFADLNASAAGDDDDPMDVEAAADGSGSAAAGDDVTVALRIGLPLPGPAELVSDLSSSGGARRQQHQHDGGGGEEEEEDEEGDGENGGGGEEEGTTAAAPLGFPSSPIGRLNKGQYWIPTPSQILIGPTQFSCPVCFKTFNRYNNMQMHMWGHGSQYRKGPESLRGIQPTAMLRLPCYCCSPGCRNNIDHPRAKPLKDFRTLQTHYKRKHGLKPFLCRRCGKAFAVKGDWRTHEKNCGRLWYCLCGSEFKHKRSLKDHARAFGRGHGFVGGGPPGAGCGGGLDDDDDGAVSDVEHDGAATAARSM

SEQ ID NO: 15977 - protein, 289 aa, Zea mays subsp. mays
  peptide (1)..(289): Ceres Seq. ID no. 12566435
MDVEAAADGSGSAAAGDDVTVALRIGLPLPGPAELVSDLSSSGGARRQQHQHDGGGGEEEEEDEEGDGENGGGGEEEGTTAAAPLGFPSSPIGRLNKGQYWIPTPSQILIGPTQFSCPVCFKTFNRYNNMQMHMWGHGSQYRKGPESLRGIQPTAMLRLPCYCCSPGCRNNIDHPRAKPLKDFRTLQTHYKRKHGLKPFLCRRCGKAFAVKGDWRTHEKNCGRLWYCLCGSEFKHKRSLKDHARAFGRGHGFVGGGPPGAGCGGGLDDDDDGAVSDVEHDGAATAARSM

SEQ ID NO: 15978 - DNA, 1844 bp, Zea mays subsp. mays
  misc_feature (1)..(1844): Ceres Seq. ID no. 12381094
  misc_feature (1)..(1844): Ortholog of  Ceres SEQ ID NO 15170151 as cited in SEQ ID NO 53069
  misc_feature (1)..(1844): Ortholog of  Ceres SEQ ID NO 13594209 as cited in SEQ ID NO 59089
  misc_feature (1)..(1844): Ortholog of  Ceres SEQ ID NO 14313084 as cited in SEQ ID NO 59183
  misc_feature (1)..(1844): Ortholog of  Ceres SEQ ID NO 15227091 as cited in SEQ ID NO 60294
  misc_feature (1)..(1844): Ortholog of  Ceres SEQ ID NO 14308041 as cited in SEQ ID NO 62601
  misc_feature (1)..(1844): Ortholog of  Ceres SEQ ID NO 14303546 as cited in SEQ ID NO 64893
  misc_feature (1)..(1844): Ortholog of  Ceres SEQ ID NO 14302228 as cited in SEQ ID NO 65061
  misc_feature (1)..(1844): Ortholog of  Ceres SEQ ID NO 15176783 as cited in SEQ ID NO 65590
  misc_feature (1)..(1844): Ortholog of  Ceres SEQ ID NO 14308027 as cited in SEQ ID NO 65826
  misc_feature (1)..(1844): Ortholog of  Ceres SEQ ID NO 15169585 as cited in SEQ ID NO 66076
  misc_feature (1)..(1844): Ortholog of  Ceres SEQ ID NO 14307960 as cited in SEQ ID NO 66187
  misc_feature (1)..(1844): Ortholog of  Ceres SEQ ID NO 15170163 as cited in SEQ ID NO 66262
  misc_feature (1)..(1844): Ortholog of  Ceres SEQ ID NO 13502874 as cited in SEQ ID NO 66298
  misc_feature (1)..(1844): Ortholog of  Ceres SEQ ID NO 14307944 as cited in SEQ ID NO 66503
  misc_feature (1)..(1844): Ortholog of  Ceres SEQ ID NO 15169631 as cited in SEQ ID NO 67173
  misc_feature (1)..(1844): Ortholog of  Ceres SEQ ID NO 12614124 as cited in SEQ ID NO 68392
  misc_feature (1)..(1844): Ortholog of  Ceres SEQ ID NO 15176087 as cited in SEQ ID NO 68692
gcacgagaccatcacctagaacatcctaatcgaaaaaaaacgttagccttttccaatcagggagagagctcaaacatggcactcgaacccgtcgctctcctgctcacggtcctcgtcgccgcgccgctcacggtcctcctcctcctcctcttcctcgtcgccggcaacaagaggcccgctcgtgctgcttctcccacgccgcgccaccgcttgaggctgccgctgccgccgtcgccgcggggcctcccgctgctgggccacctgcacctgctgggctcgctgccgcaccgcgcgctggcgtctctggcgcgcgcgcacggccccgtgctgctgctccgcctgggccgcgtgcccaccgtggtcgtgtcctccgctgccgccgccgaggaggtgatgcgggcgcgggacctggcgttcgcgaaccggcccgcgagcgccatgggccgtgcgcctcctctacggccgcgacgtcgcgttcgcgccctacggcgagtactggcgccaggcgcgccgcgtctgcgtcgtccacctcctcagcgcgcgtcacgtcgggtccttccgccgtgtccgagagcaggaggccgccgcgctggtcgcacgcgtcgcccgggacagcgccggtggcgcggccgtcggcctcagcgatctcctcaccgagtacgccaacgccgtcgtgtcgcgcgccgcgttcggcgacgagagcgcgcgcgggctgttgggcgaattcgactccggccgtcggcagaggaaagtgctcaccgacttccagaagctcgtggggacgacgcccgtcggggagctgctgccgtggctgggctgggtggacgccgtcacggggctggaggggaagatcaggcggacgttcgaggcgctcgacgggttgctcgagaaggtgatcgatgaccaccggcggcggcctcgcagcggggaggagggcggtgaccgggacttcgtggacgtgttgctggacgtccacaacaaggaccaagagcacggcatccaactagagaccaacgaaatcaaggccatcatcttggacatgttcgcggcaggcacggacacgatagccacggcgatggaatgggccatggcggagctcgtcacccacccgcgtgccatgcggagagcccaggacgaggtccgcgcggcggcggccggctcaaccggcgtgaacgaggaccacgtcgcgcagctggactacctcaaggccgtgctgaaggagacgctccggttgcacgcgccgttgccactgctggtgccccgggagccggcggcggacaccgagatcctggggtaccacgtcccggcgcgcacgcgcgtgctggtcaacgcctgggctattggccgggaccccgcgacgtgggagcgcgccgaggaattcgtgccagagaggttcttgggcggcgccgccgcagctgacgtcggcttcaaggggcagcacttcgagctcctgccgttcggcggcggcaggaggatgtgccccggaatcgcgtttgcggagggaagcgccgagatggccctggcgagcctgctgtatcattttgactgggaggcggcgagccggggccagaacgggaaagggacgctgtcgctggacatgaccgagatgaacggattagccgtgcatatcaactccggtcttccgcttgtagccaagccgtggatccccttcaagaactaggagaagatattggagatatttggttttttactgcaaacaatgtgcttgattttaatgttattttagacatttttgctcttcttcgtccttctccctttttccctttttgtgtgtgtacgcttgtaaaaaaagacaaaatatcaaaataatctctactaccccg

SEQ ID NO: 15979 - protein, 300 aa, Zea mays subsp. mays
  peptide (1)..(300): Ceres Seq. ID no. 12381095
ARDHHLEHPNRKKTLAFSNQGESSNMALEPVALLLTVLVAAPLTVLLLLLFLVAGNKRPARAASPTPRHRLRLPLPPSPRGLPLLGHLHLLGSLPHRALASLARAHGPVLLLRLGRVPTVVVSSAAAAEEVMRARDLAFANRPASAMGRAPPLRPRRRVRALRRVLAPGAPRLRRPPPQRASRRVLPPCPRAGGRRAGRTRRPGQRRWRGRRPQRSPHRVRQRRRVARRVRRRERARAVGRIRLRPSAEESAHRLPEARGDDARRGAAAVAGLGGRRHGAGGEDQADVRGARRVAREGDR

SEQ ID NO: 15980 - protein, 275 aa, Zea mays subsp. mays
  peptide (1)..(275): Ceres Seq. ID no. 12381096
MALEPVALLLTVLVAAPLTVLLLLLFLVAGNKRPARAASPTPRHRLRLPLPPSPRGLPLLGHLHLLGSLPHRALASLARAHGPVLLLRLGRVPTVVVSSAAAAEEVMRARDLAFANRPASAMGRAPPLRPRRRVRALRRVLAPGAPRLRRPPPQRASRRVLPPCPRAGGRRAGRTRRPGQRRWRGRRPQRSPHRVRQRRRVARRVRRRERARAVGRIRLRPSAEESAHRLPEARGDDARRGAAAVAGLGGRRHGAGGEDQADVRGARRVAREGDR

SEQ ID NO: 15981 - protein, 213 aa, Zea mays subsp. mays
  peptide (1)..(213): Ceres Seq. ID no. 12381097
MFAAGTDTIATAMEWAMAELVTHPRAMRRAQDEVRAAAAGSTGVNEDHVAQLDYLKAVLKETLRLHAPLPLLVPREPAADTEILGYHVPARTRVLVNAWAIGRDPATWERAEEFVPERFLGGAAAADVGFKGQHFELLPFGGGRRMCPGIAFAEGSAEMALASLLYHFDWEAASRGQNGKGTLSLDMTEMNGLAVHINSGLPLVAKPWIPFKN

SEQ ID NO: 15982 - DNA, 1340 bp, Zea mays subsp. mays
  misc_feature (1)..(1340): Ceres Seq. ID no. 12363910
  misc_feature (1)..(1340): Ortholog of  Ceres SEQ ID NO 14302919 as cited in SEQ ID NO 20338
  misc_feature (1)..(1340): Ortholog of  Ceres SEQ ID NO 13595497 as cited in SEQ ID NO 51127
  misc_feature (1)..(1340): Ortholog of  Ceres SEQ ID NO 14306765 as cited in SEQ ID NO 53275
  misc_feature (1)..(1340): Ortholog of  Ceres SEQ ID NO 14314046 as cited in SEQ ID NO 59316
ggttccattactggtccctagcaggaagcaggatggagttggcgctcagcttgggggagaccatggcggatgccggaagggacctcatgctggggcttgggatgggggtcggggtgcggagggaggaggaagcgcagagagggaggagggacagggaggtgaggcgggagctggagttcacggcgaggagcgcccggtcgtcgccggagccggcggtgcgactcaccctcctgcacggcctcggcctcccgtggccgccgccgccgtcgtccgagaccaaccggcacctggaggcgtcggcgcgtggcttcgacgtgaaccgggcgccgtcgctgtccgcggccggtggcgccgcggaggaggacgaggagcaggacgaggcggcggcggcggcggcatcgtcgtcgcccaacaacagcgcgagctccttcccgacggacttctccgcgcaggggccaggtggcgcccggcgccgaccgcgcgtgctcccgcgccagcgacgaggacgacggcggctccgcgcgcaagaagctgcgcctctccaaggagcagtccgcgttcctggaggatagcttcaaggagcacgccacgctgaacccgaagcagaagctcgcgctggcgaagcagctcaacctccggccgcgccaggtggaggtgtggttccagaaccgcagagccaggacgaagctgaagcagacggaggtggactgcgagtacctcaagcgatgctgcgagacgctgacggaggagaaccggcggctgcagaaggagctatccgagctccgctcgctcaagacggtgcaccccttctacatgcacctcccggccaccaccctttccatgtgcccctcctgcgagcgcgtcgcctccaactccgcgccggcgcccgcgtcatcgccgtcccccgctactggcattgcggccccggcaccggagcagaggccctcgtcgttcgcggctctgttctcgtcccctctgaaccgcccgctggccgcccaggcgcaaccgcaaccgcaggcgccggccaactcgtgaggcgctctctactctatctccggcgacgcgaacggaggtggatctggctgtaaatacgatcacctttttttggcttcctttttcttttgttttcacttgatgcggttcttgagattttttttttgtggattgccgatgggttggtttaccggtttattagagcgcatcatctggccgtcggattggactgcggacggccgggtgcagaaaggaagtgctgcgatagagtttattaacctcagtagcatcgatcatgttttgttaccttgctatctatcttggcgtcaatataggccttgaaatcc

SEQ ID NO: 15983 - protein, 197 aa, Zea mays subsp. mays
  peptide (1)..(197): Ceres Seq. ID no. 12363911
VPLLVPSRKQDGVGAQLGGDHGGCRKGPHAGAWDGGRGAEGGGSAEREEGQGGEAGAGVHGEERPVVAGAGGATHPPARPRPPVAAAAVVRDQPAPGGVGAWLRREPGAVAVRGRWRRGGGRGAGRGGGGGGIVVAQQQRELLPDGLLRAGARWRPAPTARAPAPATRTTAAPRARSCASPRSSPRSWRIASRSTPR

SEQ ID NO: 15984 - protein, 189 aa, Zea mays subsp. mays
  peptide (1)..(189): Ceres Seq. ID no. 12363912
FHYWSLAGSRMELALSLGETMADAGRDLMLGLGMGVGVRREEEAQRGRRDREVRRELEFTARSARSSPEPAVRLTLLHGLGLPWPPPPSSETNRHLEASARGFDVNRAPSLSAAGGAAEEDEEQDEAAAAAASSSPNNSASSFPTDFSAQGPGGARRRPRVLPRQRRGRRRLRAQEAAPLQGAVRVPGG

SEQ ID NO: 15985 - protein, 179 aa, Zea mays subsp. mays
  peptide (1)..(179): Ceres Seq. ID no. 12363913
MELALSLGETMADAGRDLMLGLGMGVGVRREEEAQRGRRDREVRRELEFTARSARSSPEPAVRLTLLHGLGLPWPPPPSSETNRHLEASARGFDVNRAPSLSAAGGAAEEDEEQDEAAAAAASSSPNNSASSFPTDFSAQGPGGARRRPRVLPRQRRGRRRLRAQEAAPLQGAVRVPGG

SEQ ID NO: 15986 - DNA, 1452 bp, Zea mays subsp. mays
  misc_feature (1)..(1452): Ceres Seq. ID no. 12359603
  misc_feature (1)..(1452): Ortholog of  Ceres SEQ ID NO 14302216 as cited in SEQ ID NO 66456
aggcagccaggcacccaatcaacggacggccagccggcagccgtcgtagcgggagccgggagaatagtaaaggacaaatcagacgaggaggagcgtggagcggggacagcctgcgctgcgctgccttgctccggccggccggccccccaccttagcccttgtcccggttccctcctccaccattcaaatctcctggcttcgtttcagttcgatttgaagcggggcggcagaggaggcagggggattgggtccggggacgacatttggcggcatcaaccacacagcacaggcacagcgcagcaccatgacgatggagggggcggtttccgacaacaccaagggcctggcgctcgccgtcgcctccagcgccttcatcggcgccagcttcatcctcaagaagatcggcctcctgcgagcagccaagtgcggcgaccgcgcaggtggcggaggacacacttacctctccgagcctctatggtgggcgggaatgaccacaatgctgcttggggaggtcgcaaacttcattgcttacatatttgcgcccggctgtactcgtgactccacttggggcgttaagcataatcgtaagttcagtgttggcgcactttgtgctcaaggagcggcttgagaagctcggggtccttggctgtgtgtcgtgcatagtaggttcagttgttgttgtcatgcatgctcctgaagagcatatgcctaactctgtcaaggaaatctggaacctagctactcaaccagggtttctagcatatgtggtgacagcattgttacttgtgggagcgctagtactcttctttgaacctcgatacggtcagactaacatcctgatatatctgggtatctgctcttcaatgggatcgctaacggtcgttagcatcaaagccattggtgttgccataaagcttacgttggatggggtgaatcaggctgcttatccatacacatggctttttcttatggttgcaattgtttgtggggtttctcaaataaattacctgaacaaggcattggatacctttaatctggctattgtctctcctatatattatgtaatgtttactacccttacaatagtggcaagtggaattatgtttaaggactgggctggtcaaagcttaagtagtattgcttgtgaattatgcggcctgataaccatcctttctgggacaattttgttgcacacagcagaggagggagccaacaattctgcagctttgttgccttggcctttggataaagggtctatatcatggtgtatcaacttaagcagtgacaatcttctaaagaatgtcgaagaggactacttcacagctctgcaaagttcacctgccccagtataatgaagaaactgataaatatctaaaagggaacatgcaaatcaaggtgtaaatcttaacagtgccagaaacctggcagttttgggtgaggngattgtacctg

SEQ ID NO: 15987 - protein, 222 aa, Zea mays subsp. mays
  peptide (1)..(222): Ceres Seq. ID no. 12359604
MHAPEEHMPNSVKEIWNLATQPGFLAYVVTALLLVGALVLFFEPRYGQTNILIYLGICSSMGSLTVVSIKAIGVAIKLTLDGVNQAAYPYTWLFLMVAIVCGVSQINYLNKALDTFNLAIVSPIYYVMFTTLTIVASGIMFKDWAGQSLSSIACELCGLITILSGTILLHTAEEGANNSAALLPWPLDKGSISWCINLSSDNLLKNVEEDYFTALQSSPAPV

SEQ ID NO: 15988 - protein, 215 aa, Zea mays subsp. mays
  peptide (1)..(215): Ceres Seq. ID no. 12359605
MPNSVKEIWNLATQPGFLAYVVTALLLVGALVLFFEPRYGQTNILIYLGICSSMGSLTVVSIKAIGVAIKLTLDGVNQAAYPYTWLFLMVAIVCGVSQINYLNKALDTFNLAIVSPIYYVMFTTLTIVASGIMFKDWAGQSLSSIACELCGLITILSGTILLHTAEEGANNSAALLPWPLDKGSISWCINLSSDNLLKNVEEDYFTALQSSPAPV

SEQ ID NO: 15989 - protein, 185 aa, Zea mays subsp. mays
  peptide (1)..(185): Ceres Seq. ID no. 12359606
RQPGTQSTDGQPAAVVAGAGRIVKDKSDEEERGAGTACAALPCSGRPAPHLSPCPGSLLHHSNLLASFQFDLKRGGRGGRGIGSGDDIWRHQPHSTGTAQHHDDGGGGFRQHQGPGARRRLQRLHRRQLHPQEDRPPASSQVRRPRRWRRTHLPLRASMVGGNDHNAAWGGRKLHCLHICARLYS

SEQ ID NO: 15990 - DNA, 1466 bp, Zea mays subsp. mays
  misc_feature (1)..(1466): Ceres Seq. ID no. 12404987
  misc_feature (1)..(1466): Ortholog of  Ceres SEQ ID NO 15178767 as cited in SEQ ID NO 55317
  misc_feature (1)..(1466): Ortholog of  Ceres SEQ ID NO 13657647 as cited in SEQ ID NO 66399
aaggacagcctcctcgtcccgtcctcccgcgccgccgcgacgaatgggccccaccaccgccgcgccacgctcgcgccgggaactggcgccggaggcccatgtggcggagccggcggcgtgtccatcgacgtcaacggcctgaagcggcgtggcggcgggaggcgctcgtgggtgcgcgtggacgcggcgacgggcgccgcggaggccgtcgaggtcgccaagccggcgttgatgcggcggctggacctgcccgcgcgggacctccgcctcctcgaccccctcttcgtctacccgtccgccatcctaggccgcgagcgcgccgtcgtctgcaacctcgagcacctgcggtgcatcatcaccgccgatgaggcgctcgttctgcgcgaacccgacgccgctgggggcgccgcagcggaggaggccgtgcggaggtacgtcgacgagctgcagcgacgcctcgtcgaccgcgccgacgacctgcctttcgagttcatcgcgctggaggtcgcgctggaggccgcttgctctttcctagactcgcaggctattgaattagaggctgaagcttacccattactagatgagctgacagcaaaaattagtaccctcaatttggaacgagtccgacgcctaaagagcaagctggttgcattgacaaggagagtacagaagagatgagatagagcaactgatggatgacgatggtgatatggctgaaatgtatctcactgagaagaagataagaatggaagcatcaatgttagatgatgaggaccttcagggaattggcaatagtcataatgggtttggttcatctctatcggctccagtttcaccagtttcgacaacccctgcaactcggaggcttgagaaggaattcagttttgccagaagcaggcacagcagcttcaagagctcagatagcagccagtacaatatagaagaactggaaatgttgttggaggcctactttgttgttatcgattacaccctcagcaagttgacttcgctaaaggagtatattgatgacacagaagatttcatcaacatacaactggataacgtccggaaccagctgatccaattcgagctgctcctgaccaccgccacgttcgtggtggccatcttcggggtggtctcgggggttttcggcatgaacttcgaggtccctctgttctcggttccgcacgcgttcgagtggaccctcgccataactggggtctgcggcgccgtcgtattctgctgcttcatctggtacttcaagaagaggaggtttttccccttgtaggtgaaagcttctcttctctcgccctgtcaccagagtccagacagcagcgtacgtatgagactgggtacggcaattgtacatgctgcattgttctcgaaatgcgctgtctgttcacgtgagcttttctccctttttaagctcacgccgctgatcgtgtgtagcttcaccggtctgctgt

SEQ ID NO: 15991 - protein, 225 aa, Zea mays subsp. mays
  peptide (1)..(225): Ceres Seq. ID no. 12404988
KDSLLVPSSRAAATNGPHHRRATLAPGTGAGGPCGGAGGVSIDVNGLKRRGGGRRSWVRVDAATGAAEAVEVAKPALMRRLDLPARDLRLLDPLFVYPSAILGRERAVVCNLEHLRCIITADEALVLREPDAAGGAAAEEAVRRYVDELQRRLVDRADDLPFEFIALEVALEAACSFLDSQAIELEAEAYPLLDELTAKISTLNLERVRRLKSKLVALTRRVQKR

SEQ ID NO: 15992 - protein, 198 aa, Zea mays subsp. mays
  peptide (1)..(198): Ceres Seq. ID no. 12404989
MDDDGDMAEMYLTEKKIRMEASMLDDEDLQGIGNSHNGFGSSLSAPVSPVSTTPATRRLEKEFSFARSRHSSFKSSDSSQYNIEELEMLLEAYFVVIDYTLSKLTSLKEYIDDTEDFINIQLDNVRNQLIQFELLLTTATFVVAIFGVVSGVFGMNFEVPLFSVPHAFEWTLAITGVCGAVVFCCFIWYFKKRRFFPL

SEQ ID NO: 15993 - protein, 192 aa, Zea mays subsp. mays
  peptide (1)..(192): Ceres Seq. ID no. 12404990
MAEMYLTEKKIRMEASMLDDEDLQGIGNSHNGFGSSLSAPVSPVSTTPATRRLEKEFSFARSRHSSFKSSDSSQYNIEELEMLLEAYFVVIDYTLSKLTSLKEYIDDTEDFINIQLDNVRNQLIQFELLLTTATFVVAIFGVVSGVFGMNFEVPLFSVPHAFEWTLAITGVCGAVVFCCFIWYFKKRRFFPL

SEQ ID NO: 15994 - DNA, 1421 bp, Zea mays subsp. mays
  misc_feature (1)..(1421): Ceres Seq. ID no. 12407513
  misc_feature (1)..(1421): Ortholog of  Ceres SEQ ID NO 15176317 as cited in SEQ ID NO 52865
  misc_feature (1)..(1421): Ortholog of  Ceres SEQ ID NO 13518893 as cited in SEQ ID NO 58108
  misc_feature (1)..(1421): Ortholog of  Ceres SEQ ID NO 12617152 as cited in SEQ ID NO 63555
acaaaccataaaccaagaagctgctgcgggacgttcaaatcaaacatctctaccctctccttccagcgaaatggcaagagcggcggctcctccgcctctgcaccggctgcccggtctggccttgctgtgccttgccgtggcagtttgcttctccggcggcgaaaacgccgcggcggcggcctggacgaggaagatagtcggcgttcacgagctcagggtgggggatttctccgtcaaggtcaccaactggggggcgactctcatgtccgtcatcctccccgactccaaagggaacttgggcgacgttgtgctcggctacgacaccgtcgctgaatacgtcaacggcaccgcctacttcggcggtctgatcggccgcgtggccaacagggtcgccggcgcgcggttcacgctggacgggaaagcctaccgcctctaccgcaacgacggcaacaactcgctccacggtggccaccgggggttcagcaaggtcgtatggacggtgaaggagcacgtcggcggcggtgactccccgtacatcacgctctactaccatagcttcgacggggagcaagggttccccggcgacctggacgtgtacgtgacgtaccgtctgtcgcgcccgtacgtgctgagcgtgcgcatgaacgccacggcgcggagcagggccaccccggtgaacctcgcgcaccacgcgtactggaacctcggcggccacggcagcgggcccgtcctcggcgaaacggtgcagctcttcgcgtcgcggtacacgccggtggacgccgcgctcgtgccgacgggcgcgctggcgcccgtggccggcacgccctacgacttccgcgcgccggcgcccgtgggggcgcgcctgggcggacctgcggccgcgccgtggcactggcggcgtcgcgggctacgacaccaactacgccgtggacggcgccgcgtcgccgtcgctgcggccggtggcgcgcgtntgggacggcgccacggggcgggccatggagctgtgggcggaccagcccggggtgcagttctacaccagcaacgggctcgctggcgtcaggggcaagggcggtagcgtgtaccggcggtacgccgcgctgtgcctcgagacgcaggggttccccgatgccgtcaaccacccgagcttcccgtcgcagatcgtgaggccgggcaaggtgtatagccatgacatgctctttaagttctccttcgcctagctacaagactactggtgcatgcggttcatgcgtacacctgcgcagtgctgtgtcaccttgatgtgtcttgattagactcctccgtctactctcaagaactttacatccccaaataacagcgtgctgcccggtacgagctagggttttatatgtatgcgcgggcgcggcttatgctcgataatttccgtctcattggttggccgt

SEQ ID NO: 15995 - protein, 357 aa, Zea mays subsp. mays
  peptide (1)..(357): Ceres Seq. ID no. 12407514
  misc_feature (324)..(324): Xaa is any aa, unknown or other
QTINQEAAAGRSNQTSLPSPSSEMARAAAPPPLHRLPGLALLCLAVAVCFSGGENAAAAAWTRKIVGVHELRVGDFSVKVTNWGATLMSVILPDSKGNLGDVVLGYDTVAEYVNGTAYFGGLIGRVANRVAGARFTLDGKAYRLYRNDGNNSLHGGHRGFSKVVWTVKEHVGGGDSPYITLYYHSFDGEQGFPGDLDVYVTYRLSRPYVLSVRMNATARSRATPVNLAHHAYWNLGGHGSGPVLGETVQLFASRYTPVDAALVPTGALAPVAGTPYDFRAPAPVGARLGGPAAAPWHWRRRGLRHQLRRGRRRVAVAAAGGARXGRRHGAGHGAVGGPARGAVLHQQRARWRQGQGR

SEQ ID NO: 15996 - protein, 334 aa, Zea mays subsp. mays
  peptide (1)..(334): Ceres Seq. ID no. 12407515
  misc_feature (301)..(301): Xaa is any aa, unknown or other
MARAAAPPPLHRLPGLALLCLAVAVCFSGGENAAAAAWTRKIVGVHELRVGDFSVKVTNWGATLMSVILPDSKGNLGDVVLGYDTVAEYVNGTAYFGGLIGRVANRVAGARFTLDGKAYRLYRNDGNNSLHGGHRGFSKVVWTVKEHVGGGDSPYITLYYHSFDGEQGFPGDLDVYVTYRLSRPYVLSVRMNATARSRATPVNLAHHAYWNLGGHGSGPVLGETVQLFASRYTPVDAALVPTGALAPVAGTPYDFRAPAPVGARLGGPAAAPWHWRRRGLRHQLRRGRRRVAVAAAGGARXGRRHGAGHGAVGGPARGAVLHQQRARWRQGQGR

SEQ ID NO: 15997 - protein, 270 aa, Zea mays subsp. mays
  peptide (1)..(270): Ceres Seq. ID no. 12407516
  misc_feature (237)..(237): Xaa is any aa, unknown or other
MSVILPDSKGNLGDVVLGYDTVAEYVNGTAYFGGLIGRVANRVAGARFTLDGKAYRLYRNDGNNSLHGGHRGFSKVVWTVKEHVGGGDSPYITLYYHSFDGEQGFPGDLDVYVTYRLSRPYVLSVRMNATARSRATPVNLAHHAYWNLGGHGSGPVLGETVQLFASRYTPVDAALVPTGALAPVAGTPYDFRAPAPVGARLGGPAAAPWHWRRRGLRHQLRRGRRRVAVAAAGGARXGRRHGAGHGAVGGPARGAVLHQQRARWRQGQGR

SEQ ID NO: 15998 - DNA, 1067 bp, Zea mays subsp. mays
  misc_feature (1)..(1067): Ceres Seq. ID no. 12406572
  misc_feature (1)..(1067): Ortholog of  Ceres SEQ ID NO 14306675 as cited in SEQ ID NO 52939
  misc_feature (1)..(1067): Ortholog of  Ceres SEQ ID NO 12608114 as cited in SEQ ID NO 57218
  misc_feature (1)..(1067): Ortholog of  Ceres SEQ ID NO 12625980 as cited in SEQ ID NO 65586
actcccggcctcccctcccttgccgtccacttcttcctccaccacagtcatcagtggcgttatcctcttcgttctcgcctccctggttgttgttggctgggtgttggcgagctgggagtagagaccgagaagtggagcggccatgaagatccagtgcgacgcgtgcgagggcgcggctgccacggtggtgtgctgcgccgacgaggccgcgctgtgcgcgcgctgcgacgtcgagatccacgccgccaacaagctcgccagcaagcaccagcgcctcccgctcgaggcgctctccgccaagctcccgcgctgcgacgtctgccaggagaaagcggcgttcatcttctgcgtggaggaccgggcgctcttctgccaggactgcgacgagcccatccacgtcccgggcacgctctccgggaaccaccagcgctacctggccaccggcatccgcgtcggcctcgcctcggcttccgcctgcagcgacgcctgcgacgcccacgactccgaccaccacgccccgcccaaggccaccatcgagccaccgcacgccgccgtctccgccgcggtgcagcaggtgccctcgccgccgcagttcctgccgcagggctgggccgtcgacgagctcctgcagttctccgactacgagtccagcgacaagctgcacaaggagccgacgctcgggttcaaggagctggagtggttcgccgacatcgacctcttccacgagcaggcgcccaaagccagcaggacgttggcggaggtgccggagcttttcggataccaggcggcgaacgacgcggcgtactacaggccggccaaagccgccggcggcggcggcgccggggttcgccagagcaagaaggcccggatcgaggtcaccgacgacgaggactaccttatagtccctgatcttggttaaataagagagcgcaggagttttgtttcttctcctgatgtgtaccagagaagaattttactgtgtacaagctagtgtcatgtgttgtgcatctttgactgtagtgtcgctcaattctgaacatctattaagccacttttgttgctatgcc

SEQ ID NO: 15999 - protein, 302 aa, Zea mays subsp. mays
  peptide (1)..(302): Ceres Seq. ID no. 12406573
TPGLPSLAVHFFLHHSHQWRYPLRSRLPGCCWLGVGELGVETEKWSGHEDPVRRVRGRGCHGGVLRRRGRAVRALRRRDPRRQQARQQAPAPPARGALRQAPALRRLPGESGVHLLRGGPGALLPGLRRAHPRPGHALREPPALPGHRHPRRPRLGFRLQRRLRRPRLRPPRPAQGHHRATARRRLRRGAAGALAAAVPAAGLGRRRAPAVLRLRVQRQAAQGADARVQGAGVVRRHRPLPRAGAQSQQDVGGGAGAFRIPGGERRGVLQAGQSRRRRRRRGSPEQEGPDRGHRRRGLPYSP

SEQ ID NO: 16000 - protein, 258 aa, Zea mays subsp. mays
  peptide (1)..(258): Ceres Seq. ID no. 12406574
MKIQCDACEGAAATVVCCADEAALCARCDVEIHAANKLASKHQRLPLEALSAKLPRCDVCQEKAAFIFCVEDRALFCQDCDEPIHVPGTLSGNHQRYLATGIRVGLASASACSDACDAHDSDHHAPPKATIEPPHAAVSAAVQQVPSPPQFLPQGWAVDELLQFSDYESSDKLHKEPTLGFKELEWFADIDLFHEQAPKASRTLAEVPELFGYQAANDAAYYRPAKAAGGGGAGVRQSKKARIEVTDDEDYLIVPDLG

SEQ ID NO: 16001 - DNA, 2011 bp, Zea mays subsp. mays
  misc_feature (1)..(2011): Ceres Seq. ID no. 12358730
  misc_feature (1)..(2011): Ortholog of  Ceres SEQ ID NO 13657873 as cited in SEQ ID NO 66361
ctctttcgatagctggcgaaggcgcggcgcgcagggccagtagcaaccctcccatggcctacgctgcgcctcccatggcgtcgtccctcaccgcctcccacccccctctttccccgtcccacctcataacccatccgcatcgctgccctgcgcgccccaaccccaccaccggcctcctccgcctcaccccgtctcgccgccgcggtcgtccccccgtggccgtccgcctcgcaatatctgcctcgtccacctcagccccgcccccgtcggcggatcggtcggaggccgcgtcgtcgctggagagatacctctcggcgacggtgacgggagcggtgatgggaacgggggcggccccaccagcttcggccccgccgcgcgccccgccggcgatgaaggggggacggaagcagtatagcgcgttgggggctgtcacgctcgagaaggccaagctcgatctctcccagcgccgcaagaatatcatgcccgagttggcgacaggtggtggtggtggagatattggaaaaaggatcggtcatggtgggggtgatggtggtgatgatgatggtgacgatgatgactactttgatgattttgatgagggagaggaagaaggtgggcttttcaggaggcgaattgttgtacaagagctattcaatagggagttcgtagaagctgtgttgcaagaatggtacaagacgatgagtgatttgcctaccggtcttcgccaagcttgtgagatgggtttggtgagttctgcacagatggtacgttacttgtcaatatttgcaagacctacaaacgctaggtccttctcaagagctcttccaggctggctttccagaggtcttgttggaaggacacttgcagatccatcattcccacataaaatgtctttggagtttatagctaccattgcgtcatctatttggtgtgaaatgaatattcgcaaagagaggtttaaacaagaatgggatttggtgattgttaatgctttgactgcagcttgttgcaacttgatggttcttggacttttagcaccatgccgttcatatgcgagtacatctcgatttgacttccaaaatgcaattgagaaacttccgaacaacatatttgagaagagctatcctttgagagagtttgatctagcaaaacgaatcagtgcattcttttataaagctgctgagcttagtctggtcgggtttgtagctggctctgtgcaagggggtatgtcaatagtcttgtccgcaagaaaagaaaggaggttatcggtgactattccctctatcagcaccaatgctcttggttatggagctttcctaggactctatgctaacttgcgttatcaattgctatgtggagtagaccaatatatggtcaagcgcttcgatgttttgggtgtggcaatcttcttcagcacagcagcaagactgatgaatattcagattggtgaggcatcaaggaggacttggcttggcgaggaagctgatccacagtactcagatcgactgttgagagcatacaagagacctgtggaggttgacgcggaccaatcaaggtggtttatatccaaggatgcaattgtatctggccttggtcttctaggtatcaagcagggtggacctgaggcaacattttctaagtctcgtcgaaagagagtcatccgcaaaaaggtcacttcaggttgagtttagtggatttggatagcaatgctggaacaattttgcttctgttccactatgccagagggaggtctacccaaattatggtaaatgagaaaaaggtatcaagtcaaccagcacgtggtctgtcggcgaagggatcaaagggtttgttactgggaagggttagttaaaaggtgccaattactattttataatttaattgcagttatttaaggtaagaaaatatgttgttttcttgtattgctgtgaggcaaatagacacgcttagtggtagttttgtaagattgttaatgtactgactttacatgagaaatggattctgcattttt

SEQ ID NO: 16002 - protein, 560 aa, Zea mays subsp. mays
  peptide (1)..(560): Ceres Seq. ID no. 12358731
LSIAGEGAARRASSNPPMAYAAPPMASSLTASHPPLSPSHLITHPHRCPARPNPTTGLLRLTPSRRRGRPPVAVRLAISASSTSAPPPSADRSEAASSLERYLSATVTGAVMGTGAAPPASAPPRAPPAMKGGRKQYSALGAVTLEKAKLDLSQRRKNIMPELATGGGGGDIGKRIGHGGGDGGDDDGDDDDYFDDFDEGEEEGGLFRRRIVVQELFNREFVEAVLQEWYKTMSDLPTGLRQACEMGLVSSAQMVRYLSIFARPTNARSFSRALPGWLSRGLVGRTLADPSFPHKMSLEFIATIASSIWCEMNIRKERFKQEWDLVIVNALTAACCNLMVLGLLAPCRSYASTSRFDFQNAIEKLPNNIFEKSYPLREFDLAKRISAFFYKAAELSLVGFVAGSVQGGMSIVLSARKERRLSVTIPSISTNALGYGAFLGLYANLRYQLLCGVDQYMVKRFDVLGVAIFFSTAARLMNIQIGEASRRTWLGEEADPQYSDRLLRAYKRPVEVDADQSRWFISKDAIVSGLGLLGIKQGGPEATFSKSRRKRVIRKKVTSG

SEQ ID NO: 16003 - protein, 543 aa, Zea mays subsp. mays
  peptide (1)..(543): Ceres Seq. ID no. 12358732
MAYAAPPMASSLTASHPPLSPSHLITHPHRCPARPNPTTGLLRLTPSRRRGRPPVAVRLAISASSTSAPPPSADRSEAASSLERYLSATVTGAVMGTGAAPPASAPPRAPPAMKGGRKQYSALGAVTLEKAKLDLSQRRKNIMPELATGGGGGDIGKRIGHGGGDGGDDDGDDDDYFDDFDEGEEEGGLFRRRIVVQELFNREFVEAVLQEWYKTMSDLPTGLRQACEMGLVSSAQMVRYLSIFARPTNARSFSRALPGWLSRGLVGRTLADPSFPHKMSLEFIATIASSIWCEMNIRKERFKQEWDLVIVNALTAACCNLMVLGLLAPCRSYASTSRFDFQNAIEKLPNNIFEKSYPLREFDLAKRISAFFYKAAELSLVGFVAGSVQGGMSIVLSARKERRLSVTIPSISTNALGYGAFLGLYANLRYQLLCGVDQYMVKRFDVLGVAIFFSTAARLMNIQIGEASRRTWLGEEADPQYSDRLLRAYKRPVEVDADQSRWFISKDAIVSGLGLLGIKQGGPEATFSKSRRKRVIRKKVTSG

SEQ ID NO: 16004 - protein, 536 aa, Zea mays subsp. mays
  peptide (1)..(536): Ceres Seq. ID no. 12358733
MASSLTASHPPLSPSHLITHPHRCPARPNPTTGLLRLTPSRRRGRPPVAVRLAISASSTSAPPPSADRSEAASSLERYLSATVTGAVMGTGAAPPASAPPRAPPAMKGGRKQYSALGAVTLEKAKLDLSQRRKNIMPELATGGGGGDIGKRIGHGGGDGGDDDGDDDDYFDDFDEGEEEGGLFRRRIVVQELFNREFVEAVLQEWYKTMSDLPTGLRQACEMGLVSSAQMVRYLSIFARPTNARSFSRALPGWLSRGLVGRTLADPSFPHKMSLEFIATIASSIWCEMNIRKERFKQEWDLVIVNALTAACCNLMVLGLLAPCRSYASTSRFDFQNAIEKLPNNIFEKSYPLREFDLAKRISAFFYKAAELSLVGFVAGSVQGGMSIVLSARKERRLSVTIPSISTNALGYGAFLGLYANLRYQLLCGVDQYMVKRFDVLGVAIFFSTAARLMNIQIGEASRRTWLGEEADPQYSDRLLRAYKRPVEVDADQSRWFISKDAIVSGLGLLGIKQGGPEATFSKSRRKRVIRKKVTSG

SEQ ID NO: 16005 - DNA, 1864 bp, Zea mays subsp. mays
  misc_feature (1)..(1864): Ceres Seq. ID no. 12407509
  misc_feature (1)..(1864): Ortholog of  Ceres SEQ ID NO 15226529 as cited in SEQ ID NO 55005
  misc_feature (1)..(1864): Ortholog of  Ceres SEQ ID NO 13657707 as cited in SEQ ID NO 66407
  misc_feature (1)..(1864): Ortholog of  Ceres SEQ ID NO 12616225 as cited in SEQ ID NO 68930
accaacccacacccgttccgtttctggcgcacagcacagtcacagtgctcggcatcttttccgctccgctctgacgctctcccactcccccacagtcccacgccctccagtcaaagcaagccgctgcttggccggccgggaaggctcggtcgcagcgccgaggaatggcggccaagccggtcaccgtcggcgacctcatccaccgcgtcgcctcttcctgcctctccaaccgcctgccgtgcaaccacaccttccgcgactccgtggacagcgactttgacgacgacgacgacgacgacgaccccttcgccgacgccgtctccagcagcgagaaatgccagcggtccccgcccgctgcggaggtcgaggaagaggaggaggaggacgagaagctcaagatctgggaggagagggagcaggagaaggagaggctggccgccgcgtccaagggcgccgagcgcgcccgcgacgcggacgcgctgatggcggaggtgttcgacgccgtctccggggtgcgccgcgcctacgccgcgctccaggacgcgcactgcccctgggaccccgacaagatgcggaccgcggacgcggccgtggtcgccgagctccgccacctcgcgcgcctccgcgaccgcttccgccgctccgcagccgtgggccacatcccgcgcccgaaaccgtccgcgccgccgctgcgcgaggccgtggcgccgtacgaggcggcgctcgacgacctccagcgccagctccagtccaggcaggccgaggtggacgcgctcaaagagaagctcgcggcggccaccagccgccgcaacgggcgccaccaccacgtcccgccctccaagcagaacggcggcgcgccgacggcggagctcttcaccacctgcgccgagcaagcccgcgcggcgacgcgggccttcgcggggcacctcgcgcacctgatgcgcgcggcggggctggagctcgcggcggccacccggtcgctcaccaagatcccggtgtcctccccgcagctggccaagcacgcgctggaggcgcacgccacgcgcgccctcctcggcggcttcgagcacgagtccttctacctggacggctccctctcgtcgctgctggaccccgccgcgttccggcgggagcggtacgcgcagttccgggacatgcgcgggatggagcccgcggagctgctgggcgtgctcccgacctgcgccttcggccgctacgccgccgccaagttcgcggcgctcctgccgccgcgcgtggaggaggccgtcctgggcgacgccgagcaccggagggtggtcaacgccggcgcccacccgcggacgcccttctacggggagttcctgcgcgcggccaaggccgtgtggatgctgcacctgctagccttcgcgctggagccgccgcccagccacttcgatgccggacgcggtgcggagttccaccaggagtacatggagagcgtgaccggcgcgccaccgcacggcggcgcgggcctggtcgtcgggttcgccgtcgcgcccgggttccggctggggaacggcgccgtcgtgcgcgcccgggtctacctggtgccgcgtggtggccgaccgtgacagacccatgcatggcgtgacagaccgcgtggtagcgttgcatagcgccgcggcccacggatcacctccgagagttgttggtgggtgccaatgcgcaccctgctggagcctggagctggacctgcggagtagctgctggctggctgcgttggtgaagaacagacaaaggctcatagctactgtactagtggctccgtagattttatttcattttacttctccttgttaatctcaaaaaaagtaataatcgccatgtgtaagaggactttgaattt

SEQ ID NO: 16006 - protein, 474 aa, Zea mays subsp. mays
  peptide (1)..(474): Ceres Seq. ID no. 12407510
MAAKPVTVGDLIHRVASSCLSNRLPCNHTFRDSVDSDFDDDDDDDDPFADAVSSSEKCQRSPPAAEVEEEEEEDEKLKIWEEREQEKERLAAASKGAERARDADALMAEVFDAVSGVRRAYAALQDAHCPWDPDKMRTADAAVVAELRHLARLRDRFRRSAAVGHIPRPKPSAPPLREAVAPYEAALDDLQRQLQSRQAEVDALKEKLAAATSRRNGRHHHVPPSKQNGGAPTAELFTTCAEQARAATRAFAGHLAHLMRAAGLELAAATRSLTKIPVSSPQLAKHALEAHATRALLGGFEHESFYLDGSLSSLLDPAAFRRERYAQFRDMRGMEPAELLGVLPTCAFGRYAAAKFAALLPPRVEEAVLGDAEHRRVVNAGAHPRTPFYGEFLRAAKAVWMLHLLAFALEPPPSHFDAGRGAEFHQEYMESVTGAPPHGGAGLVVGFAVAPGFRLGNGAVVRARVYLVPRGGRP

SEQ ID NO: 16007 - protein, 424 aa, Zea mays subsp. mays
  peptide (1)..(424): Ceres Seq. ID no. 12407511
MPAVPARCGGRGRGGGGREAQDLGGEGAGEGEAGRRVQGRRARPRRGRADGGGVRRRLRGAPRLRRAPGRALPLGPRQDADRGRGRGRRAPPPRAPPRPLPPLRSRGPHPAPETVRAAAARGRGAVRGGARRPPAPAPVQAGRGGRAQREARGGHQPPQRAPPPRPALQAERRRADGGALHHLRRASPRGDAGLRGAPRAPDARGGAGARGGHPVAHQDPGVLPAAGQARAGGARHARPPRRLRARVLLPGRLPLVAAGPRRVPAGAVRAVPGHARDGARGAAGRAPDLRLRPLRRRQVRGAPAAARGGGRPGRRRAPEGGQRRRPPADALLRGVPARGQGRVDAAPASLRAGAAAQPLRCRTRCGVPPGVHGERDRRATARRRGPGRRVRRRARVPAGERRRRARPGLPGAAWWPTVTDPCMA

SEQ ID NO: 16008 - protein, 368 aa, Zea mays subsp. mays
  peptide (1)..(368): Ceres Seq. ID no. 12407512
MAEVFDAVSGVRRAYAALQDAHCPWDPDKMRTADAAVVAELRHLARLRDRFRRSAAVGHIPRPKPSAPPLREAVAPYEAALDDLQRQLQSRQAEVDALKEKLAAATSRRNGRHHHVPPSKQNGGAPTAELFTTCAEQARAATRAFAGHLAHLMRAAGLELAAATRSLTKIPVSSPQLAKHALEAHATRALLGGFEHESFYLDGSLSSLLDPAAFRRERYAQFRDMRGMEPAELLGVLPTCAFGRYAAAKFAALLPPRVEEAVLGDAEHRRVVNAGAHPRTPFYGEFLRAAKAVWMLHLLAFALEPPPSHFDAGRGAEFHQEYMESVTGAPPHGGAGLVVGFAVAPGFRLGNGAVVRARVYLVPRGGRP

SEQ ID NO: 16009 - DNA, 1477 bp, Zea mays subsp. mays
  misc_feature (1)..(1477): Ceres Seq. ID no. 13498367
  misc_feature (1)..(1477): Ortholog of  Ceres SEQ ID NO 14304245 as cited in SEQ ID NO 53346
aatcgaaaaattttcgagctcaagctcaatcacttcggattggcggcgggcacgcgccggacgaaatggaagcggcaccatccgcccgcgccttctccccgtcctcgtctccctccgcgggggctagacccagccttcccctcgcgggcctggnctcgcgctcgcggcgcgcccgggtgctcgcggcgccgcccccgccccgcgccgtcgcctcctcccgcgcgccgctggtggtctccagcccgccaccgccnnaggactccggcacgcacaaccccgcgcacgccaaggtcgaccgctccggccgcttctgcagcccccgcgccgcacgggaactcgcgctgtgagtcccggcgtttccccagcttcagctcctacatacttcggtttctcttcttctgtgctgcgttggagttgggcttcggctgtggttctttgctgctggaggtgaaccgctacttccgcgtctcgtgtcgcaggatgatttcctacgccgcgtgtctggagggaaccgatgtcgtccggctcttcgatcgcaggatcagcgcaagacgagaacccgggtttgttttcaacaaggcatgcctattgagttacaaccatatgagctttggcgggggaccgctcgaggttggaacggaggaggaggctgagaagctggccagtcagaacgataaggattcagccaacgaagcagatgtactttcagctcctccaaaacttgtttacaacaactatgtattacggctgtccagggaacttttagtggctgttgccagtggatgggataagcatgtggttatcatcgacaaaataattccccaggcttggaaggatgaacctgtggcaaggattcttgagctctgcattctacatattgctatggctgagatgacatcaaaaggaacaccccacaaagttgtcattaatgaggcagtagatctggcaaagcgattttgtgatggtggtgcccctcgggtaatcaacggatgccttcgaacatttgtgaaggatcatgttgatgttgcaggcacgagccaggaagctaaatcaaaatcatgattttttgcaaatactcatacaacaaaatggtggctgaagtaaagaagtacggagaaaaccttgctgtcttgagttcaggcgaataccttctgtctccaaggtttagccttcaacctaagggaatctaaaaggtaaacatgatggactcatcaaggagccacaacacgttcattcttttagaatgttcggttattaggtgaagtatacagagctgtaaactggtgatgcacattcatgcttcatctaaaacaaccgaaggttatggcttctgatagcggatagcctactcgacgcagatcgttaaatgatcagatattaagatgaccaggagttgtgtaaaagcttgatgcacatgtaaaatgttatatatacttggcattggctcattgcaatgggagaaggatattctagtttc

SEQ ID NO: 16010 - protein, 353 aa, Zea mays subsp. mays
  peptide (1)..(353): Ceres Seq. ID no. 13498368
  misc_feature (52)..(52): Xaa is any aa, unknown or other
  misc_feature (85)..(85): Xaa is any aa, unknown or other
NRKIFELKLNHFGLAAGTRRTKWKRHHPPAPSPRPRLPPRGLDPAFPSRAWXRARGAPGCSRRRPRPAPSPPPARRWWSPARHRXRTPARTTPRTPRSTAPAASAAPAPHGNSRCESRRFPSFSSYILRFLFFCAALELGFGCGSLLLEVNRYFRVSCRRMISYAACLEGTDVVRLFDRRISARREPGFVFNKACLLSYNHMSFGGGPLEVGTEEEAEKLASQNDKDSANEADVLSAPPKLVYNNYVLRLSRELLVAVASGWDKHVVIIDKIIPQAWKDEPVARILELCILHIAMAEMTSKGTPHKVVINEAVDLAKRFCDGGAPRVINGCLRTFVKDHVDVAGTSQEAKSKS

SEQ ID NO: 16011 - protein, 193 aa, Zea mays subsp. mays
  peptide (1)..(193): Ceres Seq. ID no. 13498369
MISYAACLEGTDVVRLFDRRISARREPGFVFNKACLLSYNHMSFGGGPLEVGTEEEAEKLASQNDKDSANEADVLSAPPKLVYNNYVLRLSRELLVAVASGWDKHVVIIDKIIPQAWKDEPVARILELCILHIAMAEMTSKGTPHKVVINEAVDLAKRFCDGGAPRVINGCLRTFVKDHVDVAGTSQEAKSKS

SEQ ID NO: 16012 - DNA, 1989 bp, Zea mays subsp. mays
  misc_feature (1)..(1989): Ceres Seq. ID no. 12405971
  misc_feature (1)..(1989): Ortholog of  Ceres SEQ ID NO 15226659 as cited in SEQ ID NO 60052
  misc_feature (1)..(1989): Ortholog of  Ceres SEQ ID NO 14301518 as cited in SEQ ID NO 69156
gcacgagaccttacctagaacatcctaatcgaaaaggaaacatctcgtcgacccaaacccatccacccacaaggcggaatacacgatccagtccgatcctcgccccgcgcgctgctccaaaccctggcgatgtcgacggcggcggccgcgaagactccgatcaaggccctgggctccgcggccgcgggtgccatgactccgaccaaatctcagccccccgcggcggccaagacgccctgtacctctcgcgcgcggtcctcccacgcatccgagaattccaaccccaacatcccgggcacgccgcctcccccgcagtcgacgccgtccaagcccagcctgaactccccggcgggcgcgggagccaggtccgccaccgcgaagaaaaagccctccacgcccgcgcccgccgcgccaccgctggagcgggagcggcgattcctcgtggcgaagaagggcgcgcggcggaggcgcaacgtcgggaccatgggacgcggcgggggcggccgcgggggagagatcgacttcgacaagtgccgcgaggcccgctcgcgaggcgctacgcgcgtcgcagggggagttcttccgcaaggagctcgccgcatccacagccaccggagaggatcaattgggacaggaggaggaggggaagccgctggctgaagaggatgtgaaaggtggagcattcgaggagcggcaggaggaggagaccgacgcggagctggaggggagcagcaaggttagggcgatgaggacgaaggcgatggctaaggcgatgagcagcgttccgaatcctggctctggccgcgtcaagcacatggtgcaggccttcgagagcctgctcaacatctccggcgccacctccgacgctgaaagggccggtgagggctcatgggcgctgcccgggttgcagctatggaaggaggatgataagggtgatctggggttcccaccagtgtcggtgttctcttctgctgatttccagaatgcagggtctaatcgactctgctcgtcactagatggaaacaccgtcaggtcgagctgggacagcagaacatcgactggcgagtgcagcaggagaaattcatctgagtcactaaggagaagaacatcggctggcggggcgcagaagcaggagaaactcatctgagtcactaaggagcagctggaacaaaaagctcaaggtcaccagccagcatccattcaagttgaggacagagcaaaggggaaagtttaaggaacagcagttcgtccaaaaggtgcaagagatgcttgcagaggaagagaagaagcgtattcatattgcgcaaggattgccatggactaccgatgaacccgagtgcttgataaagcctgcagtcaaagaaagaactgagcctatagaccttgttttgcatagcgatgtgcgtgctcttgaacgtgcagaatttgatcagcatgttttggataggaacaagttcgctgagcaacaaagattagaatgggaaaggcaacaggaattagacgaacaagaaaggataaggcaactgaggagaaccgagctgattcctaaagctcagcccatgccatactttgaccgcccattcatccccaaaaggtccacaaaacctgctacagttcccatggaaccgaaattctacctcaggccagaaaagctatcctgttactatcgacagcaatgtatggagcttggaaagctgaatccacaacatcagtgccaacatccgctcgcaatcgagaaatgcagagcatcgacacacatgatcaaacaactgtttccatttcctggcatcgtcttattcattcttgattcgtcttcttccatgtgcgaagaaattgctatcaagcgtgtttttgtagctttgcttggatcgccttgcctccaagttctgttaatcgctggctctgtgcttcagatgcaatcccaccgaggtttgaaatttgtcgttcaagaaactgataaggaaattcaaggatgaattttctgtggtc

SEQ ID NO: 16013 - protein, 236 aa, Zea mays subsp. mays
  peptide (1)..(236): Ceres Seq. ID no. 12405972
MLAEEEKKRIHIAQGLPWTTDEPECLIKPAVKERTEPIDLVLHSDVRALERAEFDQHVLDRNKFAEQQRLEWERQQELDEQERIRQLRRTELIPKAQPMPYFDRPFIPKRSTKPATVPMEPKFYLRPEKLSCYYRQQCMELGKLNPQHQCQHPLAIEKCRASTHMIKQLFPFPGIVLFILDSSSSMCEEIAIKRVFVALLGSPCLQVLLIAGSVLQMQSHRGLKFVVQETDKEIQG

SEQ ID NO: 16014 - protein, 222 aa, Zea mays subsp. mays
  peptide (1)..(222): Ceres Seq. ID no. 12405973
TRPYLEHPNRKGNISSTQTHPPTRRNTRSSPILAPRAAPNPGDVDGGGREDSDQGPGLRGRGCHDSDQISAPRGGQDALYLSRAVLPRIREFQPQHPGHAASPAVDAVQAQPELPGGRGSQVRHREEKALHARARRATAGAGAAIPRGEEGRAAEAQRRDHGTRRGRPRGRDRLRQVPRGPLARRYARRRGSSSARSSPHPQPPERINWDRRRRGSRWLKRM

SEQ ID NO: 16015 - protein, 176 aa, Zea mays subsp. mays
  peptide (1)..(176): Ceres Seq. ID no. 12405974
MSTAAAAKTPIKALGSAAAGAMTPTKSQPPAAAKTPCTSRARSSHASENSNPNIPGTPPPPQSTPSKPSLNSPAGAGARSATAKKKPSTPAPAAPPLERERRFLVAKKGARRRRNVGTMGRGGGGRGGEIDFDKCREARSRGATRVAGGVLPQGARRIHSHRRGSIGTGGGGEAAG

SEQ ID NO: 16016 - DNA, 1396 bp, Zea mays subsp. mays
  misc_feature (1)..(1396): Ceres Seq. ID no. 12376528
  misc_feature (1)..(1396): Ortholog of  Ceres SEQ ID NO 15175677 as cited in SEQ ID NO 55728
  misc_feature (1)..(1396): Ortholog of  Ceres SEQ ID NO 14308152 as cited in SEQ ID NO 59018
caaacccacctcgcctcctagtcccccccttcgccttctctcccgagtcccatcggagcccggagctctctcgcctcccgcgaggctgtgtggtgaggcgcggacgagatgaacgagcaggggctcggtggtctcggcgggggccgcggggccgtgcaggggcacgggcgggaggcgatggcgctcttgcagcaccagcagcttcaacagcaacggcggcagctggaggaggaggatgaggtgcggcgccagatgttcggcggggtggcggcgttcccggcagcgctgggccacggccagcaggtggactacggggaggacgccggcgggctcggggacagcgacgcgggcgggtcggagcccgagccaccaccggagcggacgcgcggggggtccggcggcggcggcaagcggagccgcgctgccgaggtgcacaacctctccgagaagaggaggaagagcaagatcaacgagaagatgaaagcgctgcagagcctgatacccaactccaacaagaccgacaaggcatccatgcttgacgaggccattgagtatctgaagcaactgcagctccaagtgcagatgctgtctatgagaaatggtgtttacttgaaccctccatatttgtctggcacaattgagcctgcacaagcatcacaaatgtttgctgcagttggtgggggcaacattacagcgtcaagctctggggcagtgatgccaccagtaaaccaaagttcaggacttcaagtatttgatccattaaatcctccacgagaccaaccactgtcttttgtattaccaaatgtagacaaaaccattcaagaagctccctttcacttggaatcatcgcagttccaccctcgaccatttcgaatgcctgaatcttctgagatgatgcttccaggtgaggtagtggcaaagcaccagctaacttcaattcaaggaagagttagtatgccaggaattggtatgaaccccattaggcaagaatcatccactgtaaaagctgatcagtttgatggttgctcacataacaaagagtgactacaagatatggtgccacaaaatgcatgaaagttcaggacagcttaggaaatggcaaccgatgaggaccgaaggcaggatgacacagttcagtaacccagctgacagcctggcacgcaggcttcccctttattttcctctgttactgcaatagtaacttaaatttttaggcttcccctttattttcctctgttactgcaatagtaacttaattttttttaggcttcacctttcctttttgtttgaaaattagcagggcagtattaattaatagtacaaaaccatgtatcagcaagatttcaggggttgaaacttgaaatgccaatattcaccaagctttcgtttttttttc

SEQ ID NO: 16017 - protein, 311 aa, Zea mays subsp. mays
  peptide (1)..(311): Ceres Seq. ID no. 12376529
MNEQGLGGLGGGRGAVQGHGREAMALLQHQQLQQQRRQLEEEDEVRRQMFGGVAAFPAALGHGQQVDYGEDAGGLGDSDAGGSEPEPPPERTRGGSGGGGKRSRAAEVHNLSEKRRKSKINEKMKALQSLIPNSNKTDKASMLDEAIEYLKQLQLQVQMLSMRNGVYLNPPYLSGTIEPAQASQMFAAVGGGNITASSSGAVMPPVNQSSGLQVFDPLNPPRDQPLSFVLPNVDKTIQEAPFHLESSQFHPRPFRMPESSEMMLPGEVVAKHQLTSIQGRVSMPGIGMNPIRQESSTVKADQFDGCSHNKE

SEQ ID NO: 16018 - protein, 288 aa, Zea mays subsp. mays
  peptide (1)..(288): Ceres Seq. ID no. 12376530
MALLQHQQLQQQRRQLEEEDEVRRQMFGGVAAFPAALGHGQQVDYGEDAGGLGDSDAGGSEPEPPPERTRGGSGGGGKRSRAAEVHNLSEKRRKSKINEKMKALQSLIPNSNKTDKASMLDEAIEYLKQLQLQVQMLSMRNGVYLNPPYLSGTIEPAQASQMFAAVGGGNITASSSGAVMPPVNQSSGLQVFDPLNPPRDQPLSFVLPNVDKTIQEAPFHLESSQFHPRPFRMPESSEMMLPGEVVAKHQLTSIQGRVSMPGIGMNPIRQESSTVKADQFDGCSHNKE

SEQ ID NO: 16019 - protein, 263 aa, Zea mays subsp. mays
  peptide (1)..(263): Ceres Seq. ID no. 12376531
MFGGVAAFPAALGHGQQVDYGEDAGGLGDSDAGGSEPEPPPERTRGGSGGGGKRSRAAEVHNLSEKRRKSKINEKMKALQSLIPNSNKTDKASMLDEAIEYLKQLQLQVQMLSMRNGVYLNPPYLSGTIEPAQASQMFAAVGGGNITASSSGAVMPPVNQSSGLQVFDPLNPPRDQPLSFVLPNVDKTIQEAPFHLESSQFHPRPFRMPESSEMMLPGEVVAKHQLTSIQGRVSMPGIGMNPIRQESSTVKADQFDGCSHNKE

SEQ ID NO: 16020 - DNA, 1795 bp, Zea mays subsp. mays
  misc_feature (1)..(1795): Ceres Seq. ID no. 12366666
  misc_feature (1)..(1795): Ortholog of  Ceres SEQ ID NO 13595916 as cited in SEQ ID NO 69273
agtttttccctgtctgtcttcacttcatgtgtctttgtttagagaccttgccttgttggggcaggggacttgggacgacagagaggggagggcggagttggtgagcgagcacgggatcagctggtgacctcagaggctgtttgcctcggggggcgggggaattctttagcaccccatcttccacatgtctttcgactggctgctgctctttcggttggtaatatccttggatctctgactctagaccgttccacgaaatctccagtcctttcttcctcttggaggaggagggctgcggcttgagcaggagacgggagacatgggtagcttcgttaagctggcgaggagggcggtggagacggacgcgccggtcatggtcaagatacaagaactgcttcgaggggccaaggatgtcatgtcgcttgcgcagggagttgtttactggcaacctcctgagtcagcaatggctaaggtcgaaaaaataattagggaaccaacgcttagtaaatatggctctgatgatggtcttcccgagcttcgagaagcacttcttgaaaagttacgcagagagaataagcttactaagtcatcagttatggtcactgctggtgcaaatcaagcttttgtgaacttggtcctcactctttgcgatgctggtgattctgttgtcatgtttgcaccatattatttcaatgcctacatgtcattccagatgacaggtgttactgacatattagttggtggttctgatcacaagacacttcatcctgatgttgattggttggagaaggttctgaaagaaaatgaccctatccctaaacttgttaccgttgtgaatccggggaacccctctggagcttttattcccaggcctatgcttgagaggatttcagatctgtgcaaaaacgctggtgcatggcttgtggttgacaatacctatgaatactttatgtatgatggaatgaagcactattgcttagaaggcactcatattgtcaacctcttctcattctcaaaggcttatggaatgatggggtggcgtgtaggatacatcgcatttccaaacgaagtcgatggcttccacgaccagctcctcaaagtgcaggacaacatacccatctgcgcctccatcatcgggcagcgcctggcgctctactcgctggaggccggccccgagtggatcaaagaaagggtgagagacctggtgaaaaaccgcgcgctgctcgtggacgcgctgtccccgctcggtgacggcaacgtcaggggcgggcagggcgccatctacctctgggcgaagctgccggacacctgctccgacgatttcgaggtcgtcaggtggctcgcgaacaggcacggcgtcgccgtgatccctggcagcgccagcggaggccccgggcacatccgcgtctccttcggagggctcaaggaggaagacaccaggctggccgctgagaggctacggcgcggcttgcaggaactggtggctgatggaacggtacagtaacggctccattggtgtaggtaaaaaacacagcattgtagttttacacaacgactccgattttccaatggcataactccgccgggattgattctagagaagaactggaccttgttatgaagaataaaaggcatccggtctgcagtcacctttgttataaaatatgagtactacatattataatcagcagtaagtatttgtttttgtttggttttcagttatctatattactgatggcacccatttgtacttttgtacagagtcaaaagcataagcaagaaagtccttgatgtc

SEQ ID NO: 16021 - protein, 394 aa, Zea mays subsp. mays
  peptide (1)..(394): Ceres Seq. ID no. 12366667
MGSFVKLARRAVETDAPVMVKIQELLRGAKDVMSLAQGVVYWQPPESAMAKVEKIIREPTLSKYGSDDGLPELREALLEKLRRENKLTKSSVMVTAGANQAFVNLVLTLCDAGDSVVMFAPYYFNAYMSFQMTGVTDILVGGSDHKTLHPDVDWLEKVLKENDPIPKLVTVVNPGNPSGAFIPRPMLERISDLCKNAGAWLVVDNTYEYFMYDGMKHYCLEGTHIVNLFSFSKAYGMMGWRVGYIAFPNEVDGFHDQLLKVQDNIPICASIIGQRLALYSLEAGPEWIKERVRDLVKNRALLVDALSPLGDGNVRGGQGAIYLWAKLPDTCSDDFEVVRWLANRHGVAVIPGSASGGPGHIRVSFGGLKEEDTRLAAERLRRGLQELVADGTVQ

SEQ ID NO: 16022 - protein, 376 aa, Zea mays subsp. mays
  peptide (1)..(376): Ceres Seq. ID no. 12366668
MVKIQELLRGAKDVMSLAQGVVYWQPPESAMAKVEKIIREPTLSKYGSDDGLPELREALLEKLRRENKLTKSSVMVTAGANQAFVNLVLTLCDAGDSVVMFAPYYFNAYMSFQMTGVTDILVGGSDHKTLHPDVDWLEKVLKENDPIPKLVTVVNPGNPSGAFIPRPMLERISDLCKNAGAWLVVDNTYEYFMYDGMKHYCLEGTHIVNLFSFSKAYGMMGWRVGYIAFPNEVDGFHDQLLKVQDNIPICASIIGQRLALYSLEAGPEWIKERVRDLVKNRALLVDALSPLGDGNVRGGQGAIYLWAKLPDTCSDDFEVVRWLANRHGVAVIPGSASGGPGHIRVSFGGLKEEDTRLAAERLRRGLQELVADGTVQ

SEQ ID NO: 16023 - protein, 362 aa, Zea mays subsp. mays
  peptide (1)..(362): Ceres Seq. ID no. 12366669
MSLAQGVVYWQPPESAMAKVEKIIREPTLSKYGSDDGLPELREALLEKLRRENKLTKSSVMVTAGANQAFVNLVLTLCDAGDSVVMFAPYYFNAYMSFQMTGVTDILVGGSDHKTLHPDVDWLEKVLKENDPIPKLVTVVNPGNPSGAFIPRPMLERISDLCKNAGAWLVVDNTYEYFMYDGMKHYCLEGTHIVNLFSFSKAYGMMGWRVGYIAFPNEVDGFHDQLLKVQDNIPICASIIGQRLALYSLEAGPEWIKERVRDLVKNRALLVDALSPLGDGNVRGGQGAIYLWAKLPDTCSDDFEVVRWLANRHGVAVIPGSASGGPGHIRVSFGGLKEEDTRLAAERLRRGLQELVADGTVQ

SEQ ID NO: 16024 - DNA, 504 bp, Zea mays subsp. mays
  misc_feature (1)..(504): Ceres Seq. ID no. 1555481
  misc_feature (1)..(504): Ortholog of  Ceres SEQ ID NO 13657915 as cited in SEQ ID NO 66051
ctaatcataaaaaatcgaagacgtttgattcccgcaccacgagtccacggcacaagcaaatgaaacaatccacgcggaacgccgccgccgccattcccatggttttccatgctcggcaattccatttcagtgtcctccctcgtctcgtgaccttgccccatccagcccaacgctccgtccatcaactgaatagcttggcggtgtaaccctgtcgtgtgcgatgagctcctcgccgttgatcaccgccgcggcgtcggctgccgtggtggcgctggctgtcgccaaccgcgtgctctacaagctcgcgcttgtgcctctcaaggcgtaccccttcttcctcgcccagctcaccaccttcgggtacgttgccgtgtacttctcgatgctctacacgaggtaccgcactgggttggtgactcagagacatgctggcgctccccaagcaccggttcgtcgctatcggttyggctggaggcacttggagtcgctgctggcatgtctgct

SEQ ID NO: 16025 - protein, 67 aa, Zea mays subsp. mays
  peptide (1)..(67): Ceres Seq. ID no. 1555482
NHKKSKTFDSRTTSPRHKQMKQSTRNAAAAIPMVFHARQFHFSVLPRLVTLPHPAQRSVHQLNSLAV

SEQ ID NO: 16026 - protein, 48 aa, Zea mays subsp. mays
  peptide (1)..(48): Ceres Seq. ID no. 1555483
MKQSTRNAAAAIPMVFHARQFHFSVLPRLVTLPHPAQRSVHQLNSLAV

SEQ ID NO: 16027 - protein, 94 aa, Zea mays subsp. mays
  peptide (1)..(94): Ceres Seq. ID no. 1555484
  misc_feature (82)..(82): Xaa is any aa, unknown or other
MSSSPLITAAASAAVVALAVANRVLYKLALVPLKAYPFFLAQLTTFGYVAVYFSMLYTRYRTGLVTQRHAGAPQAPVRRYRXGWRHLESLLACL

SEQ ID NO: 16028 - DNA, 1385 bp, Zea mays subsp. mays
  misc_feature (1)..(1385): Ceres Seq. ID no. 12406409
  misc_feature (1)..(1385): Ortholog of  Ceres SEQ ID NO 15172426 as cited in SEQ ID NO 59156
gcacgagaccattacctagaacatcctaatcaaaagagggggcaaagagcgatggacgccgcggtgcggaaggccgcgggcgccggcatcgcgcgcgcgccggcgctggtgctagcgctggtggcggcgggggcgttcctgatctcctacaacttcttcaccatgctgttccacggcggcggcggaataggcgcggcggtgaccgctgggacgagggaccctgtggtggccatgccagcgtggatgcgcgcggcggcggacaccgaggcgcgacggcggccgttccatgtggcgctcacggccacggacgcgccctacagccggtggcagtgccgggtcatgtacttctggtacaagcggatgcaggcgcggccgggcggagaggccatgggcgggttcacgcgcgtgctgcactcggggaagcccgacgggctcatggacgagatccccaccttcgtcgtcgacccgctgcccgctggcaaggaccacggatatgtggtcctaaataggccgtgggcatttgtgcagtggcttcagaaagcaaagattgaagaagagtatatactaatggcagaaccagaccatatatttgtgaaacctctaccaaatttggcccatgacgatgacccagcagcatttcccttcttttacattacaccatcagaacatgaaaaaattatcaggaaatactatgctaaagaaagaggtcctgtcacagatatcgatccgattgggaattctcctgtgatcattaagaagacaattcttgagaagattgcccccacatggatgaatgtgtcaattcaaatgaaagaggatgaagagacagataaagtttttggatgggtgttggaaatgtatgcatacgctgttgctagcgcattgcatggagttcatcatatccttcgtaaagatttcatgatccagccaccttttgatacaaagctccagaatacatttataatccacttcacttatggatgtgactactcactaaagggtgaactgacctatggtaaagttggtgaatggcgatttgacaaaagatcattcccagataggccaccaccaagaaatcttacattgccccctcctggagtaccagaaagtgtggttactctagtgaaaatggtcaatgaagctagtgcaaaccttcctcggtgggatgatggaatataaactttggatgatgtcaattatatcttaggttcctttgatctgcccttgtatatggggaatatcaaagtatcaggtgcagtcggttgtttggtttacatccaaaatagctgcttacacttgcacaccatacctgatagaagaagatacataattttctcattgtactttttaggaaaagaaaagaaatgaaagtaaagttagcatcg

SEQ ID NO: 16029 - protein, 392 aa, Zea mays subsp. mays
  peptide (1)..(392): Ceres Seq. ID no. 12406410
ARDHYLEHPNQKRGQRAMDAAVRKAAGAGIARAPALVLALVAAGAFLISYNFFTMLFHGGGGIGAAVTAGTRDPVVAMPAWMRAAADTEARRRPFHVALTATDAPYSRWQCRVMYFWYKRMQARPGGEAMGGFTRVLHSGKPDGLMDEIPTFVVDPLPAGKDHGYVVLNRPWAFVQWLQKAKIEEEYILMAEPDHIFVKPLPNLAHDDDPAAFPFFYITPSEHEKIIRKYYAKERGPVTDIDPIGNSPVIIKKTILEKIAPTWMNVSIQMKEDEETDKVFGWVLEMYAYAVASALHGVHHILRKDFMIQPPFDTKLQNTFIIHFTYGCDYSLKGELTYGKVGEWRFDKRSFPDRPPPRNLTLPPPGVPESVVTLVKMVNEASANLPRWDDGI

SEQ ID NO: 16030 - protein, 375 aa, Zea mays subsp. mays
  peptide (1)..(375): Ceres Seq. ID no. 12406411
MDAAVRKAAGAGIARAPALVLALVAAGAFLISYNFFTMLFHGGGGIGAAVTAGTRDPVVAMPAWMRAAADTEARRRPFHVALTATDAPYSRWQCRVMYFWYKRMQARPGGEAMGGFTRVLHSGKPDGLMDEIPTFVVDPLPAGKDHGYVVLNRPWAFVQWLQKAKIEEEYILMAEPDHIFVKPLPNLAHDDDPAAFPFFYITPSEHEKIIRKYYAKERGPVTDIDPIGNSPVIIKKTILEKIAPTWMNVSIQMKEDEETDKVFGWVLEMYAYAVASALHGVHHILRKDFMIQPPFDTKLQNTFIIHFTYGCDYSLKGELTYGKVGEWRFDKRSFPDRPPPRNLTLPPPGVPESVVTLVKMVNEASANLPRWDDGI

SEQ ID NO: 16031 - protein, 338 aa, Zea mays subsp. mays
  peptide (1)..(338): Ceres Seq. ID no. 12406412
MLFHGGGGIGAAVTAGTRDPVVAMPAWMRAAADTEARRRPFHVALTATDAPYSRWQCRVMYFWYKRMQARPGGEAMGGFTRVLHSGKPDGLMDEIPTFVVDPLPAGKDHGYVVLNRPWAFVQWLQKAKIEEEYILMAEPDHIFVKPLPNLAHDDDPAAFPFFYITPSEHEKIIRKYYAKERGPVTDIDPIGNSPVIIKKTILEKIAPTWMNVSIQMKEDEETDKVFGWVLEMYAYAVASALHGVHHILRKDFMIQPPFDTKLQNTFIIHFTYGCDYSLKGELTYGKVGEWRFDKRSFPDRPPPRNLTLPPPGVPESVVTLVKMVNEASANLPRWDDGI

SEQ ID NO: 16032 - DNA, 1430 bp, Zea mays subsp. mays
  misc_feature (1)..(1430): Ceres Seq. ID no. 12434895
  misc_feature (1)..(1430): Ortholog of  Ceres SEQ ID NO 13581579 as cited in SEQ ID NO 58361
  misc_feature (1)..(1430): Ortholog of  Ceres SEQ ID NO 13638746 as cited in SEQ ID NO 59296
  misc_feature (1)..(1430): Ortholog of  Ceres SEQ ID NO 13598714 as cited in SEQ ID NO 62656
  misc_feature (1)..(1430): Ortholog of  Ceres SEQ ID NO 13596969 as cited in SEQ ID NO 63375
  misc_feature (1)..(1430): Ortholog of  Ceres SEQ ID NO 13584480 as cited in SEQ ID NO 64751
  misc_feature (1)..(1430): Ortholog of  Ceres SEQ ID NO 13597519 as cited in SEQ ID NO 64759
  misc_feature (1)..(1430): Ortholog of  Ceres SEQ ID NO 13597870 as cited in SEQ ID NO 64982
  misc_feature (1)..(1430): Ortholog of  Ceres SEQ ID NO 13595926 as cited in SEQ ID NO 67778
  misc_feature (1)..(1430): Ortholog of  Ceres SEQ ID NO 13596362 as cited in SEQ ID NO 67877
  misc_feature (1)..(1430): Ortholog of  Ceres SEQ ID NO 12567001 as cited in SEQ ID NO 0
aggagacttggcttgtactgcatcgcaaaccgcaatcgcacgcggcacttgcccccgcgatcataacctcacaccgcccgccaccagctgcgcagcgctcgacagcctcaccagccgccatcactcgcggcagtacacggccgctgggactgggagagtgggagtgagacgctgctgttgccgagtgcgaggagacactactactcactctcaagactcgagagcagcaggggcgaccgagctctgcgtgcgtggggagaaccggagaaggcagcagaggagggagggagcgcgtggacgggctaggcgcagcagcatgggcgccgggatcagggtcctggcggcgctcttggcggcgctcgcggcagccaccgccggcgtgacggcgcagctgcggcaggactactacgcggcggtgtgcccggacctggagagcatcgtgcgcgccgcggtgtccaagaaggtgcaggcgcagcccgtcgccgtgggcgccaccatccgcctcttcttccacgactgcttcgtcgagggctgngacgcgtcggtgatcctggtgtccacggggaacaacacggcggagaaggaccacccgagcaacctctccctggccggcgacggcttcgacaccgtcatccaggccaaggcggccgtggacgccgtgccggcgtgcgccaaccaggtgtcgtgcgccgacatcctggcgctggccacccgggacgtcattgagctggctggcgggccgtcgtacgcggtggagctggggaggctggacgggctggtgtccatgtccaccaacgtcgacggcaagctgccgccgccgtccttcaacctggaccagctcacgagcattttcgccctcaacaacctgtcgcaggccgacatgattgctttatctgcggcgcacacggtggggttcgcgcactgcagcacgttctcggaccggatccagccgcagtcggtggacccgacgatgaacgcgacgtacgcggaggacctgcaggcggcgtgcccggcgggggtggaccccaacatcgcgctgcagctggaccccgtgacgccgcaggccttcgacaaccagtacttcgccaacctggtggaacggccgggggctgttcgcctccgaccaggtgctcttctccgacgcgcggtcgcagcccaccgtggtggcgtgggcgcagaacgccaccgccttcgagcaggccttcgtcgacgccatcaccaggctcggccgcgtcggcgtcaagaccgacccgtcgctgggggacgtccgccgcgactgcgccttcctcaactgaaaaggatggacatggagagctggtttatatctcacacaagtgttcatacacaatctagagtaaagtttttttgttgttgttattattatcatgtcaggtatgagcacaaggttgaattaatggttaatgcgattg

SEQ ID NO: 16033 - protein, 476 aa, Zea mays subsp. mays
  peptide (1)..(476): Ceres Seq. ID no. 12434896
  misc_feature (178)..(178): Xaa is any aa, unknown or other
GDLACTASQTAIARGTCPRDHNLTPPATSCAALDSLTSRHHSRQYTAAGTGRVGVRRCCCRVRGDTTTHSQDSRAAGATELCVRGENRRRQQRREGARGRARRSSMGAGIRVLAALLAALAAATAGVTAQLRQDYYAAVCPDLESIVRAAVSKKVQAQPVAVGATIRLFFHDCFVEGXDASVILVSTGNNTAEKDHPSNLSLAGDGFDTVIQAKAAVDAVPACANQVSCADILALATRDVIELAGGPSYAVELGRLDGLVSMSTNVDGKLPPPSFNLDQLTSIFALNNLSQADMIALSAAHTVGFAHCSTFSDRIQPQSVDPTMNATYAEDLQAACPAGVDPNIALQLDPVTPQAFDNQYFANLVERPGAVRLRPGALLRRAVAAHRGGVGAERHRLRAGLRRRHHQARPRRRQDRPVAGGRPPRLRLPQLKRMDMESWFISHTSVHTQSRVKFFCCCYYYHVRYEHKVELMVNAI

SEQ ID NO: 16034 - protein, 371 aa, Zea mays subsp. mays
  peptide (1)..(371): Ceres Seq. ID no. 12434897
  misc_feature (73)..(73): Xaa is any aa, unknown or other
MGAGIRVLAALLAALAAATAGVTAQLRQDYYAAVCPDLESIVRAAVSKKVQAQPVAVGATIRLFFHDCFVEGXDASVILVSTGNNTAEKDHPSNLSLAGDGFDTVIQAKAAVDAVPACANQVSCADILALATRDVIELAGGPSYAVELGRLDGLVSMSTNVDGKLPPPSFNLDQLTSIFALNNLSQADMIALSAAHTVGFAHCSTFSDRIQPQSVDPTMNATYAEDLQAACPAGVDPNIALQLDPVTPQAFDNQYFANLVERPGAVRLRPGALLRRAVAAHRGGVGAERHRLRAGLRRRHHQARPRRRQDRPVAGGRPPRLRLPQLKRMDMESWFISHTSVHTQSRVKFFCCCYYYHVRYEHKVELMVNAI

SEQ ID NO: 16035 - DNA, 678 bp, Zea mays subsp. mays
  misc_feature (1)..(678): Ceres Seq. ID no. 12341959
  misc_feature (1)..(678): Ortholog of  Ceres SEQ ID NO 14301738 as cited in SEQ ID NO 61201
atcggcaagcgaagcactccactccactccactccacctgttagaaacaagctagctcaagttctctcaacttcttgccaggaaagcgcgcaggaggtcgacgggaacgaccatggtcagcgccaagagacttgtgcaaatggccaagaagtggcagaggatggccgccacggcaaggaggcggatcgcactggcgccgccggcaaaaggagccgccgagggatcgtcgccgccgtgcagcacctcgcgtgtagctgtagccggcaagggccactgcgtggtgtactcggcggacggcaggcggttcgaggtcccgctgccgtacctcgacaccgccgtcttcggcgtgctcctcggcatgtcgcgggaggagttcgggttcgccggtggcgacggcaggatcacggtgccctgtgacgccgccgtcatggagtacgtcatgtgtttgcttcggaganacgcgtcggaanaggtggtgagggcgttcctgagctccgtggtgagccggccttgcagccactgtggaaatggctcgctggtgcagtccaccacgggagttcgccagcaagctgctgtttctagcttntgagctgaggattaattagcacttagctagattgttttattattattattattattattattattattattattattattattattattatt

SEQ ID NO: 16036 - protein, 158 aa, Zea mays subsp. mays
  peptide (1)..(158): Ceres Seq. ID no. 12341960
  misc_feature (116)..(116): Xaa is any aa, unknown or other
  misc_feature (120)..(120): Xaa is any aa, unknown or other
  misc_feature (158)..(158): Xaa is any aa, unknown or other
MVSAKRLVQMAKKWQRMAATARRRIALAPPAKGAAEGSSPPCSTSRVAVAGKGHCVVYSADGRRFEVPLPYLDTAVFGVLLGMSREEFGFAGGDGRITVPCDAAVMEYVMCLLRRXASEXVVRAFLSSVVSRPCSHCGNGSLVQSTTGVRQQAAVSSX

SEQ ID NO: 16037 - protein, 149 aa, Zea mays subsp. mays
  peptide (1)..(149): Ceres Seq. ID no. 12341961
  misc_feature (107)..(107): Xaa is any aa, unknown or other
  misc_feature (111)..(111): Xaa is any aa, unknown or other
  misc_feature (149)..(149): Xaa is any aa, unknown or other
MAKKWQRMAATARRRIALAPPAKGAAEGSSPPCSTSRVAVAGKGHCVVYSADGRRFEVPLPYLDTAVFGVLLGMSREEFGFAGGDGRITVPCDAAVMEYVMCLLRRXASEXVVRAFLSSVVSRPCSHCGNGSLVQSTTGVRQQAAVSSX

SEQ ID NO: 16038 - protein, 142 aa, Zea mays subsp. mays
  peptide (1)..(142): Ceres Seq. ID no. 12341962
  misc_feature (100)..(100): Xaa is any aa, unknown or other
  misc_feature (104)..(104): Xaa is any aa, unknown or other
  misc_feature (142)..(142): Xaa is any aa, unknown or other
MAATARRRIALAPPAKGAAEGSSPPCSTSRVAVAGKGHCVVYSADGRRFEVPLPYLDTAVFGVLLGMSREEFGFAGGDGRITVPCDAAVMEYVMCLLRRXASEXVVRAFLSSVVSRPCSHCGNGSLVQSTTGVRQQAAVSSX

SEQ ID NO: 16039 - DNA, 1484 bp, Zea mays subsp. mays
  misc_feature (1)..(1484): Ceres Seq. ID no. 12362339
  misc_feature (1)..(1484): Ortholog of  Ceres SEQ ID NO 14304057 as cited in SEQ ID NO 53782
aaaaatcgtccgactgtagcctagtcgacggatttgatcccgcaggccgcagcgcagcggccgtgtccgctgccgccaccagccaccggccacagccaggcagccagctcgcgtcgaagaagacgacgtggcccgccaagctcccctgccaaaagaaacaggagggcccgcgtcgtcgcctagtcggcgcgtggtgggagtggtatggagaggggcgccgccacggccgccgcggcgctcggctgcgccctccgctccccttccccctccgcgtccccggctccccggtggccgccgctccaccgctgcccacggcgcggcccgcccgggcctccccgctccctcctgccgcccgcgcggcgtttcaggcccctagacatgaagaagggacatagtaggaactcaccgaagaccttcagctcatctggacactcgggggttagactaaacaacgaaggtctcgtcaacgacaggctcctaatagattgtggagaggatcaagattgtgtgctcggtggcatagttgccctgggaaaagtttgatgctctccacattggtcatcgggaattggcaatgcatgcttctaaagcagggactccttttcttctttcttttgtgggaatggccgaagtacttggctggacatataggccacctatagttgctcattgtgatcgcaagcgggtcctttcatcttgggctccatactgtaggaatgtggtaccacttgaatatcaagttgaattttcaaaggtcaggtccctgtctccacgacaatttgttgaaaggttatcaaaggatcttagaataaaaggtgtcgtggcaggtgaaaattacaggtttggttacaaagcatctggtgacgcaactgagttagtgaaactatgtgaggaatttggtttaagtgcattcattgtacgctctgtcatggacacagcaaaaagatctcttaatggattttcaggcgctataaattcgagtgataaaggacaggtttcttccagccgtgtccgccatgcattggctatgggtgacatggaatacgtctctgaattactagggaggaaacaccgtcttttgctaatggttaaccaacactgccttcatgaaaagaaaagcattgtactccctaattcttgcatgctgaacatgccaccagctgaaggtctctatgaaaactgcgaccttgttaatggagggtatcttggaccatgtagagtgatcatcaactctgatactatcatcattgagatgaaagatgataacagtttatccctaaatcctattcaagaagttcagttagggattgagtttggatgaagttatatactttttgcatctgccatcttgtggagattattgctgaaagaagacattggggggaatactgcaaggggaagtcgaagactttgttcaagcgtgcagtacgcctcatcgtgattgagttcaggagcattttgtagtctcacaagaatgctttatt

SEQ ID NO: 16040 - protein, 248 aa, Zea mays subsp. mays
  peptide (1)..(248): Ceres Seq. ID no. 12362340
MHASKAGTPFLLSFVGMAEVLGWTYRPPIVAHCDRKRVLSSWAPYCRNVVPLEYQVEFSKVRSLSPRQFVERLSKDLRIKGVVAGENYRFGYKASGDATELVKLCEEFGLSAFIVRSVMDTAKRSLNGFSGAINSSDKGQVSSSRVRHALAMGDMEYVSELLGRKHRLLLMVNQHCLHEKKSIVLPNSCMLNMPPAEGLYENCDLVNGGYLGPCRVIINSDTIIIEMKDDNSLSLNPIQEVQLGIEFG

SEQ ID NO: 16041 - protein, 232 aa, Zea mays subsp. mays
  peptide (1)..(232): Ceres Seq. ID no. 12362341
MAEVLGWTYRPPIVAHCDRKRVLSSWAPYCRNVVPLEYQVEFSKVRSLSPRQFVERLSKDLRIKGVVAGENYRFGYKASGDATELVKLCEEFGLSAFIVRSVMDTAKRSLNGFSGAINSSDKGQVSSSRVRHALAMGDMEYVSELLGRKHRLLLMVNQHCLHEKKSIVLPNSCMLNMPPAEGLYENCDLVNGGYLGPCRVIINSDTIIIEMKDDNSLSLNPIQEVQLGIEFG

SEQ ID NO: 16042 - protein, 130 aa, Zea mays subsp. mays
  peptide (1)..(130): Ceres Seq. ID no. 12362342
KSSDCSLVDGFDPAGRSAAAVSAAATSHRPQPGSQLASKKTTWPAKLPCQKKQEGPRRRLVGAWWEWYGEGRRHGRRGARLRPPLPFPLRVPGSPVAAAPPLPTARPARASPLPPAARAAFQAPRHEEGT

SEQ ID NO: 16043 - DNA, 1253 bp, Zea mays subsp. mays
  misc_feature (1)..(1253): Ceres Seq. ID no. 12358734
  misc_feature (1)..(1253): Ortholog of  Ceres SEQ ID NO 13585458 as cited in SEQ ID NO 60907
  misc_feature (1)..(1253): Ortholog of  Ceres SEQ ID NO 13598678 as cited in SEQ ID NO 61508
  misc_feature (1)..(1253): Ortholog of  Ceres SEQ ID NO 12625392 as cited in SEQ ID NO 63315
  misc_feature (1)..(1253): Ortholog of  Ceres SEQ ID NO 13598319 as cited in SEQ ID NO 68758
ctcacaccatcggaacacatagcagctggcaggaacgactgccaagcaagtccatcggtcgaggtcctagctagcgcaacgacgatggccaccgcgctctcctgcaaggccctcgcagtggccgcgctcctgtccgtggtgtccgtcgtcacctacggcgctcgcgcccagcagcagcccagccacaacgcctccgactccgagtcgtcgcaggacaggtccttgctgtcctacagcagtggctggctgcccgccaaggccacctggtacggcgcgcccaccggcgccggccccgacgacaacggtggtgcgtgcgggttcaagggcaccaaccagtacccgttctcgtccatgacgtcctgtggcaacgagcccatcttcaaggacggcaagggctgcggctcatgctatcagatacgggtgcctccggagcaaccacccggcctgctccggcgtgccgcagacggtgatcataaccgacatgaactactacccggtggccaagtaccacttcgacctgagcggcacggcgttcggcgccatggcgagttccggcctgaacgacaggctccggcacgccgggatcatcgacatgcagttccggagggtgccgtgcgacttcccgggcctgaccgtcaccttccgcgtgcagcacggctccaaccccatgtacctggccgtgctcatcgagcacgccaacatggacggcgacgtggtgcaggccgacatcatgcagaacaactccgggtactgggagcccttgcacgagtcctggggcgccgtctggcggatcgaccccagccgcccgctctgcggccccttctcggtgcgcatcaccaacgagtccggcaagcagctggtggcccagaacgtcatcccggccaactacatcgccgacgtcgactaccgctccttcgtccagtatacgaattaacccgaccggccgggcggggcgcccactgcatgagctagctcgatcggtcacctctgcgaccgtcgtacgtccgagatagctcgttgcttaagtgttcgtgtttagtggctgccgtcggcaaccgccggactgaggatttttaaacctcaattccggcgtggggtgtgtgttggtgtgtgtcttgaanatgtgtgggaaattagaggaggcgagcatcaatgcgctctcccgcccacggtcactctatcattaccggtgtgcggtgtgtaaccagcagaccatggatattggttaatactacatcagtgtgatgttgttt

SEQ ID NO: 16044 - protein, 323 aa, Zea mays subsp. mays
  peptide (1)..(323): Ceres Seq. ID no. 12358735
LTPSEHIAAGRNDCQASPSVEVLASATTMATALSCKALAVAALLSVVSVVTYGARAQQQPSHNASDSESSQDRSLLSYSSGWLPAKATWYGAPTGAGPDDNGGACGFKGTNQYPFSSMTSCGNEPIFKDGKGCGSCYQIRVPPEQPPGLLRRAADGDHNRHELLPGGQVPLRPERHGVRRHGEFRPERQAPARRDHRHAVPEGAVRLPGPDRHLPRAARLQPHVPGRAHRARQHGRRRGAGRHHAEQLRVLGALARVLGRRLADRPQPPALRPLLGAHHQRVRQAAGGPERHPGQLHRRRRLPLLRPVYELTRPAGRGAHCMS

SEQ ID NO: 16045 - protein, 295 aa, Zea mays subsp. mays
  peptide (1)..(295): Ceres Seq. ID no. 12358736
MATALSCKALAVAALLSVVSVVTYGARAQQQPSHNASDSESSQDRSLLSYSSGWLPAKATWYGAPTGAGPDDNGGACGFKGTNQYPFSSMTSCGNEPIFKDGKGCGSCYQIRVPPEQPPGLLRRAADGDHNRHELLPGGQVPLRPERHGVRRHGEFRPERQAPARRDHRHAVPEGAVRLPGPDRHLPRAARLQPHVPGRAHRARQHGRRRGAGRHHAEQLRVLGALARVLGRRLADRPQPPALRPLLGAHHQRVRQAAGGPERHPGQLHRRRRLPLLRPVYELTRPAGRGAHCMS

SEQ ID NO: 16046 - protein, 206 aa, Zea mays subsp. mays
  peptide (1)..(206): Ceres Seq. ID no. 12358737
MTSCGNEPIFKDGKGCGSCYQIRVPPEQPPGLLRRAADGDHNRHELLPGGQVPLRPERHGVRRHGEFRPERQAPARRDHRHAVPEGAVRLPGPDRHLPRAARLQPHVPGRAHRARQHGRRRGAGRHHAEQLRVLGALARVLGRRLADRPQPPALRPLLGAHHQRVRQAAGGPERHPGQLHRRRRLPLLRPVYELTRPAGRGAHCMS

SEQ ID NO: 16047 - DNA, 1180 bp, Zea mays subsp. mays
  misc_feature (1)..(1180): Ceres Seq. ID no. 12366064
  misc_feature (1)..(1180): Ortholog of  Ceres SEQ ID NO 14307442 as cited in SEQ ID NO 54239
  misc_feature (1)..(1180): Ortholog of  Ceres SEQ ID NO 13638897 as cited in SEQ ID NO 55839
  misc_feature (1)..(1180): Ortholog of  Ceres SEQ ID NO 14302561 as cited in SEQ ID NO 56543
  misc_feature (1)..(1180): Ortholog of  Ceres SEQ ID NO 15177758 as cited in SEQ ID NO 57504
  misc_feature (1)..(1180): Ortholog of  Ceres SEQ ID NO 15177710 as cited in SEQ ID NO 59217
  misc_feature (1)..(1180): Ortholog of  Ceres SEQ ID NO 12614573 as cited in SEQ ID NO 68344
  misc_feature (1)..(1180): Ortholog of  Ceres SEQ ID NO 12614814 as cited in SEQ ID NO 68816
  misc_feature (1)..(1180): Ortholog of  Ceres SEQ ID NO 13624040 as cited in SEQ ID NO 0
cccctctgccttttccttttccttccccgctttctccttccttcctccccactccccgctcccctcgcccagccactggccatgtcggtggagacggagcggagctccaccgagtcctccggggcttccgggctcgacttcgaggacaccgcgctcacgctcaccctccgcctcccgggctccgcgccttccgccgccgccgccgccgcggcctccctgtccctctcctcctcgtcgtcctccgccttccccgaccccgaccgcaagcgcgcgtcctccgacgccgaccccggccgctcctccccgctcgccgcgtcctccgacgctgcaccggcacccaaggctcgtgtggtgggctggccgccggtgaggtcgtaccgcaagaacgcgctcgccgacgccgcgggctccagcaaggccgccaagttcgtcaaggtggccgtcgacggcgcgccctacctgcggaaggtggacctgcaggcgtacgccggctacgaccagctgctccgcgcgctccaggacaagttcttctcccacttcaccatcaggaagttcgccgacgacgagaggaagctggtggacgcggtgaacgggacggagtacgtgcccacgtacgaggacaaggatggcgactggatcctcgtcggcgacgtcccctggaagatgttcgtggaaacctgccagcgccttcgtctgatgaaaggttcagaggccgtgaacttggcaccgagagccgcccgatgaggcacactagctccgttgggcgttggcacgcacgcacgcactggcgtcttgaaggaaagcgggaactctgctggtcttgatgaggatcttcacgtgagataggaacgtgtgtacagttgtcgccttatggtattgagttgaggaaacttggaagttccattacttgtctgtagtctctactttatatagatgcgaagaagcttgagatacacattgcctacaatgtctttttgatgaataagaccagacagcaccgaaccgaactcgtccttccacatctccacacggttgctttgccatctcggtggttttgtggtggtggtggtggtggtggtcgtgcttcctataggtgtgaggctgatggcgtggctgccatttatacaatctttaatcctgttttgttgagctttattatatggttttgttttgagagtcc

SEQ ID NO: 16048 - protein, 273 aa, Zea mays subsp. mays
  peptide (1)..(273): Ceres Seq. ID no. 12366065
PLPFPFPSPLSPSFLPTPRSPRPATGHVGGDGAELHRVLRGFRARLRGHRAHAHPPPPGLRAFRRRRRRGLPVPLLLVVLRLPRPRPQARVLRRRPRPLLPARRVLRRCTGTQGSCGGLAAGEVVPQERARRRRGLQQGRQVRQGGRRRRALPAEGGPAGVRRLRPAAPRAPGQVLLPLHHQEVRRRREEAGGRGERDGVRAHVRGQGWRLDPRRRRPLEDVRGNLPAPSSDERFRGRELGTESRPMRHTSSVGRWHARTHWRLEGKRELCWS

SEQ ID NO: 16049 - protein, 247 aa, Zea mays subsp. mays
  peptide (1)..(247): Ceres Seq. ID no. 12366066
PLCLFLFLPRFLLPSSPLPAPLAQPLAMSVETERSSTESSGASGLDFEDTALTLTLRLPGSAPSAAAAAAASLSLSSSSSSAFPDPDRKRASSDADPGRSSPLAASSDAAPAPKARVVGWPPVRSYRKNALADAAGSSKAAKFVKVAVDGAPYLRKVDLQAYAGYDQLLRALQDKFFSHFTIRKFADDERKLVDAVNGTEYVPTYEDKDGDWILVGDVPWKMFVETCQRLRLMKGSEAVNLAPRAAR

SEQ ID NO: 16050 - protein, 220 aa, Zea mays subsp. mays
  peptide (1)..(220): Ceres Seq. ID no. 12366067
MSVETERSSTESSGASGLDFEDTALTLTLRLPGSAPSAAAAAAASLSLSSSSSSAFPDPDRKRASSDADPGRSSPLAASSDAAPAPKARVVGWPPVRSYRKNALADAAGSSKAAKFVKVAVDGAPYLRKVDLQAYAGYDQLLRALQDKFFSHFTIRKFADDERKLVDAVNGTEYVPTYEDKDGDWILVGDVPWKMFVETCQRLRLMKGSEAVNLAPRAAR

SEQ ID NO: 16051 - DNA, 1658 bp, Zea mays subsp. mays
  misc_feature (1)..(1658): Ceres Seq. ID no. 12357029
  misc_feature (1)..(1658): Ortholog of  Ceres SEQ ID NO 14314567 as cited in SEQ ID NO 52335
  misc_feature (1)..(1658): Ortholog of  Ceres SEQ ID NO 14308803 as cited in SEQ ID NO 55038
  misc_feature (1)..(1658): Ortholog of  Ceres SEQ ID NO 13595437 as cited in SEQ ID NO 56562
  misc_feature (1)..(1658): Ortholog of  Ceres SEQ ID NO 14315985 as cited in SEQ ID NO 57720
aattttggcgtgctttacttccgcttccaatataccttttttctgcgacaaaaatcatttttgttaattgcgaaaaggaaagagcccgtgtgaacaggaggggtgaggagaagagggggaaaagagagagaaatcggagggcattagcaagaaaccatgagttctaggttcgcaatccctagtcgtcttgtcctgatcttacttgagtgctcgtgagctctttccagtggctaaagactgcagatttgagttctggcccaagaaccgcgtgctagcccgccatggaggtgaggtccgagcaagggctgatggcggggagggatctattcggcatgccgaagagcccgccggcgcccgcgcccgccgtcgtccgccgccatgcagagcgtgcgcatggcgtacaccgcggacggcaccgccgtgttcgctccggtgagctcttcgcctgcgacgccgtcttaccagccgcagggcgcagcccacggcgctagcatgtccgcggcgacggtcgttggaggcaatggcgctccagctgcgccgagcatgggtgagccgctggccaagaagaagcgcggacgaccaaggaagtacgggcccgacgggtccatggcgctggcaatggtgcctgcttcggcggcttcagggtcgccggcgacagggcagggtttttctgggccgttctcaccgcctgcgttaaatccggcgagctctctggtggtggcgtcgccagacggattcaagaagcggggccggcctaagggttctaccaacaggccacgcgtggacgctgctgggtcatcaggagctggatttacacctcatgttatcacagttcaagctggggaggacgtggcatcaaagattatgtcattttcccagcatggaacacacggagtttgtgttctttcaggcaaatggctccatatcaaatgtaacgcttcgtcagactgctacatcaggcagaactgtaacatacgagggtcaattcgagatactgtcgctgtcggggtcattcttcctggctgaggatggtgtccagcgcagccgaaacggaggcctcagcgtgtcgctggctggtcctgatggccgtctgttgggtggtggggtcgcaggacttctagtagcggcttcaccggttcagatagtactgggaagcttcaattctggaggcggaaaggagccacaaaagcaggctccttcagaacctacatcggctccaccgagggttgctccgacagctgggatgggaggacccagcagcccttcttcaagaggcacattgagcgagtcatccggtggcgctggaagcccaccgccactgcatcgagccatggctgctagtgctagcaatagtaaccagccaccgttcttgtccagcatgccttggagatgagtttgcagcttgcattctcttggccaattccaggcaggatgtagcaatctgcgctttcagtagcgcccgttgtgtgagtagctgtgtgcagtacaagccagaagcttgggtgggaatataattgcgtctggtaaatctgtagctctgttgtaggttccaccctgaattcctgtgctaggtgtgttgagctgtgtaagcaatgtaatcctttcagcgttatcaaatgctatttagttaaatgtttctaccaaggcatgtcgatttg

SEQ ID NO: 16052 - protein, 215 aa, Zea mays subsp. mays
  peptide (1)..(215): Ceres Seq. ID no. 12357030
MQSVRMAYTADGTAVFAPVSSSPATPSYQPQGAAHGASMSAATVVGGNGAPAAPSMGEPLAKKKRGRPRKYGPDGSMALAMVPASAASGSPATGQGFSGPFSPPALNPASSLVVASPDGFKKRGRPKGSTNRPRVDAAGSSGAGFTPHVITVQAGEDVASKIMSFSQHGTHGVCVLSGKWLHIKCNASSDCYIRQNCNIRGSIRDTVAVGVILPG

SEQ ID NO: 16053 - protein, 210 aa, Zea mays subsp. mays
  peptide (1)..(210): Ceres Seq. ID no. 12357031
MAYTADGTAVFAPVSSSPATPSYQPQGAAHGASMSAATVVGGNGAPAAPSMGEPLAKKKRGRPRKYGPDGSMALAMVPASAASGSPATGQGFSGPFSPPALNPASSLVVASPDGFKKRGRPKGSTNRPRVDAAGSSGAGFTPHVITVQAGEDVASKIMSFSQHGTHGVCVLSGKWLHIKCNASSDCYIRQNCNIRGSIRDTVAVGVILPG

SEQ ID NO: 16054 - protein, 190 aa, Zea mays subsp. mays
  peptide (1)..(190): Ceres Seq. ID no. 12357032
MLSQFKLGRTWHQRLCHFPSMEHTEFVFFQANGSISNVTLRQTATSGRTVTYEGQFEILSLSGSFFLAEDGVQRSRNGGLSVSLAGPDGRLLGGGVAGLLVAASPVQIVLGSFNSGGGKEPQKQAPSEPTSAPPRVAPTAGMGGPSSPSSRGTLSESSGGAGSPPPLHRAMAASASNSNQPPFLSSMPWR

SEQ ID NO: 16055 - DNA, 1442 bp, Zea mays subsp. mays
  misc_feature (1)..(1442): Ceres Seq. ID no. 12406568
  misc_feature (1)..(1442): Ortholog of  Ceres SEQ ID NO 12562215 as cited in SEQ ID NO 20489
  misc_feature (1)..(1442): Ortholog of  Ceres SEQ ID NO 15174842 as cited in SEQ ID NO 53054
  misc_feature (1)..(1442): Ortholog of  Ceres SEQ ID NO 14310917 as cited in SEQ ID NO 53231
  misc_feature (1)..(1442): Ortholog of  Ceres SEQ ID NO 15170037 as cited in SEQ ID NO 55447
  misc_feature (1)..(1442): Ortholog of  Ceres SEQ ID NO 13582350 as cited in SEQ ID NO 56734
  misc_feature (1)..(1442): Ortholog of  Ceres SEQ ID NO 12476493 as cited in SEQ ID NO 58163
  misc_feature (1)..(1442): Ortholog of  Ceres SEQ ID NO 12582113 as cited in SEQ ID NO 58349
  misc_feature (1)..(1442): Ortholog of  Ceres SEQ ID NO 14310807 as cited in SEQ ID NO 58696
  misc_feature (1)..(1442): Ortholog of  Ceres SEQ ID NO 15175861 as cited in SEQ ID NO 59381
  misc_feature (1)..(1442): Ortholog of  Ceres SEQ ID NO 13596470 as cited in SEQ ID NO 62158
  misc_feature (1)..(1442): Ortholog of  Ceres SEQ ID NO 14313459 as cited in SEQ ID NO 62395
  misc_feature (1)..(1442): Ortholog of  Ceres SEQ ID NO 12578315 as cited in SEQ ID NO 62451
  misc_feature (1)..(1442): Ortholog of  Ceres SEQ ID NO 12615466 as cited in SEQ ID NO 62761
  misc_feature (1)..(1442): Ortholog of  Ceres SEQ ID NO 12615907 as cited in SEQ ID NO 62860
  misc_feature (1)..(1442): Ortholog of  Ceres SEQ ID NO 14314080 as cited in SEQ ID NO 63105
  misc_feature (1)..(1442): Ortholog of  Ceres SEQ ID NO 13597295 as cited in SEQ ID NO 63743
  misc_feature (1)..(1442): Ortholog of  Ceres SEQ ID NO 12617090 as cited in SEQ ID NO 64005
  misc_feature (1)..(1442): Ortholog of  Ceres SEQ ID NO 15226458 as cited in SEQ ID NO 64042
  misc_feature (1)..(1442): Ortholog of  Ceres SEQ ID NO 13597439 as cited in SEQ ID NO 64081
  misc_feature (1)..(1442): Ortholog of  Ceres SEQ ID NO 13597233 as cited in SEQ ID NO 64370
  misc_feature (1)..(1442): Ortholog of  Ceres SEQ ID NO 13584577 as cited in SEQ ID NO 65298
  misc_feature (1)..(1442): Ortholog of  Ceres SEQ ID NO 13599438 as cited in SEQ ID NO 0
  misc_feature (1)..(1442): Ortholog of  Ceres SEQ ID NO 13600370 as cited in SEQ ID NO 0
  misc_feature (1)..(1442): Ortholog of  Ceres SEQ ID NO 13623850 as cited in SEQ ID NO 0
  misc_feature (1)..(1442): Ortholog of  Ceres SEQ ID NO 14309162 as cited in SEQ ID NO 0
atgcgagactggaggcggaaccgcgcacgacaccaagctgccgcgccggactgctgcacgcaagcgcagcgcaggaccgaccgacctccgtaggcacgcacggcgccggcggcatggcggagcacctcctgtcgacggccgtgcacgacacgctgccggggagctacgtgcggccggagccggagcgcccgcgcctcgcggaggtcgtgaccggcgcgcgcatccccgtcgtggacctgggcagccccgaccgcggcgcggtcgtggccgccgtcggcgacgcctgccgctcgcacggcttcttccaggtcgtcaaccacgggatacacgccgccctggtcgcggcggtgatggccgcggggcgcggcttcttccggctgccccccgaggagaaggccaagctctactccgacgaccccgccaggaagatccggctgtccaccagcttcaacgtgcgcaaggagacggtgcacaactggcgcgactacctccgcctgcactgccatcccctcgacgagttcctgcccgattggccgtccaacccgcccgatttcaaggagaccatgggcacctactgcaaggaggtccgggagctcgggttcaggctgtacgccgcgatctcggagagcctgggcctagaggcgagctacatgaaggaagcgctgggggagcaggagcagcacatggcggtcaacttctacccgccgtgcccggagccggagctcacctacggcctcccggcgcacaccgaccccaacgcgctcaccatcctgctcatggacccggacgtcgccggcctgcaggtgctccacgccggccagtgggtcgccgtcaacccgcagcccggcgcgctcatcatcaacatcggcgaccagctgcaggcgctgagcaacgggcagtaccggagcgtgtggcaccgcgcggtggtgaactcggaccgggagcgcatgtccgtggcgtcgttcctgtgcccgtgcaaccacgtcgtgctcggccccgcgcggaagctcgtcaccgaggacaccccggccgtgtacaggaactacacgtacgacaagtactacgccaagttctggagcaggaacctggaccaggagcactgcctcgagctcttcagaacctagcgaatcggatacggatggatggatacattacatacgcgccctctgtttttctccatgacgttagaagaacacgttctgcaatgtttgtccattcaaggtggtatcaatcaaggctgtggtcgttgcaattcttccgctccatatacatgattaaatgctttgaaagaaaaagaaaaaaagaaacacaagtattatggcactactagtgtttttaggaacaaggaaagaggggttgcccctgctggctatatatattaaatataaataaaggtaaggctgtagacattggtgaataagagaaagtatttgagtttctct

SEQ ID NO: 16056 - protein, 442 aa, Zea mays subsp. mays
  peptide (1)..(442): Ceres Seq. ID no. 12406569
CETGGGTAHDTKLPRRTAARKRSAGPTDLRRHARRRRHGGAPPVDGRARHAAGELRAAGAGAPAPRGGRDRRAHPRRGPGQPRPRRGRGRRRRRLPLARLLPGRQPRDTRRPGRGGDGRGARLLPAAPRGEGQALLRRPRQEDPAVHQLQRAQGDGAQLARLPPPALPSPRRVPARLAVQPARFQGDHGHLLQGGPGARVQAVRRDLGEPGPRGELHEGSAGGAGAAHGGQLLPAVPGAGAHLRPPGAHRPQRAHHPAHGPGRRRPAGAPRRPVGRRQPAARRAHHQHRRPAAGAEQRAVPERVAPRGGELGPGAHVRGVVPVPVQPRRARPRAEARHRGHPGRVQELHVRQVLRQVLEQEPGPGALPRALQNLANRIRMDGYITYAPSVFLHDVRRTRSAMFVHSRWYQSRLWSLQFFRSIYMIKCFERKRKKETQVLWHY

SEQ ID NO: 16057 - protein, 373 aa, Zea mays subsp. mays
  peptide (1)..(373): Ceres Seq. ID no. 12406570
ARLEAEPRTTPSCRAGLLHASAAQDRPTSVGTHGAGGMAEHLLSTAVHDTLPGSYVRPEPERPRLAEVVTGARIPVVDLGSPDRGAVVAAVGDACRSHGFFQVVNHGIHAALVAAVMAAGRGFFRLPPEEKAKLYSDDPARKIRLSTSFNVRKETVHNWRDYLRLHCHPLDEFLPDWPSNPPDFKETMGTYCKEVRELGFRLYAAISESLGLEASYMKEALGEQEQHMAVNFYPPCPEPELTYGLPAHTDPNALTILLMDPDVAGLQVLHAGQWVAVNPQPGALIINIGDQLQALSNGQYRSVWHRAVVNSDRERMSVASFLCPCNHVVLGPARKLVTEDTPAVYRNYTYDKYYAKFWSRNLDQEHCLELFRT

SEQ ID NO: 16058 - protein, 336 aa, Zea mays subsp. mays
  peptide (1)..(336): Ceres Seq. ID no. 12406571
MAEHLLSTAVHDTLPGSYVRPEPERPRLAEVVTGARIPVVDLGSPDRGAVVAAVGDACRSHGFFQVVNHGIHAALVAAVMAAGRGFFRLPPEEKAKLYSDDPARKIRLSTSFNVRKETVHNWRDYLRLHCHPLDEFLPDWPSNPPDFKETMGTYCKEVRELGFRLYAAISESLGLEASYMKEALGEQEQHMAVNFYPPCPEPELTYGLPAHTDPNALTILLMDPDVAGLQVLHAGQWVAVNPQPGALIINIGDQLQALSNGQYRSVWHRAVVNSDRERMSVASFLCPCNHVVLGPARKLVTEDTPAVYRNYTYDKYYAKFWSRNLDQEHCLELFRT

SEQ ID NO: 16059 - DNA, 1696 bp, Zea mays subsp. mays
  misc_feature (1)..(1696): Ceres Seq. ID no. 13498363
  misc_feature (1)..(1696): Ortholog of  Ceres SEQ ID NO 15169180 as cited in SEQ ID NO 55263
taatcaaaaaattattatttcttcttccagcgggcaattcctggccaccaccgggcgcgctgcaccgcgctatattactccgggctcgtggacaagcatgcagaggggcgtgtccttccctggcggaatggcggaggagtgcccgcccgccggcggcgccgagctctggctcccggacgagttcctggacgacgacttcttctccgaggaggagaaggcggcggtcgcggccaagagcgagagcgacgaggaggaagggatggacggcctctcgcgccgcgcggccgggctcgtcgtcgggggtggaggggacggttcccctgcaaaggcgcaagtgttagccggctcgccgcagtcgattctgtgcggcctgcatgcttccggggaggacagccccaacggcgcggcgtcgcaggtcagctcgccgccgtcgtcgccgnngnntaagacgccggccgacccctgggacctgctcaaagaggcggccggccaggtggcccgcatgcgcacaactagcggcatcctggtggcaacgaacgcgggcgcacatcaaagacaccccgtcccgccgctggcgcagaagctctctgcgccggccgacgctcccaaggccgcgggtgccaacctccctcaggctcagccgaagaactcgatggaacatcgccggattcagattgctcgttttaatgcgctgaagcagcagcagctcctgaagcacatgcgggagcgggagctcgccgtcgctacggcggcggcgtggggcacgagcgtcgcggggtctcatcgtgccgccgggtaccgtgcgccggcgccccatgtcctgagctcgtccgcgtggcccaccctccagaagcagcagcagcagcaaagggcggtgtccccggcgggcatgcgcgccgtcttcgtggcccctcctggcgccaagcgcgagtgcgccggcaccggcgtgttcatcccccgccaggccggcgcccccgcggagcccaagaaaaggccagcagcgtgcgcccctgtccttctcccggcgcgcgtcgtgcaggcgctcaacctcaacgtcgaggacctcggggcccgtcccatctacccgggcggcttcgtcctcgaccacgatgcactggtgagccggagcaacgctctgctggcgagccgcgcgtcccagcagctccatggcgcttcgtcgcgcgaggtgaatctcccccaggaatggacgtactgagggcgccgattcgccaccgcaccgctgcaagatgactcgacgatcactccagattaacggggggtgtcaaaaaaaaattactattgctattggtagcaataggtattataggtgttgttaggctagaagtaggaggcagcggtggtgtggcattacgcgccagcgttaggtgttcttttgtgcgggggtgatatattggttattttgggactgncggacgggttggtgatgagcaagagcgaaatcaatcatccgtggctctcgcaggtccgttgggggcggaggggagaaacagcaataataataataagtgggtgcttttgggggaggggagagaggggggtttggaactaatcctatgtttagctggttctggtactacgatggtttcccaagggaaaatcatcaagcattcagcagtctgtgaaagagatgtctcgtcactgtaagcaaataataataataataaacaggagctcc

SEQ ID NO: 16060 - protein, 404 aa, Zea mays subsp. mays
  peptide (1)..(404): Ceres Seq. ID no. 13498364
  misc_feature (147)..(147): Xaa is any aa, unknown or other
  misc_feature (148)..(148): Xaa is any aa, unknown or other
NQKIIISSSSGQFLATTGRAAPRYITPGSWTSMQRGVSFPGGMAEECPPAGGAELWLPDEFLDDDFFSEEEKAAVAAKSESDEEEGMDGLSRRAAGLVVGGGGDGSPAKAQVLAGSPQSILCGLHASGEDSPNGAASQVSSPPSSPXXKTPADPWDLLKEAAGQVARMRTTSGILVATNAGAHQRHPVPPLAQKLSAPADAPKAAGANLPQAQPKNSMEHRRIQIARFNALKQQQLLKHMRERELAVATAAAWGTSVAGSHRAAGYRAPAPHVLSSSAWPTLQKQQQQQRAVSPAGMRAVFVAPPGAKRECAGTGVFIPRQAGAPAEPKKRPAACAPVLLPARVVQALNLNVEDLGARPIYPGGFVLDHDALVSRSNALLASRASQQLHGASSREVNLPQEWTY

SEQ ID NO: 16061 - protein, 372 aa, Zea mays subsp. mays
  peptide (1)..(372): Ceres Seq. ID no. 13498365
  misc_feature (115)..(115): Xaa is any aa, unknown or other
  misc_feature (116)..(116): Xaa is any aa, unknown or other
MQRGVSFPGGMAEECPPAGGAELWLPDEFLDDDFFSEEEKAAVAAKSESDEEEGMDGLSRRAAGLVVGGGGDGSPAKAQVLAGSPQSILCGLHASGEDSPNGAASQVSSPPSSPXXKTPADPWDLLKEAAGQVARMRTTSGILVATNAGAHQRHPVPPLAQKLSAPADAPKAAGANLPQAQPKNSMEHRRIQIARFNALKQQQLLKHMRERELAVATAAAWGTSVAGSHRAAGYRAPAPHVLSSSAWPTLQKQQQQQRAVSPAGMRAVFVAPPGAKRECAGTGVFIPRQAGAPAEPKKRPAACAPVLLPARVVQALNLNVEDLGARPIYPGGFVLDHDALVSRSNALLASRASQQLHGASSREVNLPQEWTY

SEQ ID NO: 16062 - protein, 362 aa, Zea mays subsp. mays
  peptide (1)..(362): Ceres Seq. ID no. 13498366
  misc_feature (105)..(105): Xaa is any aa, unknown or other
  misc_feature (106)..(106): Xaa is any aa, unknown or other
MAEECPPAGGAELWLPDEFLDDDFFSEEEKAAVAAKSESDEEEGMDGLSRRAAGLVVGGGGDGSPAKAQVLAGSPQSILCGLHASGEDSPNGAASQVSSPPSSPXXKTPADPWDLLKEAAGQVARMRTTSGILVATNAGAHQRHPVPPLAQKLSAPADAPKAAGANLPQAQPKNSMEHRRIQIARFNALKQQQLLKHMRERELAVATAAAWGTSVAGSHRAAGYRAPAPHVLSSSAWPTLQKQQQQQRAVSPAGMRAVFVAPPGAKRECAGTGVFIPRQAGAPAEPKKRPAACAPVLLPARVVQALNLNVEDLGARPIYPGGFVLDHDALVSRSNALLASRASQQLHGASSREVNLPQEWTY

SEQ ID NO: 16063 - DNA, 2056 bp, Zea mays subsp. mays
  misc_feature (1)..(2056): Ceres Seq. ID no. 12372969
  misc_feature (1)..(2056): Ortholog of  Ceres SEQ ID NO 15170788 as cited in SEQ ID NO 52635
  misc_feature (1)..(2056): Ortholog of  Ceres SEQ ID NO 13638058 as cited in SEQ ID NO 55054
  misc_feature (1)..(2056): Ortholog of  Ceres SEQ ID NO 15170362 as cited in SEQ ID NO 57883
  misc_feature (1)..(2056): Ortholog of  Ceres SEQ ID NO 14303297 as cited in SEQ ID NO 67765
agtatacacgccaagtcgccagccagcatttcctcccgaaccatccttccactccctcgccgaccctccccccgcgcccgccatggacacggcgatcggctccgtcccggcagcctccgacgcggcgcgtcacccagcgccgtccgcgtccgccccgcgcgacgcgacgctgggccggcacctggcgcggcgcctggcggaggtgggcgcccgggacgtgttcacggtgccgggggacttcaacctcacgctcctcgacgagctggaggccgagccgggcggcgtccgcctcgtcggctgctgcaacgagctcaacgcggcgtacgcggccgacgggtacgcccgcgcgcgcgccggcggggtcggcgcctgcgccgtcaccttcaccgtcggcggcctcagcgccatcaacggcgtcgccggcgccttcagcgagaacctccccgtcgtgtgcatcgtcggcggacccaacagcaacgactacgggagtaacaggatcctgcaccataccatcggcttgcctgatttcacgcaggagctcaggtgcttccagaacgtcacgtgctatcaggctgtggtgaacaacttggaagatgcgcacgagcagatcgatactgccatctccacggcaatcaaggagagcaagcctgtttacattagcatcaggctgcaacctcccttcgatcccacatcccaccttcagccgccatcctgtccctttcttcctctccccaaggctatcgaaccagatgaacctggaggctgcagtggaagccgccgcggctttcttgaacaaagccgtcaagccagtgcttgtaggtgggccaaagatgagggtgtccaaagcatgcgaagccttggcagagctggcagatgcctgcggctatcccgtcgccgtgatgccttctgcgaaggggctagtgccagagcaccactctaggttcattggcacgtactggggtgcggtgagcactccattctgtgctgagatcgtcgagtctgccgatgcctacctatttgctggccccgtattcaacgactacagctcggttgggtactcgctgctcctcaagaaggagaaggccatcattgtccaaccagagcgggtggtggtcgggcacggacccgcgtttgggtgtgttctgatgaaggatttccttcatgcccttgcaacccgtctgaagaagaacactgccgcgtatgagaactaccgtcgaatttatgtgcctttaggcgaaccacttccatctgaacctggcgagccgttgagagtgaacgtgctattcaagcatattcaggcaatgctgtctggcgacacggctgtcatcgcagagactggggactcgtggtttaactgccagaagctgaagctaccggaaggctgtggatacgaattccagatgcagtatggatcaattggctggtcagtgggcgcaactctaggatacgcacaggctgccaaggataaacgtgtcattgcctgcattggagacggcagctttcaggtgacggcacaagaagtgtcaacgatgctccggtgggggcacaacagcatcatcttcctgataaacaatggagggtacacaatcgaggtggagattcacgatggcccttataacgttatcaagaactggaactacaccggtctggtggaagcgttccacaatggcgagggcgcgtgctacacagcaaaggttcgaacagaggaggagctgacggaggcactggaggcagctctgggacctaagaaggactgcttatgcttcatcgaggtcatcgtgcataaggatgacaccagcaaagagcttctcgagtggggatctagggtttctgcggcgaatagccgtccacctaatcctcagtgaaatagccgtacatcaggtctcccgaattgtcctgtagatcaaaccgttttctggtgacgtccatagcaaaaagtctcggcgaggacatgctgtcgatttctgaataaattgtccctgcaattcactggtgttgaagtcctcgttgtaaaggtacaaagacgtttggaaaaatcactgacagcgtaaactct

SEQ ID NO: 16064 - protein, 423 aa, Zea mays subsp. mays
  peptide (1)..(423): Ceres Seq. ID no. 12372970
MRTSRSILPSPRQSRRASLFTLASGCNLPSIPHPTFSRHPVPFFLSPRLSNQMNLEAAVEAAAAFLNKAVKPVLVGGPKMRVSKACEALAELADACGYPVAVMPSAKGLVPEHHSRFIGTYWGAVSTPFCAEIVESADAYLFAGPVFNDYSSVGYSLLLKKEKAIIVQPERVVVGHGPAFGCVLMKDFLHALATRLKKNTAAYENYRRIYVPLGEPLPSEPGEPLRVNVLFKHIQAMLSGDTAVIAETGDSWFNCQKLKLPEGCGYEFQMQYGSIGWSVGATLGYAQAAKDKRVIACIGDGSFQVTAQEVSTMLRWGHNSIIFLINNGGYTIEVEIHDGPYNVIKNWNYTGLVEAFHNGEGACYTAKVRTEEELTEALEAALGPKKDCLCFIEVIVHKDDTSKELLEWGSRVSAANSRPPNPQ

SEQ ID NO: 16065 - protein, 371 aa, Zea mays subsp. mays
  peptide (1)..(371): Ceres Seq. ID no. 12372971
MNLEAAVEAAAAFLNKAVKPVLVGGPKMRVSKACEALAELADACGYPVAVMPSAKGLVPEHHSRFIGTYWGAVSTPFCAEIVESADAYLFAGPVFNDYSSVGYSLLLKKEKAIIVQPERVVVGHGPAFGCVLMKDFLHALATRLKKNTAAYENYRRIYVPLGEPLPSEPGEPLRVNVLFKHIQAMLSGDTAVIAETGDSWFNCQKLKLPEGCGYEFQMQYGSIGWSVGATLGYAQAAKDKRVIACIGDGSFQVTAQEVSTMLRWGHNSIIFLINNGGYTIEVEIHDGPYNVIKNWNYTGLVEAFHNGEGACYTAKVRTEEELTEALEAALGPKKDCLCFIEVIVHKDDTSKELLEWGSRVSAANSRPPNPQ

SEQ ID NO: 16066 - protein, 344 aa, Zea mays subsp. mays
  peptide (1)..(344): Ceres Seq. ID no. 12372972
MRVSKACEALAELADACGYPVAVMPSAKGLVPEHHSRFIGTYWGAVSTPFCAEIVESADAYLFAGPVFNDYSSVGYSLLLKKEKAIIVQPERVVVGHGPAFGCVLMKDFLHALATRLKKNTAAYENYRRIYVPLGEPLPSEPGEPLRVNVLFKHIQAMLSGDTAVIAETGDSWFNCQKLKLPEGCGYEFQMQYGSIGWSVGATLGYAQAAKDKRVIACIGDGSFQVTAQEVSTMLRWGHNSIIFLINNGGYTIEVEIHDGPYNVIKNWNYTGLVEAFHNGEGACYTAKVRTEEELTEALEAALGPKKDCLCFIEVIVHKDDTSKELLEWGSRVSAANSRPPNPQ

SEQ ID NO: 16067 - DNA, 1639 bp, Zea mays subsp. mays
  misc_feature (1)..(1639): Ceres Seq. ID no. 12391357
  misc_feature (1)..(1639): Ortholog of  Ceres SEQ ID NO 13662197 as cited in SEQ ID NO 63622
aaactccaatccagcgttgagctcgacagctcgtgccaaactaggccgcagctggaaataccctccgctccacttacctgctgctggtgagcaccgcaagcaccaactcgcgcccaccgctccgctacaccagccgacgccatcatgtctaccgtcgccgccgcccccaccgtcgtgaaatcggctccggagctcgtcgcgccagtggggccaacacccggcggcaccctcccactgtcctccatcgacaagaccgcggcggtgcgtgtgtcggtggatttcatccaggtttttcccccggccgtaggagcaggcggggacaaagacgccgccgtggccgcgatgcgcgacggcttcgcgaaggcactggtgccgtactacccggtggccggccgcatcgcggacgccagccccggggagcccgtggtggagtgcaccgggcagggcgtctggttcgtggaggccgctgcgagctgcgcgctcgccgacgtcaactacctcgagcgccctctgctcatccccaaggaggagctcctcccgcgacctccccccgaggagaagctcgaggacctcgtcctcatggcacaggtgaccaagttcgcctgcggcgggttcgcggtcgggatctgcttcagccacctggtgttcgacgggcagggcgcggcgcagttcctcaaggcggccggcgagatggcgcgggggctgccggcgccgtcggttgcgccggtctgggaccgcgacgcgatcccggacccgcctaagctgccgcgcggccccccgccgtcgttcacggcgttcagcttcgtgacccaggtggtcgagatctcgccggagagcatcgcgcgcatcaaggacgacttcaaggacgcgacggggcagacctgctccaccttcgacgctgtcacggcggtggtgttcaagtgccgcgcgctggcgatggcgctccccgacgatgccgaggtccggctcggcttcgccgccagcacgcggcacctcctccacggcgtgctgccgtcggtggacggctactacggcaactgcgtgtaccccgtgggcatcacccggaccagcaaggcgatccgtgaggcgtcgcttccggaggtggtcggcgtgatgcgggaggccaaggaggcgcttaccacgcggttcacagactggatgcgcggcggcgccaaggacgaccactacaacgtgccgttggactacggcacggngacggtgtcggactggagccgcgtcgggttcaacgaggtggactacggcttcggtgaaccggggtacgtcttcacgctcaacgacgacgtcaacatcgtcgcgtcggtgatctacctcaaaccgcccgcgcccaagcgcggcatccggctcatgcttcgctgcgtcgaggaacctccacgctgcggcgttcgccgaggagctcgccaaattcgcgtagatggttgtttagtcttggtttatctatacttcattggtgtcggacactcggacctcatcttttacaatattatccatacttcattggtgtcaggcgctcattgattgtcatcggcattgttggatgtgcgggggacatgaaaaagctattacaagaacatttctggtatgcctaaaagtacacatattaaatcatgaccatttatct

SEQ ID NO: 16068 - protein, 463 aa, Zea mays subsp. mays
  peptide (1)..(463): Ceres Seq. ID no. 12391358
  misc_feature (357)..(357): Xaa is any aa, unknown or other
MSTVAAAPTVVKSAPELVAPVGPTPGGTLPLSSIDKTAAVRVSVDFIQVFPPAVGAGGDKDAAVAAMRDGFAKALVPYYPVAGRIADASPGEPVVECTGQGVWFVEAAASCALADVNYLERPLLIPKEELLPRPPPEEKLEDLVLMAQVTKFACGGFAVGICFSHLVFDGQGAAQFLKAAGEMARGLPAPSVAPVWDRDAIPDPPKLPRGPPPSFTAFSFVTQVVEISPESIARIKDDFKDATGQTCSTFDAVTAVVFKCRALAMALPDDAEVRLGFAASTRHLLHGVLPSVDGYYGNCVYPVGITRTSKAIREASLPEVVGVMREAKEALTTRFTDWMRGGAKDDHYNVPLDYGTXTVSDWSRVGFNEVDYGFGEPGYVFTLNDDVNIVASVIYLKPPAPKRGIRLMLRCVEEPPRCGVRRGARQIRVDGCLVLVYLYFIGVGHSDLIFYNIIHTSLVSGAH

SEQ ID NO: 16069 - protein, 397 aa, Zea mays subsp. mays
  peptide (1)..(397): Ceres Seq. ID no. 12391359
  misc_feature (291)..(291): Xaa is any aa, unknown or other
MRDGFAKALVPYYPVAGRIADASPGEPVVECTGQGVWFVEAAASCALADVNYLERPLLIPKEELLPRPPPEEKLEDLVLMAQVTKFACGGFAVGICFSHLVFDGQGAAQFLKAAGEMARGLPAPSVAPVWDRDAIPDPPKLPRGPPPSFTAFSFVTQVVEISPESIARIKDDFKDATGQTCSTFDAVTAVVFKCRALAMALPDDAEVRLGFAASTRHLLHGVLPSVDGYYGNCVYPVGITRTSKAIREASLPEVVGVMREAKEALTTRFTDWMRGGAKDDHYNVPLDYGTXTVSDWSRVGFNEVDYGFGEPGYVFTLNDDVNIVASVIYLKPPAPKRGIRLMLRCVEEPPRCGVRRGARQIRVDGCLVLVYLYFIGVGHSDLIFYNIIHTSLVSGAH

SEQ ID NO: 16070 - protein, 318 aa, Zea mays subsp. mays
  peptide (1)..(318): Ceres Seq. ID no. 12391360
  misc_feature (212)..(212): Xaa is any aa, unknown or other
MAQVTKFACGGFAVGICFSHLVFDGQGAAQFLKAAGEMARGLPAPSVAPVWDRDAIPDPPKLPRGPPPSFTAFSFVTQVVEISPESIARIKDDFKDATGQTCSTFDAVTAVVFKCRALAMALPDDAEVRLGFAASTRHLLHGVLPSVDGYYGNCVYPVGITRTSKAIREASLPEVVGVMREAKEALTTRFTDWMRGGAKDDHYNVPLDYGTXTVSDWSRVGFNEVDYGFGEPGYVFTLNDDVNIVASVIYLKPPAPKRGIRLMLRCVEEPPRCGVRRGARQIRVDGCLVLVYLYFIGVGHSDLIFYNIIHTSLVSGAH

SEQ ID NO: 16071 - DNA, 2010 bp, Zea mays subsp. mays
  misc_feature (1)..(2010): Ceres Seq. ID no. 12367754
  misc_feature (1)..(2010): Ortholog of  Ceres SEQ ID NO 13594216 as cited in SEQ ID NO 57054
  misc_feature (1)..(2010): Ortholog of  Ceres SEQ ID NO 13598512 as cited in SEQ ID NO 64094
  misc_feature (1)..(2010): Ortholog of  Ceres SEQ ID NO 15180570 as cited in SEQ ID NO 0
aaaaaagatctccactccagtatcccctccccgacttgcaacctctcctgaatcccaccgatcacgcgagctccccgccgcgatgtccgatcaccgagcgaagcggccgtccgacggcgcagccactgtggcatcgccggcggcgaagcgcgcccgcgacccgcccgcgccggcgttacccacgaacaaggaagctcccgacatggcccccaagacccgcatcttctgcgacatcctggcctcccgcgccgacgacgaggaactgaatgccgagctcgacaaggccgacatccgcgtaagcatcgctgacgtcgagcaggtgctccgcttctcctacgcgcacccgcgcgccgccgccgccttctttcgctggggcgggataccggtacctcggccacgagcactccccctactcgtggaacctcctcgtcgacatcctcggtaagaatcgtctcttcgagcccatgtgggacacagtcaaatctatgcagtcgcagcagctgctctcgctcgccactttcgcctccatattctcctccctggcggcgacccccggcggttccccgctcaaggcgttcatggacatgccccgctacggcatgacccgcgacacgccggcgctcaactcgctcctctccgcgctgtgtcgtgccaaccgcctcgacgacgctcgcgccgcgatcccagtagcccgcgccgaggctggcacgcgcccggatgccgactcctacgccatcctcctcgagggcagcgaggccgccgccgatctgcgggttgcgcgcgaggtgttcgacgaaatggtgcaggccattggattttatcctgacaacgtgcctgcctatgactccttcctcactacgcttgtttcaagtgactcctccacggcgctaccgggaagcaatggagtacctaaatgtcttgagcaggcacggctgttcgccaggagagaagttcttccgtgctgctcttgctgcacaccttgaggcacgacaattgcgcggagccatgaatctctgggatgactttgttgggcgtcgaggactcgtcccagatatggaaatgtacaacacaatgatcaagctgcagggcagtctcgggcatgctgagctgatagtgggttatctcgacgacatgatctccaatggagtcttccctgataccaacacatacaatgtggtcctccagcttttgttgaagggaaagaagcaccgagaggcagcggcaatatttagcgagatggtcaagaacgaatgttggccaaacgagggaaattgttcacttgcacttcgcatgtttttggatacacactattgggagactgggatcaaagtctggtgctgcatggtggagaatggcttgccacctttacaggagtgtgggaacatgcttgtagcaaagctgaaggatgacaggctacctgaggcatgcaaatatgcagaagacatgattgatcggggtatcaagttgagttcagcgacactgtccaagctgaagcagcgcctgcagaggattaagaaaggagagatccatgatcacctgcttgcaaaatggaaggcacattagtttgttgtgctcccctcgtatgggtaacctggtgcgatctcagtgttgacaatgaggttgagccttttatcactctgcaacgtttcaaacaacagttggaagtctctttctagtttctacattgaaattatcatattaatcagctggagcatttgggtctcaaggagtgagctggaacatcttccaagaaattctaccgtctgtatcaaatggctaagcctttttcaagaaagagtttgcccaggttatccatagagcatagaagaaatatttccttgaagaatgactagagcgtcagttgtggtctttttttaatatcttttgtgtcctttttttgtttcatgaattttgttgcttgcagctgtctggctgcaatttaggtagctgttccttttatgtatttgcataattatcaatgcaacattctaggcgtaaaagtgcattctc

SEQ ID NO: 16072 - protein, 281 aa, Zea mays subsp. mays
  peptide (1)..(281): Ceres Seq. ID no. 12367755
MPTPTPSSSRAARPPPICGLRARCSTKWCRPLDFILTTCLPMTPSSLRLFQVTPPRRYREAMEYLNVLSRHGCSPGEKFFRAALAAHLEARQLRGAMNLWDDFVGRRGLVPDMEMYNTMIKLQGSLGHAELIVGYLDDMISNGVFPDTNTYNVVLQLLLKGKKHREAAAIFSEMVKNECWPNEGNCSLALRMFLDTHYWETGIKVWCCMVENGLPPLQECGNMLVAKLKDDRLPEACKYAEDMIDRGIKLSSATLSKLKQRLQRIKKGEIHDHLLAKWKAH

SEQ ID NO: 16073 - protein, 240 aa, Zea mays subsp. mays
  peptide (1)..(240): Ceres Seq. ID no. 12367756
MTPSSLRLFQVTPPRRYREAMEYLNVLSRHGCSPGEKFFRAALAAHLEARQLRGAMNLWDDFVGRRGLVPDMEMYNTMIKLQGSLGHAELIVGYLDDMISNGVFPDTNTYNVVLQLLLKGKKHREAAAIFSEMVKNECWPNEGNCSLALRMFLDTHYWETGIKVWCCMVENGLPPLQECGNMLVAKLKDDRLPEACKYAEDMIDRGIKLSSATLSKLKQRLQRIKKGEIHDHLLAKWKAH

SEQ ID NO: 16074 - protein, 220 aa, Zea mays subsp. mays
  peptide (1)..(220): Ceres Seq. ID no. 12367757
MEYLNVLSRHGCSPGEKFFRAALAAHLEARQLRGAMNLWDDFVGRRGLVPDMEMYNTMIKLQGSLGHAELIVGYLDDMISNGVFPDTNTYNVVLQLLLKGKKHREAAAIFSEMVKNECWPNEGNCSLALRMFLDTHYWETGIKVWCCMVENGLPPLQECGNMLVAKLKDDRLPEACKYAEDMIDRGIKLSSATLSKLKQRLQRIKKGEIHDHLLAKWKAH

SEQ ID NO: 16075 - DNA, 1208 bp, Zea mays subsp. mays
  misc_feature (1)..(1208): Ceres Seq. ID no. 12373055
  misc_feature (1)..(1208): Ortholog of  Ceres SEQ ID NO 13596902 as cited in SEQ ID NO 62521
atcagactaaacaagacctcggtcctcggcttgacctgttgctgttggccatacctcctctctcgcctccggtcagatcagattagcctccatggccgccgatcgccgcttcaagatctttgcagccgccgatggcttcggccagccactcaaggacgccgtcgtcgcttatctccgcgcccaccccgccgtcgccgaggtcgttgacctcggcgtcgacaagtactacgccgccgccgcagccgtcgcccgacacgtctcctctcccgactcggagcccgacgctcccgagttccgcggcgtggtcgtctgcggcaccggcgccggcgtctgcatcttcgccaacaagtacccgcgcgtctacgccacccactgcgcttcccccgccgacgccgtcaacacacgctccatcaacgcctgcaacgtcctcgctctctccggaatcgccacgcagcccgacgccgcggccgccatagccgattcctggctcgccacgcccttccgcgccccttgccccgcctccggcgacgcgccctggccggaggacatccaggggttcttcgacaccgcgccagacgagatggccgccatcccggaggcggagggtgccccggactcggtctgcgccatctgctgtctcaggaacgggatggagttcgagccggtggggattatgcctggcggcgagatgcggatcgtgcgggagagccccacctcggcgtacgtccgcttcaaggctggcagtgtggagccagcgcaccaccacacctttggccacgacctggtggtcatcaagggcaagaagaaggtttggaacctcaccaagaaggaaagctacgacctggtggacggagattttctcttcacacctgccggggatgtgcacagggtcaagtactttgaggacacagagttcttcatccgttgggatggccactgggacatctttctcgacgaggatctcgacactgcacgcagtgccattgacgcggagcttgcagctgccagcaagtgagatcatgccatctatgtgcagtgatggcaacgcttctgaaggtgttatgctcacatatcctcatttgggattgtgattgatggtcttgcttccataatgttagttattcgaactctgtgtatgatcctcatcgtcctgtcttgttattttgtggaattatggttattgacaacgatgatggtacaatttggtt

SEQ ID NO: 16076 - protein, 307 aa, Zea mays subsp. mays
  peptide (1)..(307): Ceres Seq. ID no. 12373056
MAADRRFKIFAAADGFGQPLKDAVVAYLRAHPAVAEVVDLGVDKYYAAAAAVARHVSSPDSEPDAPEFRGVVVCGTGAGVCIFANKYPRVYATHCASPADAVNTRSINACNVLALSGIATQPDAAAAIADSWLATPFRAPCPASGDAPWPEDIQGFFDTAPDEMAAIPEAEGAPDSVCAICCLRNGMEFEPVGIMPGGEMRIVRESPTSAYVRFKAGSVEPAHHHTFGHDLVVIKGKKKVWNLTKKESYDLVDGDFLFTPAGDVHRVKYFEDTEFFIRWDGHWDIFLDEDLDTARSAIDAELAAASK

SEQ ID NO: 16077 - DNA, 1479 bp, Zea mays subsp. mays
  misc_feature (1)..(1479): Ceres Seq. ID no. 12369538
  misc_feature (1)..(1479): Ortholog of  Ceres SEQ ID NO 14302008 as cited in SEQ ID NO 56021
actttgaaatttgtccgtccatacgaactctacgactacgagcctactactctactactgcctacggaggagagagagagatttcatgagttcgtgttcagttagtcttggtgcaccagttccacccaccaccggatataggtcatgccccttataagctcgacacaggggcaggcacaccgcacagcaccgcaccgcactgcatcggtcgccagccgagccgagccgagccctgctctctcctccagctccccaaatcacactccgccatggccggcacgtgcgctcacgtcgagttcctccgcgcgcagccggcgtgggcgctggcgctggccgcggtgggcctgctcgtggccgtgcgcgccgccgcccgcttcgcgctctgggtctacgccgcgttcctccgcccgggcaagcccctgcgccgccgctacggcgcctgggccgtcgtgacgggcgccaccgacggcatcggccgcgccgtcgccttccgcctcgccgcgtccgggctcgggctcgtcctcgtcggccgcaaccaggagaagctggccgccgtcgccgccgagatcaaggccaggcaccccaaggtccccgaggtgcggactttcgtgctcgacttcgccggcgaggggctggccgccgccgtcgaggcgctcaaggactccatccggggcctcgacgtcggcgtgctcgtcaacaacgccggcgtgtcctacccgtacgcgcgctacttccacgaggtggacgaggagctgatgcgcaccctcatccgggtcaacgtcgagggcgtcacgcgtgtcacgcacgccgtgctgccggccatggtcgagaggaagcgcggcgccattgtcaacatcggctccggcgccgcctccgtcgtgccttctgatccgctctactccgtctacgccgctaccaaagcgtatgttgaccaattctcaagatgcctctatgttgagtacaagagcaagggtattgatgtgcaatgccaggtgcccttatacgtggcgacaaagatggcatccatcaggaagtcttccttcatggtcccatctgctgacacctatgctcgtgctgccgttcgtcacattggatacgagcctaggtgcacaccatactggccacactctgtcgtgtggttcttgatctccattcttcccgagtcccttatcgacagcgtgcgcctgggcatgtgcattaagatccgcaagaaggggctggccaaggacgccaagaagaaggcgctgtgattgatgtttcagaatgcatgttcagattcgcacatttcctcatcacctgtagtagacacgtgccttgctgtagtcactttattagctaccattacctcctgagtctgttaagaatcgagaatgtcattgttccatccgcggttatgatgatgaaaaatacgattcttcaattcaaaatgtaacactaatacgagtaatgatgcatgaaattaacttgaagaagttgtgc

SEQ ID NO: 16078 - protein, 326 aa, Zea mays subsp. mays
  peptide (1)..(326): Ceres Seq. ID no. 12369539
MAGTCAHVEFLRAQPAWALALAAVGLLVAVRAAARFALWVYAAFLRPGKPLRRRYGAWAVVTGATDGIGRAVAFRLAASGLGLVLVGRNQEKLAAVAAEIKARHPKVPEVRTFVLDFAGEGLAAAVEALKDSIRGLDVGVLVNNAGVSYPYARYFHEVDEELMRTLIRVNVEGVTRVTHAVLPAMVERKRGAIVNIGSGAASVVPSDPLYSVYAATKAYVDQFSRCLYVEYKSKGIDVQCQVPLYVATKMASIRKSSFMVPSADTYARAAVRHIGYEPRCTPYWPHSVVWFLISILPESLIDSVRLGMCIKIRKKGLAKDAKKKAL

SEQ ID NO: 16079 - protein, 164 aa, Zea mays subsp. mays
  peptide (1)..(164): Ceres Seq. ID no. 12369540
MRTLIRVNVEGVTRVTHAVLPAMVERKRGAIVNIGSGAASVVPSDPLYSVYAATKAYVDQFSRCLYVEYKSKGIDVQCQVPLYVATKMASIRKSSFMVPSADTYARAAVRHIGYEPRCTPYWPHSVVWFLISILPESLIDSVRLGMCIKIRKKGLAKDAKKKAL

SEQ ID NO: 16080 - DNA, 1548 bp, Zea mays subsp. mays
  misc_feature (1)..(1548): Ceres Seq. ID no. 12353157
  misc_feature (1)..(1548): Ortholog of  Ceres SEQ ID NO 13594345 as cited in SEQ ID NO 58043
  misc_feature (1)..(1548): Ortholog of  Ceres SEQ ID NO 15171614 as cited in SEQ ID NO 60106
  misc_feature (1)..(1548): Ortholog of  Ceres SEQ ID NO 13597574 as cited in SEQ ID NO 64677
  misc_feature (1)..(1548): Ortholog of  Ceres SEQ ID NO 13597843 as cited in SEQ ID NO 64850
  misc_feature (1)..(1548): Ortholog of  Ceres SEQ ID NO 13597678 as cited in SEQ ID NO 65375
  misc_feature (1)..(1548): Ortholog of  Ceres SEQ ID NO 13662880 as cited in SEQ ID NO 65422
  misc_feature (1)..(1548): Ortholog of  Ceres SEQ ID NO 13596180 as cited in SEQ ID NO 67941
  misc_feature (1)..(1548): Ortholog of  Ceres SEQ ID NO 13591190 as cited in SEQ ID NO 68044
  misc_feature (1)..(1548): Ortholog of  Ceres SEQ ID NO 13595961 as cited in SEQ ID NO 68223
  misc_feature (1)..(1548): Ortholog of  Ceres SEQ ID NO 14313563 as cited in SEQ ID NO 68700
cttcggccacacaacccaggtgttcgaccatgtcctcgccggcaccatcatcgccctccaggtccagccacggctcacgaggctccccgcgcatcgtcctcttcccgagcgctggcatgggccacctggtcccgttcacccgcctcgccgtcgcgctttcccggccacggttgcgagatctccctcctgacggcgctgcccacagtttcgtccgcggagtcccgccacatcgccgcgctctacgctgcgttccccgccatccggcagctggacctccgctttgcccctttcgacgcgtcgtccgaattccccggcgccgatccattctacctccgctacgaggccctgcgccgctgcgcgccctcgctcctcggcccgctcctcgctggcgcaggcgcgtcggctctcgtcgtggacatggcgctggcctccgtggccatacccgtagccagggagctccacgtcccgtgcttcgtcttcttcaccgcgtcggccacgatgctctcattcaaagcctactttcccacctacctcgacgacgtcggtgccggacatggcgttggcgacgttgacgtgcccggcgtgtaccgcatcccaagttcgtccgtcccacaggcgctgcatgatcccgacaacatcttcacccggcagttcgtcgcgaatggacgggcgctcgcgacagccgacggcctcctggtcaacgccttccacgccatggagccggaggccgtcgaggcactacagggtcgcttcgtgctctccgttttgccgcccgtgttcgccgtggggccgcttatgccggtgaacgacctccgggagacaggggaggcagcgcaaaaacaggggaactatagggcgtggctggacgagcagccgccgcggtctgtggtgtatgtcagctttggcagccgcaaggctctccccaaggaccagatcaaggagctcgccgccggactggaagcgtgtggccaccgcttcttgtgggttgtgaagggcgctgtcgtggacagggatgacgctggggagctcagcgaactgcttggcgaggccttcctgcggcgcgtgcaaggccgtggcctggtgaccaagtcatgggtcgagcaagaggaggtgctcaggcacccggccgtggcgctgttcgtcagccactgcggatggaactcggtgacggaggcagtgagcagcggcgtgccagtgctggcgtggccgaggttcgccgaccagcgagtgaacgcccgcgtggtggtccgttgcgggctcggtgtgtgggctgagcagtggagctgggagggggaagaggcgctggtgagagcggaggagatcgcagcgctggtgatggaggctatgggagacgacgcgatggcagtgaaagcggcgaacgtccgcgaggctgcgtcgagagccgtggtggacggcggcacgagctaccgatgcctggcggcgttcgtgcgtcgttgcaccgcgtgattgcgtgaagttatataaaaaaaaaacttatataacttcacgttcgtgtcgatccgcttcataaacttttaaaatgtgcct

SEQ ID NO: 16081 - protein, 488 aa, Zea mays subsp. mays
  peptide (1)..(488): Ceres Seq. ID no. 12353158
LRPHNPGVRPCPRRHHHRPPGPATAHEAPRASSSSRALAWATWSRSPASPSRFPGHGCEISLLTALPTVSSAESRHIAALYAAFPAIRQLDLRFAPFDASSEFPGADPFYLRYEALRRCAPSLLGPLLAGAGASALVVDMALASVAIPVARELHVPCFVFFTASATMLSFKAYFPTYLDDVGAGHGVGDVDVPGVYRIPSSSVPQALHDPDNIFTRQFVANGRALATADGLLVNAFHAMEPEAVEALQGRFVLSVLPPVFAVGPLMPVNDLRETGEAAQKQGNYRAWLDEQPPRSVVYVSFGSRKALPKDQIKELAAGLEACGHRFLWVVKGAVVDRDDAGELSELLGEAFLRRVQGRGLVTKSWVEQEEVLRHPAVALFVSHCGWNSVTEAVSSGVPVLAWPRFADQRVNARVVVRCGLGVWAEQWSWEGEEALVRAEEIAALVMEAMGDDAMAVKAANVREAASRAVVDGGTSYRCLAAFVRRCTA

SEQ ID NO: 16082 - protein, 349 aa, Zea mays subsp. mays
  peptide (1)..(349): Ceres Seq. ID no. 12353159
MALASVAIPVARELHVPCFVFFTASATMLSFKAYFPTYLDDVGAGHGVGDVDVPGVYRIPSSSVPQALHDPDNIFTRQFVANGRALATADGLLVNAFHAMEPEAVEALQGRFVLSVLPPVFAVGPLMPVNDLRETGEAAQKQGNYRAWLDEQPPRSVVYVSFGSRKALPKDQIKELAAGLEACGHRFLWVVKGAVVDRDDAGELSELLGEAFLRRVQGRGLVTKSWVEQEEVLRHPAVALFVSHCGWNSVTEAVSSGVPVLAWPRFADQRVNARVVVRCGLGVWAEQWSWEGEEALVRAEEIAALVMEAMGDDAMAVKAANVREAASRAVVDGGTSYRCLAAFVRRCTA

SEQ ID NO: 16083 - protein, 322 aa, Zea mays subsp. mays
  peptide (1)..(322): Ceres Seq. ID no. 12353160
MLSFKAYFPTYLDDVGAGHGVGDVDVPGVYRIPSSSVPQALHDPDNIFTRQFVANGRALATADGLLVNAFHAMEPEAVEALQGRFVLSVLPPVFAVGPLMPVNDLRETGEAAQKQGNYRAWLDEQPPRSVVYVSFGSRKALPKDQIKELAAGLEACGHRFLWVVKGAVVDRDDAGELSELLGEAFLRRVQGRGLVTKSWVEQEEVLRHPAVALFVSHCGWNSVTEAVSSGVPVLAWPRFADQRVNARVVVRCGLGVWAEQWSWEGEEALVRAEEIAALVMEAMGDDAMAVKAANVREAASRAVVDGGTSYRCLAAFVRRCTA

SEQ ID NO: 16084 - DNA, 1993 bp, Zea mays subsp. mays
  misc_feature (1)..(1993): Ceres Seq. ID no. 13492718
  misc_feature (1)..(1993): Ortholog of  Ceres SEQ ID NO 14316204 as cited in SEQ ID NO 59644
agtgcgcgcctcgtgctcgtgctcccccgagcagactagaccagcgcgctagcgccagcaaggccaaggcgagggaggggcgatgctcgcccgatctgctacagccgccgccgccgccgggatctgactgtgattaaggatgtcggcgtcgcggagcgggaggatcaggcgggccgggagcgtggcgctcggggactttctgcggcgggaggcgtcggcggagcgggccgcgttgggaggcggcgagcggccctcggtcgcggcggggcadgcctgccgggcgaagaagggcgaggacttcgcgctgctcaagcccgcctgcgagcgacgccccggcgcgccgtccacctccttctccgccttcgccctgttcgatgggcataacgggagcgccgcwkcggtgtacgccgaggagcacctcctcggcaacgtgctcggctgcgtcccggccgatctgagcagggacgactggctcgccgcgctcctaagggcgctcgtcgcggggttcgtcaagaccgacaaggattttcaaactaaagctcattcctcggggacaaccgtgacacttgccataattgatggctccgttgtaactgttgcgtccgttggtgattcacgttgtgtccttgatgctgcgggatccatctactatttgtcggctgaccaccgctttgacgctaatgaagaggaggttggacgtgtaaccgaatgcggaggtgaagttggaaggctaaatgttgtcggtggtgctgagattggtccccttagatgttggccaggtggtctatgcctctcaagatcgattggtgaccaggacgtaggtgaatttatcattccggttccttatgtgaagcaaattaagctgtctaacgctggaggccgtcttattatttcaagtgacggtgtttgggatgctttgactgcggaaatggcttttagatgtgcacgggggcttcctcctgaggctgcagccgagcaaattgttaaagaagcagttgaatcaaaaggattgagagatgatacaacttgcattgtcattgacataatcccaccagagaaacaaaaatgcactatagaatctccaaaaacgccaggaaaaggccttgtacttctaaaaaatttcttcttaaggaaaacggcatctggttcattgtctctcgctgacaaggataattatcccgagccagatttcgtggaggaggtctttgaggatggatgcccatccctttcgaggaggcttaattctgaatatcctgtccgagatatgttcaagctttttgcatgtgcaatttgtcaaattgacttggagtctggccaaggcatatccatacacgagggttcgtcaaaggcagggaagctgcgtccctgggatggccctttcctttgccacagttgccaggaaaagaaagaggcgatggaggggaagcgtcactcgcgagactcctcgtcaagaaatagcgggtcaagtgaatagtgactaaagccaggagtcatcttgaggcgaccacctagcgtgtgacgagctaactcttgttgcagttgtcattgtagcagcacttcctctatacatggattaccattggacatagacagatgttggaacttggatggtgccatgcgtacatatgttggagctaatgcggtaatggaccgtcggccaaattcaatcgcctctaggtaccacaccggcgacggcgtcttcggcaaggcttgtagcagtaactcatgcaggtagtgatgacaagggactgttagcgaagaatgtcgacagtggccaatggtcatgtaaattgttcatcgtatagagaggtgcaagtgacaaatagccacggttttgtaattctgagctaggattagctattgagaccctgtaattcgtctgggcagacctcaaactagaggtcaacaacgtagcctggcctattgtagaatgtatcttgctctacagtcttcatgatccaacgctgtaattaggctgttgccagtgcttccc

SEQ ID NO: 16085 - protein, 444 aa, Zea mays subsp. mays
  peptide (1)..(444): Ceres Seq. ID no. 15222889
  misc_feature (44)..(44): Xaa is any aa, unknown or other
  misc_feature (86)..(86): Xaa is any aa, unknown or other
  misc_feature (87)..(87): Xaa is any aa, unknown or other
MSASRSGRIRRAGSVALGDFLRREASAERAALGGGERPSVAAGXACRAKKGEDFALLKPACERRPGAPSTSFSAFALFDGHNGSAXXVYAEEHLLGNVLGCVPADLSRDDWLAALLRALVAGFVKTDKDFQTKAHSSGTTVTLAIIDGSVVTVASVGDSRCVLDAAGSIYYLSADHRFDANEEEVGRVTECGGEVGRLNVVGGAEIGPLRCWPGGLCLSRSIGDQDVGEFIIPVPYVKQIKLSNAGGRLIISSDGVWDALTAEMAFRCARGLPPEAAAEQIVKEAVESKGLRDDTTCIVIDIIPPEKQKCTIESPKTPGKGLVLLKNFFLRKTASGSLSLADKDNYPEPDFVEEVFEDGCPSLSRRLNSEYPVRDMFKLFACAICQIDLESGQGISIHEGSSKAGKLRPWDGPFLCHSCQEKKEAMEGKRHSRDSSSRNSGSSE

SEQ ID NO: 16086 - DNA, 1239 bp, Zea mays subsp. mays
  misc_feature (1)..(1239): Ceres Seq. ID no. 12354519
  misc_feature (1)..(1239): Ortholog of  Ceres SEQ ID NO 12609045 as cited in SEQ ID NO 51314
  misc_feature (1)..(1239): Ortholog of  Ceres SEQ ID NO 14316312 as cited in SEQ ID NO 60042
  misc_feature (1)..(1239): Ortholog of  Ceres SEQ ID NO 13595877 as cited in SEQ ID NO 67702
  misc_feature (1)..(1239): Ortholog of  Ceres SEQ ID NO 13654367 as cited in SEQ ID NO 67993
gtgacattgttgtgcgccttccactacagtaatggaagcaggcgccggggaagcagcaccaagcgcgccgcgcagactgaccctgccgtggaaggtgcggctcctgctcctctgcctcgatgtcgtcgccggtctctcgatgcgtcgcgacggcaccatcaaccgctccatcttcaacctcttcgaccttcgtgccaccgccagcacgcgcccggacaggcagggcgtccggtccgccgacgtggacgcgtcgcgcggcctgtgggcgcgcgtgttctggccgtcgccggagtcgtccgcggccccgctcccagtcgtggtatacttccacggcggcgccttcacgctgctctctgcggcctcgtacgtctacgacgccatgtgccgccggttctgccgcgagctgggcgccgtcgtcgtgtccgtcaactaccgcctcgcacccgagcaccgctggcccgccgcgtacgaggacggcgtcgccatgcttcgatacctcgcctccgcgggtctccccgacagcgtcgacgtccccgtggacctctcccgctgcttcctcgccggggacagcgccggcgccaacatcgcccaccacgtggcgcagcgctggacgacggcctcctccccgccgcggtccatccccgtccacctcgctggcgccatcctggtgcagccgtactttggcggcgaggagcggacggaagctgaggtcaggctggatgggaacgtgccggtggtgaccgtgcgtggctcggactggatgtggcgggcgttcctgccggaaggcgccgatcggaaccactccgccgcgcacgtgacagacgacaacgccgacctggcggacggctttccgccggtgatggtggtgatcggtggcttcgacccgctgcaggagtggcagaggcggtacgccgacgtgctgcggaggagggggaaggaggtaagggtggtggagttcccggacgccattcacactttcttcctcttccccgagctcaccgatcatggtacgctcgtggaggcgatgaaggcgttcatacgcgagcaacgcatctgatctaattctgcctcacggtcacggatcaccaacctacgtggacctacatggtccgtgcaaataattttgtttcccatgcacgtaatggtccctacatggtccgtgcaaataatttctctataaaccactattcaagtctcccatatatttattcagttcatcgagcatctcttctagatctt

SEQ ID NO: 16087 - protein, 341 aa, Zea mays subsp. mays
  peptide (1)..(341): Ceres Seq. ID no. 12354520
MEAGAGEAAPSAPRRLTLPWKVRLLLLCLDVVAGLSMRRDGTINRSIFNLFDLRATASTRPDRQGVRSADVDASRGLWARVFWPSPESSAAPLPVVVYFHGGAFTLLSAASYVYDAMCRRFCRELGAVVVSVNYRLAPEHRWPAAYEDGVAMLRYLASAGLPDSVDVPVDLSRCFLAGDSAGANIAHHVAQRWTTASSPPRSIPVHLAGAILVQPYFGGEERTEAEVRLDGNVPVVTVRGSDWMWRAFLPEGADRNHSAAHVTDDNADLADGFPPVMVVIGGFDPLQEWQRRYADVLRRRGKEVRVVEFPDAIHTFFLFPELTDHGTLVEAMKAFIREQRI

SEQ ID NO: 16088 - protein, 305 aa, Zea mays subsp. mays
  peptide (1)..(305): Ceres Seq. ID no. 12354521
MRRDGTINRSIFNLFDLRATASTRPDRQGVRSADVDASRGLWARVFWPSPESSAAPLPVVVYFHGGAFTLLSAASYVYDAMCRRFCRELGAVVVSVNYRLAPEHRWPAAYEDGVAMLRYLASAGLPDSVDVPVDLSRCFLAGDSAGANIAHHVAQRWTTASSPPRSIPVHLAGAILVQPYFGGEERTEAEVRLDGNVPVVTVRGSDWMWRAFLPEGADRNHSAAHVTDDNADLADGFPPVMVVIGGFDPLQEWQRRYADVLRRRGKEVRVVEFPDAIHTFFLFPELTDHGTLVEAMKAFIREQRI

SEQ ID NO: 16089 - protein, 235 aa, Zea mays subsp. mays
  peptide (1)..(235): Ceres Seq. ID no. 12354522
VTLLCAFHYSNGSRRRGSSTKRAAQTDPAVEGAAPAPLPRCRRRSLDASRRHHQPLHLQPLRPSCHRQHAPGQAGRPVRRRGRVARPVGARVLAVAGVVRGPAPSRGILPRRRLHAALCGLVRLRRHVPPVLPRAGRRRRVRQLPPRTRAPLARRVRGRRRHASIPRLRGSPRQRRRPRGPLPLLPRRGQRRRQHRPPRGAALDDGLLPAAVHPRPPRWRHPGAAVLWRRGADGS

SEQ ID NO: 16090 - DNA, 529 bp, Zea mays subsp. mays
  misc_feature (1)..(529): Ceres Seq. ID no. 1555861
  misc_feature (1)..(529): Ortholog of  Ceres SEQ ID NO 12584790 as cited in SEQ ID NO 62648
aaaccgaggccacaggccaccaccattccttccttgttccttccccagctccgcaggctgctcatcgccctccctccgcgcccccgatccagatccagatccaggggcttgtcatggcatccaaacgtatcctcaaggaattaaaggacttgcaaaaggaccctccaacatcatgcagtgcaggtcctgctggtgaggatatgttccactggcaggcaaccatcatgggtcctcctgatagtccatatgctggaggtgttttcttggtgaacattcatttcccgccagactaccccttcaagcctccaaaggtatcttttaagacgaaggtcttccatccaaacatcaatagtaatggaagcatatgtcttgacattcttaaggagcagtggagccctgctttgacaatctctaaggtgctgggacaatttagtactaactttactagtatatacactgttcatattatagctttaaatgacttgtgcacagtaaatgattagcttaaaatgcatgctgtgatgtttat

SEQ ID NO: 16091 - protein, 166 aa, Zea mays subsp. mays
  peptide (1)..(166): Ceres Seq. ID no. 1555862
TEATGHHHSFLVPSPAPQAAHRPPSAPPIQIQIQGLVMASKRILKELKDLQKDPPTSCSAGPAGEDMFHWQATIMGPPDSPYAGGVFLVNIHFPPDYPFKPPKVSFKTKVFHPNINSNGSICLDILKEQWSPALTISKVLGQFSTNFTSIYTVHIIALNDLCTVND

SEQ ID NO: 16092 - protein, 129 aa, Zea mays subsp. mays
  peptide (1)..(129): Ceres Seq. ID no. 1555863
MASKRILKELKDLQKDPPTSCSAGPAGEDMFHWQATIMGPPDSPYAGGVFLVNIHFPPDYPFKPPKVSFKTKVFHPNINSNGSICLDILKEQWSPALTISKVLGQFSTNFTSIYTVHIIALNDLCTVND

SEQ ID NO: 16093 - protein, 100 aa, Zea mays subsp. mays
  peptide (1)..(100): Ceres Seq. ID no. 1555864
MFHWQATIMGPPDSPYAGGVFLVNIHFPPDYPFKPPKVSFKTKVFHPNINSNGSICLDILKEQWSPALTISKVLGQFSTNFTSIYTVHIIALNDLCTVND

SEQ ID NO: 16094 - DNA, 1400 bp, Zea mays subsp. mays
  misc_feature (1)..(1400): Ceres Seq. ID no. 12391337
  misc_feature (1)..(1400): Ortholog of  Ceres SEQ ID NO 13596198 as cited in SEQ ID NO 68488
gcacgagaccattacctagaacatcctaatcgaaaaatagtattcgacaggctcacaagtcacaattccagctcaggccaccagcaagcacatcgcaaaggagaacagaacagaacagagagccatggcggcggtcgccgtgagcggggggcactggaggaggctgcggacgctggggcgcggcgcgtcgggcgccgtggtgtcgctggcgtgggacgccgcgtcgggggagctggtcgcggtcaagtcggccggcgcgatcggcgcggcggcgctgaggcgggagcacgcggtgctggccgggctgcgctcgccgcacgtcgtgcgctgcgtcggcggcggcgatgcggcggaggaggggtcgtcgtaccagctcttcctcgagtacgcccccggcgggtcgctcnccgacgaggtggcccggagcgggggctccctcggggagcgcgccgtccgcgcgttcgccgccgacgtgctgcgggggctggcgtacctccacgcccgctccgtcgtgcacggcgacgtcaaggcgcggaacgtgctggtcggcgccggcggccgcgccatgctcgccgacttcgggtgcgccagggcgctgtccggctccggctccgcgcgccggccgatcgtcggcgccacgccggcgttcatggcgcccgaggtggcccgcggggaggaccagggcccccccgccgacgtctgggcgctgggctgcaccgtcgtcgagatggccaccggccgcgccccgttcgncggcatgggtggcgctggcggcgccctcnnggcggtccantggatcgggtacacggacgccgtgccggaggtgccggcctggctgtcgcctgaggccggggacttcctggcccactgcttcgccagagacgccgccgatcggtggaccgccgcgcggctcctggagcacccgttnngtggcgttcgcccgccacgangacaaggccccgcggccgtctcccaagagcgctctggacgccgccgcgttctgggagtccgaaacagagtccgaggacgaagcgtcagggagcgcgtcggagaggatcgagtcactggcgtgctccgccggggccttgcccgactgggacggcgagggaggatggatcgacgtgctcggcgagcactgcggcgcgccaggcaaagcgtccagcgtcctggtggcggtgccagctggggagatggatgtcggcggcggtctacccagtgaagatggactggaagcagaggaggtnccgttcggtggcggcggtgttccagttccagttccagcagctgatgcttcggctgggcgtcatgagaaacactgttcgagttccgactgtcatgcgctctcctgtcagctagtaccttgtaatctagtctttaatgcaataaagttatgggttccc

SEQ ID NO: 16095 - protein, 364 aa, Zea mays subsp. mays
  peptide (1)..(364): Ceres Seq. ID no. 12391338
  misc_feature (95)..(95): Xaa is any aa, unknown or other
  misc_feature (210)..(210): Xaa is any aa, unknown or other
  misc_feature (220)..(220): Xaa is any aa, unknown or other
  misc_feature (223)..(223): Xaa is any aa, unknown or other
  misc_feature (268)..(268): Xaa is any aa, unknown or other
  misc_feature (269)..(269): Xaa is any aa, unknown or other
  misc_feature (276)..(276): Xaa is any aa, unknown or other
MAAVAVSGGHWRRLRTLGRGASGAVVSLAWDAASGELVAVKSAGAIGAAALRREHAVLAGLRSPHVVRCVGGGDAAEEGSSYQLFLEYAPGGSLXDEVARSGGSLGERAVRAFAADVLRGLAYLHARSVVHGDVKARNVLVGAGGRAMLADFGCARALSGSGSARRPIVGATPAFMAPEVARGEDQGPPADVWALGCTVVEMATGRAPFXGMGGAGGALXAVXWIGYTDAVPEVPAWLSPEAGDFLAHCFARDAADRWTAARLLEHPXXGVRPPRXQGPAAVSQERSGRRRVLGVRNRVRGRSVRERVGEDRVTGVLRRGLARLGRRGRMDRRARRALRRARQSVQRPGGGASWGDGCRRRSTQ

SEQ ID NO: 16096 - protein, 352 aa, Zea mays subsp. mays
  peptide (1)..(352): Ceres Seq. ID no. 12391339
  misc_feature (21)..(21): Xaa is any aa, unknown or other
  misc_feature (137)..(137): Xaa is any aa, unknown or other
  misc_feature (146)..(146): Xaa is any aa, unknown or other
  misc_feature (147)..(147): Xaa is any aa, unknown or other
  misc_feature (150)..(150): Xaa is any aa, unknown or other
  misc_feature (195)..(195): Xaa is any aa, unknown or other
  misc_feature (202)..(202): Xaa is any aa, unknown or other
  misc_feature (300)..(300): Xaa is any aa, unknown or other
MRRRRGRRTSSSSSTPPAGRXPTRWPGAGAPSGSAPSARSPPTCCGGWRTSTPAPSCTATSRRGTCWSAPAAAPCSPTSGAPGRCPAPAPRAGRSSAPRRRSWRPRWPAGRTRAPPPTSGRWAAPSSRWPPAAPRSXAWVALAAPXXRSXGSGTRTPCRRCRPGCRLRPGTSWPTASPETPPIGGPPRGSWSTRXVAFARHXDKAPRPSPKSALDAAAFWESETESEDEASGSASERIESLACSAGALPDWDGEGGWIDVLGEHCGAPGKASSVLVAVPAGEMDVGGGLPSEDGLEAEEXPFGGGGVPVPVPAADASAGRHEKHCSSSDCHALSCQLVPCNLVFNAIKLWVP

SEQ ID NO: 16097 - protein, 281 aa, Zea mays subsp. mays
  peptide (1)..(281): Ceres Seq. ID no. 12391340
  misc_feature (136)..(136): Xaa is any aa, unknown or other
  misc_feature (251)..(251): Xaa is any aa, unknown or other
  misc_feature (261)..(261): Xaa is any aa, unknown or other
  misc_feature (265)..(265): Xaa is any aa, unknown or other
ARDHYLEHPNRKIVFDRLTSHNSSSGHQQAHRKGEQNRTESHGGGRRERGALEEAADAGARRVGRRGVAGVGRRVGGAGRGQVGRRDRRGGAEAGARGAGRAALAARRALRRRRRCGGGGVVVPALPRVRPRRVAXRRGGPERGLPRGARRPRVRRRRAAGAGVPPRPLRRARRRQGAERAGRRRRPRHARRLRVRQGAVRLRLRAPADRRRHAGVHGARGGPRGGPGPPRRRLGAGLHRRRDGHRPRPVXRHGWRWRRPXGGPXDRVHGRRAGGAGLAVA

SEQ ID NO: 16098 - DNA, 2365 bp, Zea mays subsp. mays; identical to SEQ ID NO: 3951
  misc_feature (1)..(2365): Ceres Seq. ID no. 13635021
  misc_feature (1)..(2365): Ortholog of  Ceres SEQ ID NO 14303276 as cited in SEQ ID NO 1264
  misc_feature (1)..(2365): Ortholog of  Ceres SEQ ID NO 15170536 as cited in SEQ ID NO 52791
  misc_feature (1)..(2365): Ortholog of  Ceres SEQ ID NO 12465083 as cited in SEQ ID NO 68239
  misc_feature (1)..(2365): Ortholog of  Ceres SEQ ID NO 14309653 as cited in SEQ ID NO 0

SEQ ID NO: 16099 - protein, 699 aa, Zea mays subsp. mays; identical to SEQ ID NO: 3952
  peptide (1)..(699): Ceres Seq. ID no. 13635022

SEQ ID NO: 16100 - protein, 663 aa, Zea mays subsp. mays; identical to SEQ ID NO: 3953
  peptide (1)..(663): Ceres Seq. ID no. 13635023

SEQ ID NO: 16101 - protein, 548 aa, Zea mays subsp. mays; identical to SEQ ID NO: 3954
  peptide (1)..(548): Ceres Seq. ID no. 13635024

SEQ ID NO: 16102 - DNA, 514 bp, Zea mays subsp. mays
  misc_feature (1)..(514): Ceres Seq. ID no. 2789020
  misc_feature (1)..(514): Ortholog of  Ceres SEQ ID NO 12563124 as cited in SEQ ID NO 57104
gtgctctctcagaggtgggctggcttctcctccccctcttaccaagtcctcttcgggttagggttacttagggttttgtggaggggcgatggcggcggctgatgtggagtaccgttgcttcgtcggcgggcttgcctgggccaccagcaacgagtcgctggagaatgccttcgcctcctacggcgagatcctcgactccaaggtttgcttcgtcctcgctaggtttcattccgcggtctgtttgtgccgttggggctagatccgggtcgtggttcaacagatctgcttcgttttggtacagatctgcgttcgctcgaatcgagcatgacgttttcatgtgattatgcaggtcatcaccgaccgggagacggggaggtctcgcggcttcggcttcgttaccttctcctccgagaactccatgctcgacgctatcgagaacatgaacggcaaggagctcgacggccgtaacatcaccgttaaccaggcccagtccgtggcggtggcggtggcggcg

SEQ ID NO: 16103 - protein, 79 aa, Zea mays subsp. mays
  peptide (1)..(79): Ceres Seq. ID no. 2789021
MWSTVASSAGLPGPPATSRWRMPSPPTARSSTPRFASSSLGFIPRSVCAVGARSGSWFNRSASFWYRSAFARIEHDVFM

SEQ ID NO: 16104 - protein, 58 aa, Zea mays subsp. mays
  peptide (1)..(58): Ceres Seq. ID no. 2789022
MPSPPTARSSTPRFASSSLGFIPRSVCAVGARSGSWFNRSASFWYRSAFARIEHDVFM

SEQ ID NO: 16105 - protein, 56 aa, Zea mays subsp. mays
  peptide (1)..(56): Ceres Seq. ID no. 2789023
MAAADVEYRCFVGGLAWATSNESLENAFASYGEILDSKVCFVLARFHSAVCLCRWG

SEQ ID NO: 16106 - protein, 57 aa, Zea mays subsp. mays
  peptide (1)..(57): Ceres Seq. ID no. 2789024
MQVITDRETGRSRGFGFVTFSSENSMLDAIENMNGKELDGRNITVNQAQSVAVAVAA

SEQ ID NO: 16107 - DNA, 1648 bp, Zea mays subsp. mays; identical to SEQ ID NO: 9782
  misc_feature (1)..(1648): Ceres Seq. ID no. 12595157
  misc_feature (1)..(1648): Ortholog of  Ceres SEQ ID NO 13582619 as cited in SEQ ID NO 56520
  misc_feature (1)..(1648): Ortholog of  Ceres SEQ ID NO 12611392 as cited in SEQ ID NO 56826
  misc_feature (1)..(1648): Ortholog of  Ceres SEQ ID NO 14315846 as cited in SEQ ID NO 58094
  misc_feature (1)..(1648): Ortholog of  Ceres SEQ ID NO 14314632 as cited in SEQ ID NO 59923
  misc_feature (1)..(1648): Ortholog of  Ceres SEQ ID NO 13660872 as cited in SEQ ID NO 60830
  misc_feature (1)..(1648): Ortholog of  Ceres SEQ ID NO 15226831 as cited in SEQ ID NO 62916
  misc_feature (1)..(1648): Ortholog of  Ceres SEQ ID NO 12616221 as cited in SEQ ID NO 63291

SEQ ID NO: 16108 - protein, 338 aa, Zea mays subsp. mays; identical to SEQ ID NO: 9783
  peptide (1)..(338): Ceres Seq. ID no. 12595158
  misc_feature (230)..(230): Xaa is any aa, unknown or other

SEQ ID NO: 16109 - protein, 329 aa, Zea mays subsp. mays; identical to SEQ ID NO: 9784
  peptide (1)..(329): Ceres Seq. ID no. 12595159
  misc_feature (221)..(221): Xaa is any aa, unknown or other

SEQ ID NO: 16110 - protein, 317 aa, Zea mays subsp. mays; identical to SEQ ID NO: 9785
  peptide (1)..(317): Ceres Seq. ID no. 12595160
  misc_feature (209)..(209): Xaa is any aa, unknown or other

SEQ ID NO: 16111 - DNA, 1240 bp, Zea mays subsp. mays
  misc_feature (1)..(1240): Ceres Seq. ID no. 14309637
  misc_feature (1)..(1240): Ortholog of  Ceres SEQ ID NO 14301396 as cited in SEQ ID NO 51789
  misc_feature (1)..(1240): Ortholog of  Ceres SEQ ID NO 12610031 as cited in SEQ ID NO 55811
  misc_feature (1)..(1240): Ortholog of  Ceres SEQ ID NO 12619664 as cited in SEQ ID NO 66048
gcagcacacaacctaccacactcgcattgcattgcattgcattccttcagttcagtagtgtgctctgacagtgagatggcgagcgtgaaggttttcgggtcacccacctcggcggaggtcgcccgcgtgctcatgtgcctcttcgagaaggaggtggagttccagctgatccgcgtcgacgcctaccgcggcaccaagcgcatgccccagtacctcaagctgcagccgcaaggcgaggcgctcaccttcgaggacgagagcctcaccctctccgactccagggggatcctccgccacatctcccacaagtacgcgaagcagggcaacccgtacctgattggcacgggcgcgctggagcgggcgtccatcgagcagtggctgcagacggaggcgcagagcttcgacgcgcccagcgccgagatggtctacagcctcgccttcctgccgcccaccctgcccaggcagaacgacaacggcaacggcggcgcgttcaacgccagggaagccaccgtgggcagtaacgccgacgcgtccagcagcaagcgcggtgtggccgggtcacagccggcggcaagccagaccaaggtgagcgcgcagaaggaggaggagatgctgaagctgttcgagcagaggaagaaggacctggagaagctgctggacatctacgagcagcgcctggaggaggccacgttcctggccggcgacaacttcaccatcgccgacctgtcgcacctgccctacgcggaccacctcgtctccgacccgcgctcccgccgcatgttcgagtcccgcaagaacgtcagcaggtggtggcacgacgtctccggccgcgacacctggaagtacgtcaagaccctgcagcgcccgccgtccacgtccaccgacgccagcgccaagaacggccagctgggccagcagcagcacctgccgtcgtccaccgacggccacggcgtgaagagccaacggctggtccagaacgagcggcacttctagccgttgccgtcccttcccgccgacgaataaactacctgcgccgccgccaccgccgccgtccatcaacatggttcctgctgctgttcgtgtcgttttcatacgtcatacgtgtcttgctgcttttgaagctccgttcccgggtgcagggacctacgagtccattccgccgtttgctcattctgttcgtcgtgtaataaaatgaaaaccccaccccgttttgaatgaaattcaattctcagtgttgtgc

SEQ ID NO: 16112 - protein, 330 aa, Zea mays subsp. mays
  peptide (1)..(330): Ceres Seq. ID no. 14309638
AAHNLPHSHCIALHSFSSVVCSDSEMASVKVFGSPTSAEVARVLMCLFEKEVEFQLIRVDAYRGTKRMPQYLKLQPQGEALTFEDESLTLSDSRGILRHISHKYAKQGNPYLIGTGALERASIEQWLQTEAQSFDAPSAEMVYSLAFLPPTLPRQNDNGNGGAFNAREATVGSNADASSSKRGVAGSQPAASQTKVSAQKEEEMLKLFEQRKKDLEKLLDIYEQRLEEATFLAGDNFTIADLSHLPYADHLVSDPRSRRMFESRKNVSRWWHDVSGRDTWKYVKTLQRPPSTSTDASAKNGQLGQQQHLPSSTDGHGVKSQRLVQNERHF

SEQ ID NO: 16113 - protein, 305 aa, Zea mays subsp. mays
  peptide (1)..(305): Ceres Seq. ID no. 14309639
MASVKVFGSPTSAEVARVLMCLFEKEVEFQLIRVDAYRGTKRMPQYLKLQPQGEALTFEDESLTLSDSRGILRHISHKYAKQGNPYLIGTGALERASIEQWLQTEAQSFDAPSAEMVYSLAFLPPTLPRQNDNGNGGAFNAREATVGSNADASSSKRGVAGSQPAASQTKVSAQKEEEMLKLFEQRKKDLEKLLDIYEQRLEEATFLAGDNFTIADLSHLPYADHLVSDPRSRRMFESRKNVSRWWHDVSGRDTWKYVKTLQRPPSTSTDASAKNGQLGQQQHLPSSTDGHGVKSQRLVQNERHF

SEQ ID NO: 16114 - protein, 286 aa, Zea mays subsp. mays
  peptide (1)..(286): Ceres Seq. ID no. 14309640
MCLFEKEVEFQLIRVDAYRGTKRMPQYLKLQPQGEALTFEDESLTLSDSRGILRHISHKYAKQGNPYLIGTGALERASIEQWLQTEAQSFDAPSAEMVYSLAFLPPTLPRQNDNGNGGAFNAREATVGSNADASSSKRGVAGSQPAASQTKVSAQKEEEMLKLFEQRKKDLEKLLDIYEQRLEEATFLAGDNFTIADLSHLPYADHLVSDPRSRRMFESRKNVSRWWHDVSGRDTWKYVKTLQRPPSTSTDASAKNGQLGQQQHLPSSTDGHGVKSQRLVQNERHF

SEQ ID NO: 16115 - DNA, 1483 bp, Zea mays subsp. mays
  misc_feature (1)..(1483): Ceres Seq. ID no. 12367762
  misc_feature (1)..(1483): Ortholog of  Ceres SEQ ID NO 15168464 as cited in SEQ ID NO 59187
aactagcacctccgcctcgcggctcgctccatcccttccaccaccaccgcctcaccagtcaccactcccctatcacgggacgggaccaccgccgccgcgtcctatgacgtcgccgtcctcgcaccacccggactccacctcggcgtcctctacccctcgcgccggtgtcgggaacggcggcatccaccacctccatccgccatctctgcacccggcgcccgcgcctaccccggctgctccccccgcgcaggcgcaggcggcgcacgggggcccgcaagtgcgcctcatgtgcagcttcggcggccgcatcttaccgcgccctggggaccgccagctgcgctacgtcggcggggagacccgcatcgtctccttcccgcgcgccgcaacttccttcgccgccctcgtcgccgcgctcgccaaggtcgcgcccgtgctcttcgccccgggggcgcccaggccgtcgctcaagtaccagctgccccaggacgacctcgactcgctcgtctccatcacctccgacgacgacgtcgaccacctcatggacgagcttgaccgcatccaagacctctccgccaacgtcgccaggccaccccgcctccgcgtcttcctcttcgcgcccgcgcctgacgccgccttcggctccgtcttctccggcaccaccagtgaggccgcctccaccgaccagtggtttgtcgacgcgctaaacgcccccgcgccgcagccgcaccccaccgagcgcggccgatccgaggcctcctcgatcgtctccgaggtccccgactacctcttcggcctcgaaaccacgtccggtgagcccagccccggccccgcggccgtccgcgccaagtccgatgccacggagactccgcgccaccacgacgacgacgaatgcgacgtgccaccttccgcgcgccagatgccgtacgtcgtagagggagcgtcatcgtggcccgcccccgccgccgccgtacatggcgcagcctgtgtactacttccccgtgccgccgccggtccactatctcgaaccgtctgcgcagggcggctacatgcctcgcccggtctaccacattgtcggtggcggaggaagcgaggcgcctggcggagatcttcacgcggccggcggcgtctacggcgtcccgcaggcacatgcaggcgttcccggcgatgatgtacgcgccgccgcgcgcggtcgtctacaactacaactcggaggggatgccatcgctgcctcccgaaggtggggcacactcttcctaggcgcatcggctgcttcacatctctggttcctgattattattgcagatgcctgagttctgcgtgcgtattagatttttatcgattcgtcttggttggtgtatagatgactaagatgagggaggcggatgatggatagatattattgcagttttcgtctagtggaaatatattcgtgaaatggatctatgagcatgatataatactaagtagtatagtatttggtgtg

SEQ ID NO: 16116 - protein, 388 aa, Zea mays subsp. mays
  peptide (1)..(388): Ceres Seq. ID no. 12367763
TSTSASRLAPSLPPPPPHQSPLPYHGTGPPPPRPMTSPSSHHPDSTSASSTPRAGVGNGGIHHLHPPSLHPAPAPTPAAPPAQAQAAHGGPQVRLMCSFGGRILPRPGDRQLRYVGGETRIVSFPRAATSFAALVAALAKVAPVLFAPGAPRPSLKYQLPQDDLDSLVSITSDDDVDHLMDELDRIQDLSANVARPPRLRVFLFAPAPDAAFGSVFSGTTSEAASTDQWFVDALNAPAPQPHPTERGRSEASSIVSEVPDYLFGLETTSGEPSPGPAAVRAKSDATETPRHHDDDECDVPPSARQMPYVVEGASSWPAPAAAVHGAACVLLPRAAAGPLSRTVCAGRLHASPGLPHCRWRRKRGAWRRSSRGRRRLRRPAGTCRRSRR

SEQ ID NO: 16117 - protein, 354 aa, Zea mays subsp. mays
  peptide (1)..(354): Ceres Seq. ID no. 12367764
MTSPSSHHPDSTSASSTPRAGVGNGGIHHLHPPSLHPAPAPTPAAPPAQAQAAHGGPQVRLMCSFGGRILPRPGDRQLRYVGGETRIVSFPRAATSFAALVAALAKVAPVLFAPGAPRPSLKYQLPQDDLDSLVSITSDDDVDHLMDELDRIQDLSANVARPPRLRVFLFAPAPDAAFGSVFSGTTSEAASTDQWFVDALNAPAPQPHPTERGRSEASSIVSEVPDYLFGLETTSGEPSPGPAAVRAKSDATETPRHHDDDECDVPPSARQMPYVVEGASSWPAPAAAVHGAACVLLPRAAAGPLSRTVCAGRLHASPGLPHCRWRRKRGAWRRSSRGRRRLRRPAGTCRRSRR

SEQ ID NO: 16118 - protein, 293 aa, Zea mays subsp. mays
  peptide (1)..(293): Ceres Seq. ID no. 12367765
MCSFGGRILPRPGDRQLRYVGGETRIVSFPRAATSFAALVAALAKVAPVLFAPGAPRPSLKYQLPQDDLDSLVSITSDDDVDHLMDELDRIQDLSANVARPPRLRVFLFAPAPDAAFGSVFSGTTSEAASTDQWFVDALNAPAPQPHPTERGRSEASSIVSEVPDYLFGLETTSGEPSPGPAAVRAKSDATETPRHHDDDECDVPPSARQMPYVVEGASSWPAPAAAVHGAACVLLPRAAAGPLSRTVCAGRLHASPGLPHCRWRRKRGAWRRSSRGRRRLRRPAGTCRRSRR

SEQ ID NO: 16119 - DNA, 520 bp, Zea mays subsp. mays
  misc_feature (1)..(520): Ceres Seq. ID no. 1601784
  misc_feature (1)..(520): Ortholog of  Ceres SEQ ID NO 15175765 as cited in SEQ ID NO 54076
aaccgaggtcccccaatcccccaaacatttcccccaaacatttttttgtcgagatctgtcgtgagatcctccccgacgagatggcggggaagggagccaaggccacggccgccaagtcggcggacaaggacaaggggaagaaggccggcggccccgtctcgcgctcctcccgcgccgcacctcaggagaattcaactccgaagaaagatgtttatcaattgttcgctgagaaggttagggataacaaacagctggaatcaagatgggcaatcatgcaagaaacccgtgtggagtattttcgtggaaaagatttcaatgccttcatcaagaattatccagaagtcagggaaattttggggccagataaggatttagaagtggaagacattgttaacactttgttgaccaagaaccttgtgataaggtgtgaccgagttatgaaaactgtgaggcctggcaagaaaaagttatcatcatggcctgctcactttggagatacataatgaacaagtgtttactg

SEQ ID NO: 16120 - protein, 124 aa, Zea mays subsp. mays
  peptide (1)..(124): Ceres Seq. ID no. 1601785
NRGPPIPQTFPPNIFLSRSVVRSSPTRWRGREPRPRPPSRRTRTRGRRPAAPSRAPPAPHLRRIQLRRKMFINCSLRRLGITNSWNQDGQSCKKPVWSIFVEKISMPSSRIIQKSGKFWGQIRI

SEQ ID NO: 16121 - protein, 166 aa, Zea mays subsp. mays
  peptide (1)..(166): Ceres Seq. ID no. 1601786
PRSPNPPNISPKHFFVEICREILPDEMAGKGAKATAAKSADKDKGKKAGGPVSRSSRAAPQENSTPKKDVYQLFAEKVRDNKQLESRWAIMQETRVEYFRGKDFNAFIKNYPEVREILGPDKDLEVEDIVNTLLTKNLVIRCDRVMKTVRPGKKKLSSWPAHFGDT

SEQ ID NO: 16122 - protein, 140 aa, Zea mays subsp. mays
  peptide (1)..(140): Ceres Seq. ID no. 1601787
MAGKGAKATAAKSADKDKGKKAGGPVSRSSRAAPQENSTPKKDVYQLFAEKVRDNKQLESRWAIMQETRVEYFRGKDFNAFIKNYPEVREILGPDKDLEVEDIVNTLLTKNLVIRCDRVMKTVRPGKKKLSSWPAHFGDT

SEQ ID NO: 16123 - DNA, 1575 bp, Zea mays subsp. mays
  misc_feature (1)..(1575): Ceres Seq. ID no. 12349572
  misc_feature (1)..(1575): Ortholog of  Ceres SEQ ID NO 14312216 as cited in SEQ ID NO 53930
  misc_feature (1)..(1575): Ortholog of  Ceres SEQ ID NO 13656404 as cited in SEQ ID NO 65806
  misc_feature (1)..(1575): Ortholog of  Ceres SEQ ID NO 12779935 as cited in SEQ ID NO 66774
  misc_feature (1)..(1575): Ortholog of  Ceres SEQ ID NO 13598695 as cited in SEQ ID NO 67368
  misc_feature (1)..(1575): Ortholog of  Ceres SEQ ID NO 13591174 as cited in SEQ ID NO 68289
gcctggctctggtattgggttccccgttctgctgctcagctcagcccagccccagagcccctgacctgccgtcctccctccttccctccccgtgagtcgccgtacggcggtacgggatcgccaccgcggcgtccagggatggcggacgggagcctctacgcctggtggtgctgtgccttgggctgggcgctggcgcttgtcgcagcggacggcttcctcgtggacatcacctatgtggaaagcgccgtggccaaaggagcagtgtgtttggatggtagtgcgccggcgtaccatctcgcccgcggctccggctccggtgagaacagctggctggtccatttcgaggggggaggatggtgcaacaatgtcaccacctgcctgcaacggaagcgcactcggttgggttcgtccaaggagatggcgacgcagattgccttctccggaatcctgagtgacacgccggatgacaacccagatttttacaattggaacaaggtcaaggttcggtactgtgatggttcatctttcactggagatgttgaagaagttgaccctgcaacaaagctacattatagaggtgccaggatatggcaagctgtcatggacgacctgcttgccaaagggatggacaaagctgaaaatgctctaatttcaggctgttctgctggtggtttaacctccatactacactgtgacagatttcatgaccttctgccgccggctgcgagggttaagtgcctttctgatgctgggttcttcattaatgagaaagacgttgcaggagttgggtacattgctgcctttttcaacgacgtcgttacaacacatgggtcagcaaagaatttgccgccttcatgcacttcgacgttacctccaggaacgtgctttttcccccagaacgaggtgaaacagatacagacacctctgttcatcctcaacgcagcatatgattcatggcaggtaaggaacattttggtgccaggagtagctgaccctcatggaaaatggcatagctgtaagcatgatatagaccagtgctctgcatcgcagctacgggtattgcagggattcaggggtgattttctgaaggaagtggcagaactagggaactccgactcgagagggttgttcataaactcatgcttcgtgcactgccagtctgagatacaggagctatggttctcatctgactcccccgtgctcggaaacacaacagtagcaaacgctgttggcgactggttcttcgaccgcagctccttccagaagatagactgcccatacccttgtgactcgacctgtcacaatcggatctacgatgactcatcacaagcatagcaattacagtggcctcacttcgtactgccattcaccatgttattacatttgacgcttccagcattgctaacagtagggcaatgcgttgatagccattgattttttttttctttttacgaataagatcaggtgccggcggctttaactcggttgctaccggaaagtgagcgtgcatcttccgacggtacatggcatggtttatctggatggatgaatcgataatcataaattcttaaaaac

SEQ ID NO: 16124 - protein, 444 aa, Zea mays subsp. mays
  peptide (1)..(444): Ceres Seq. ID no. 12349573
AWLWYWVPRSAAQLSPAPEPLTCRPPSFPPRESPYGGTGSPPRRPGMADGSLYAWWCCALGWALALVAADGFLVDITYVESAVAKGAVCLDGSAPAYHLARGSGSGENSWLVHFEGGGWCNNVTTCLQRKRTRLGSSKEMATQIAFSGILSDTPDDNPDFYNWNKVKVRYCDGSSFTGDVEEVDPATKLHYRGARIWQAVMDDLLAKGMDKAENALISGCSAGGLTSILHCDRFHDLLPPAARVKCLSDAGFFINEKDVAGVGYIAAFFNDVVTTHGSAKNLPPSCTSTLPPGTCFFPQNEVKQIQTPLFILNAAYDSWQVRNILVPGVADPHGKWHSCKHDIDQCSASQLRVLQGFRGDFLKEVAELGNSDSRGLFINSCFVHCQSEIQELWFSSDSPVLGNTTVANAVGDWFFDRSSFQKIDCPYPCDSTCHNRIYDDSSQA

SEQ ID NO: 16125 - protein, 398 aa, Zea mays subsp. mays
  peptide (1)..(398): Ceres Seq. ID no. 12349574
MADGSLYAWWCCALGWALALVAADGFLVDITYVESAVAKGAVCLDGSAPAYHLARGSGSGENSWLVHFEGGGWCNNVTTCLQRKRTRLGSSKEMATQIAFSGILSDTPDDNPDFYNWNKVKVRYCDGSSFTGDVEEVDPATKLHYRGARIWQAVMDDLLAKGMDKAENALISGCSAGGLTSILHCDRFHDLLPPAARVKCLSDAGFFINEKDVAGVGYIAAFFNDVVTTHGSAKNLPPSCTSTLPPGTCFFPQNEVKQIQTPLFILNAAYDSWQVRNILVPGVADPHGKWHSCKHDIDQCSASQLRVLQGFRGDFLKEVAELGNSDSRGLFINSCFVHCQSEIQELWFSSDSPVLGNTTVANAVGDWFFDRSSFQKIDCPYPCDSTCHNRIYDDSSQA

SEQ ID NO: 16126 - protein, 305 aa, Zea mays subsp. mays
  peptide (1)..(305): Ceres Seq. ID no. 12349575
MATQIAFSGILSDTPDDNPDFYNWNKVKVRYCDGSSFTGDVEEVDPATKLHYRGARIWQAVMDDLLAKGMDKAENALISGCSAGGLTSILHCDRFHDLLPPAARVKCLSDAGFFINEKDVAGVGYIAAFFNDVVTTHGSAKNLPPSCTSTLPPGTCFFPQNEVKQIQTPLFILNAAYDSWQVRNILVPGVADPHGKWHSCKHDIDQCSASQLRVLQGFRGDFLKEVAELGNSDSRGLFINSCFVHCQSEIQELWFSSDSPVLGNTTVANAVGDWFFDRSSFQKIDCPYPCDSTCHNRIYDDSSQA

SEQ ID NO: 16127 - DNA, 1745 bp, Zea mays subsp. mays
  misc_feature (1)..(1745): Ceres Seq. ID no. 12383093
  misc_feature (1)..(1745): Ortholog of  Ceres SEQ ID NO 12613953 as cited in SEQ ID NO 68388
gcaattaaccctcactaaagggaacaaaagctggagctccaccgcggtggcggccgctctagaactagtggatcccccgggctgcaggaattcgcacgagaccattacctagaacatcctaatcgaaaaatttccgcaccacgcccagtcgcccacgcagccggcccaagcccaaaaacctttctccatcctctactctcatccccacgatggccgccgccgccaccacgccgcactccctcctcctccagcgcgccgcgatcccggccgcgccgtcgagggcgtccgccgccgcctctcccgtccgcctcccggtccgcgccgccaggatctcgtgcgcggcggtggcggcgccgtccccggccgcagccgccgcggcggacgaggtggagcgcggcgtctacaacttcgcggcgggtcccgcgacgctccctctctccgtgctcaagcgggcgcaggcggagctggtggactaccacggctccgggatgagcatcatggagatgagccaccgcgggaaggagttcgacgccgccatcaagaaggccgagtccgacctgcgcgcgctcctcgcggtgcccgacacccacgccgtgctcttcctccagggcggcgccaccacgcagttcgccgccgtcccgctcaacctctgcacggggccctccgacccggccgacttcgtcgtgtccggatcctggagcgacaaggccttcaaggaggccaagaagttctccgccgcctccgtcgcctggtcgggtaaagacggcaagtacacggccctcccgccgttcgacgccatcgcccagaaccccgaggccaggttcctccacatctgctccaacgagaccatccacggcgtggagttcaaggactacccggagccccgcaacaggtcgggcatcctcgtcgccgacatgtcctccaacttctgctccaagcccgtcgacgtctcccgcttcggcgtcatctacgccggcgcacagaagaacgtcgggccctccggcgtcaccatcgccatcgtgcgcaaggacctcatcggcgccgctcagcccttcacgcccgtcatgctcgacttcaagacgcacgccgacaacgcctccctctacaacaccccgccctgcttcgccatctacgtctgcggtctcgtcttcgaggacctgctcgcgcagggcggcctcgccgaggtcgagaagaagaacgcgcgcaaggccggcgccctctacgacaccatcgacgccagcggagggtactacgtctgccccgtcgacaagtccgtgcggtcgcacatgaacgtgcccttcaccctggccaagggcccggatttcgagaagcagttcatcgccgaggcggccaaggagggcatggtgcagctcaaggggcacaggtctgtcggcggtgtccgcgcctctatctacaatgccatgccgctcgccggcgtggagaagctcgtcgccttcatgaaggacttccaagccaggaacccttgattgccttgtgcttatggtcatttggtattgctactcagtctttcttcctagcataagtgggctcgtgcaagagctgtctcgcgttgcgcactgggatctatctgtagtattagtaccataacgtaacggctactgtattttgcaatgttttttttctctctctcgcttttgttaggtgttcatggaatttcatttctatggatcaccattgcagttgtaatgtgtttttgctggaaataaggaataaggtagagatcc

SEQ ID NO: 16128 - protein, 425 aa, Zea mays subsp. mays
  peptide (1)..(425): Ceres Seq. ID no. 12383094
MAAAATTPHSLLLQRAAIPAAPSRASAAASPVRLPVRAARISCAAVAAPSPAAAAAADEVERGVYNFAAGPATLPLSVLKRAQAELVDYHGSGMSIMEMSHRGKEFDAAIKKAESDLRALLAVPDTHAVLFLQGGATTQFAAVPLNLCTGPSDPADFVVSGSWSDKAFKEAKKFSAASVAWSGKDGKYTALPPFDAIAQNPEARFLHICSNETIHGVEFKDYPEPRNRSGILVADMSSNFCSKPVDVSRFGVIYAGAQKNVGPSGVTIAIVRKDLIGAAQPFTPVMLDFKTHADNASLYNTPPCFAIYVCGLVFEDLLAQGGLAEVEKKNARKAGALYDTIDASGGYYVCPVDKSVRSHMNVPFTLAKGPDFEKQFIAEAAKEGMVQLKGHRSVGGVRASIYNAMPLAGVEKLVAFMKDFQARNP

SEQ ID NO: 16129 - protein, 332 aa, Zea mays subsp. mays
  peptide (1)..(332): Ceres Seq. ID no. 12383095
MSIMEMSHRGKEFDAAIKKAESDLRALLAVPDTHAVLFLQGGATTQFAAVPLNLCTGPSDPADFVVSGSWSDKAFKEAKKFSAASVAWSGKDGKYTALPPFDAIAQNPEARFLHICSNETIHGVEFKDYPEPRNRSGILVADMSSNFCSKPVDVSRFGVIYAGAQKNVGPSGVTIAIVRKDLIGAAQPFTPVMLDFKTHADNASLYNTPPCFAIYVCGLVFEDLLAQGGLAEVEKKNARKAGALYDTIDASGGYYVCPVDKSVRSHMNVPFTLAKGPDFEKQFIAEAAKEGMVQLKGHRSVGGVRASIYNAMPLAGVEKLVAFMKDFQARNP

SEQ ID NO: 16130 - protein, 329 aa, Zea mays subsp. mays
  peptide (1)..(329): Ceres Seq. ID no. 12383096
MEMSHRGKEFDAAIKKAESDLRALLAVPDTHAVLFLQGGATTQFAAVPLNLCTGPSDPADFVVSGSWSDKAFKEAKKFSAASVAWSGKDGKYTALPPFDAIAQNPEARFLHICSNETIHGVEFKDYPEPRNRSGILVADMSSNFCSKPVDVSRFGVIYAGAQKNVGPSGVTIAIVRKDLIGAAQPFTPVMLDFKTHADNASLYNTPPCFAIYVCGLVFEDLLAQGGLAEVEKKNARKAGALYDTIDASGGYYVCPVDKSVRSHMNVPFTLAKGPDFEKQFIAEAAKEGMVQLKGHRSVGGVRASIYNAMPLAGVEKLVAFMKDFQARNP

SEQ ID NO: 16131 - DNA, 880 bp, Zea mays subsp. mays
  misc_feature (1)..(880): Ceres Seq. ID no. 12357013
  misc_feature (1)..(880): Ortholog of  Ceres SEQ ID NO 12610133 as cited in SEQ ID NO 55783
gacaagcaagaacagctgtcgatccaattgtcacttgctctccctccaacaagctaattaaggccggtcatccctcttctagctcgtttcattatccatggcggaggagaagcaccaccaccaccacctgttccaccacaagaaggacgaggagcaggaggagcagctcgccggcggcgggtacggcgagtccgccgagtacacggaggccacggtgacggaggtcgtgtccacgggcgagaacgagtacgacgagtacaagaaggaggagaagcagcacaagcacaagcagcacctcggcgaggccggcgccatcgccgccggcgccttcgcactcgtacgtagtcctccgatcgatccgatcctccttgagtagtatatacatacatgaacgcgataacgaataatatattaatcgaacgaactgaatgatgatcacggatcacctcgtgtgacgtggacatgcacagtacgagaagcacgaggcaaagaaggacccggagcacgcgcaccgccacaagatcgaggaggaggtcgcggcggcggcggccgtcggctccggcggcttcgccttccacgagcaccacgagaagaagaaggaccacaaggacgccgaggaggccggcggcgagaagaagcaccacttcttcggctgattgatcctcccgtatcgtcgtccctccccgtgtgctacgcgtgcgtgtgtgagagtgatatcgagcgcccgccgtgttgtgcgcgcgtacgtatgtatgcgctcgtgtgatgcacgaataagcgtggctacgtaatctatcgtatgtatacgtgtgtgtatgcatgtgcttgtgtatgatcgtggtacgaggaccgaaaaaatgtatgcaactctgatttactt

SEQ ID NO: 16132 - protein, 92 aa, Zea mays subsp. mays
  peptide (1)..(92): Ceres Seq. ID no. 12357014
MAEEKHHHHHLFHHKKDEEQEEQLAGGGYGESAEYTEATVTEVVSTGENEYDEYKKEEKQHKHKQHLGEAGAIAAGAFALVRSPPIDPILLE

SEQ ID NO: 16133 - protein, 71 aa, Zea mays subsp. mays; identical to SEQ ID NO: 6335
  peptide (1)..(71): Ceres Seq. ID no. 12357015

SEQ ID NO: 16134 - protein, 65 aa, Zea mays subsp. mays
  peptide (1)..(65): Ceres Seq. ID no. 12357016
MHSTRSTRQRRTRSTRTATRSRRRSRRRRPSAPAASPSTSTTRRRRTTRTPRRPAARRSTTSSAD

SEQ ID NO: 16135 - DNA, 653 bp, Zea mays subsp. mays
  misc_feature (1)..(653): Ceres Seq. ID no. 12346489
  misc_feature (1)..(653): Ortholog of  Ceres SEQ ID NO 12557607 as cited in SEQ ID NO 8
  misc_feature (1)..(653): Ortholog of  Ceres SEQ ID NO 12611808 as cited in SEQ ID NO 59894
  misc_feature (1)..(653): Ortholog of  Ceres SEQ ID NO 13600599 as cited in SEQ ID NO 0
acacgatcaaaaacaaaaccaagctccaagcacccatagccacacaccacaccaagtcaagcaaggagctcgatcgacagcaacaacggccatcatgaactccagcttcatcgggctcaagcccgctgcggcagcagcccaggccaccgcggctgcctcgtcgccgatgaagcagcagcaggtgcaggtcgcgccccagagccgccgcgccgcgctgctcggcctggcggccgtcttcgccgtcaccgccaccacggccggatcagccaaggctggggtcttcgacgagtacctcgagaagagcaaggctaacaaggagctgaacgacaagaagaggatggccaccagcgctgccaactttgcgcgcgcctacacagtcgagttcggcagctgccagttcccctacaacttcactgggtgccaggacctcgccaagcagaagaaagtccctttcctcagcgacgacctcgagatcgagtgcgaggggaaggagaagttcaagtgcggctccaacgtcttctggaagtggtgaagcagcgcgcgtctgatatgacggagacctgtgtatctagatgatgcatgtgcccagactgcaggaaaaatgatatcaaatttgactgctattctgtcaaccagggttcagttcttaaccg

SEQ ID NO: 16136 - protein, 176 aa, Zea mays subsp. mays
  peptide (1)..(176): Ceres Seq. ID no. 12346490
HDQKQNQAPSTHSHTPHQVKQGARSTATTAIMNSSFIGLKPAAAAAQATAAASSPMKQQQVQVAPQSRRAALLGLAAVFAVTATTAGSAKAGVFDEYLEKSKANKELNDKKRMATSAANFARAYTVEFGSCQFPYNFTGCQDLAKQKKVPFLSDDLEIECEGKEKFKCGSNVFWKW

SEQ ID NO: 16137 - protein, 145 aa, Zea mays subsp. mays
  peptide (1)..(145): Ceres Seq. ID no. 12346491
MNSSFIGLKPAAAAAQATAAASSPMKQQQVQVAPQSRRAALLGLAAVFAVTATTAGSAKAGVFDEYLEKSKANKELNDKKRMATSAANFARAYTVEFGSCQFPYNFTGCQDLAKQKKVPFLSDDLEIECEGKEKFKCGSNVFWKW

SEQ ID NO: 16138 - protein, 121 aa, Zea mays subsp. mays
  peptide (1)..(121): Ceres Seq. ID no. 12346492
MKQQQVQVAPQSRRAALLGLAAVFAVTATTAGSAKAGVFDEYLEKSKANKELNDKKRMATSAANFARAYTVEFGSCQFPYNFTGCQDLAKQKKVPFLSDDLEIECEGKEKFKCGSNVFWKW

SEQ ID NO: 16139 - DNA, 1336 bp, Zea mays subsp. mays
  misc_feature (1)..(1336): Ceres Seq. ID no. 12364240
  misc_feature (1)..(1336): Ortholog of  Ceres SEQ ID NO 14307526 as cited in SEQ ID NO 58875
agagagagaaggtgagtgctttgacaaggggaaaaaacccaggtctgtgtgtgtgtgtgcgagagagagagagagagagagagagagagagagagagaggcgaaggcnnctcaggcgacgcgatggcgatggcggcgctgcgacgcnaggggaggcgcctcatcctntnctccnccgtcccnaacccgtctctggcggccgctttctctgnggngacgcnatcctccgccgtctcgcaaccggagatggctccacttggtgcacggtctatttcaactcaaatcgtgaggaaccggatgaagagtgtcaggaatatccagaagatcacaaaggctatgaagatggttgcagcatcaaagctccgggcagttcagacaaggactgaaaattcacgtggcttgtggcaaccgttcaccgcccttcttggggatgctcctagtgttgacgtcaagaagaatgtgattgtggccattacctctgataagggactctgtggtggtattaattcaacatcagtgaaagttagcagggcccttcacaaattgacatctggtccagaaaaagaaaccaagtatgttatattaggagaaaagggcaaagttcagctgttgcgtgactcaaaggacagcattgaaatgactgcaactgaactgcagaagaaccctatcaactacacacaggttgccgtgctcgcggatgacatattgaaaaatgtggaatatgatgctctgagggttattttcaacaagttccaatctgtcatatcgtttaagcccacaatggtaacaatactttcccccgaggttgcagaaaaagaatcagaagctggtgggaagatgggtgacctagattcttatgagattgaaggcggcgagacaaaatcagagattttgcagaatctagctgagttccagttttcttgtgtcctgtacaatggtgccctagagaatgcatgcagtgagcttggagcccgtatgtctgccatggacagctctagcagaaatgctggcgatatgcttgatcgtctcactctcacttacaacaggacacgccaagcatccatcaccacagagcttactgagattatatctggtgcatcggcccttgaggggtagtgaagagactgcggacttcttccttttgccgtttgtgttcctctcccatgaaggcttttttcctcgggagtctcagtttcagctcctttcatttcacttttccttgagaaacttgctctcatgctttgttgcaataatcaggccaacgacaatgatagtgccgtgcacccttggcacattgcagaaagagtgtaaacagctatggttaatgggtggttttc

SEQ ID NO: 16140 - protein, 370 aa, Zea mays subsp. mays
  peptide (1)..(370): Ceres Seq. ID no. 12364241
  misc_feature (36)..(36): Xaa is any aa, unknown or other
  misc_feature (49)..(49): Xaa is any aa, unknown or other
  misc_feature (55)..(55): Xaa is any aa, unknown or other
  misc_feature (56)..(56): Xaa is any aa, unknown or other
  misc_feature (58)..(58): Xaa is any aa, unknown or other
  misc_feature (60)..(60): Xaa is any aa, unknown or other
  misc_feature (70)..(70): Xaa is any aa, unknown or other
  misc_feature (71)..(71): Xaa is any aa, unknown or other
  misc_feature (73)..(73): Xaa is any aa, unknown or other
REKVSALTRGKNPGLCVCVRERERERERERERGEGXSGDAMAMAALRRXGRRLIXXSXVXNPSLAAAFSXXTXSSAVSQPEMAPLGARSISTQIVRNRMKSVRNIQKITKAMKMVAASKLRAVQTRTENSRGLWQPFTALLGDAPSVDVKKNVIVAITSDKGLCGGINSTSVKVSRALHKLTSGPEKETKYVILGEKGKVQLLRDSKDSIEMTATELQKNPINYTQVAVLADDILKNVEYDALRVIFNKFQSVISFKPTMVTILSPEVAEKESEAGGKMGDLDSYEIEGGETKSEILQNLAEFQFSCVLYNGALENACSELGARMSAMDSSSRNAGDMLDRLTLTYNRTRQASITTELTEIISGASALEG

SEQ ID NO: 16141 - protein, 330 aa, Zea mays subsp. mays
  peptide (1)..(330): Ceres Seq. ID no. 12364242
  misc_feature (9)..(9): Xaa is any aa, unknown or other
  misc_feature (15)..(15): Xaa is any aa, unknown or other
  misc_feature (16)..(16): Xaa is any aa, unknown or other
  misc_feature (18)..(18): Xaa is any aa, unknown or other
  misc_feature (20)..(20): Xaa is any aa, unknown or other
  misc_feature (30)..(30): Xaa is any aa, unknown or other
  misc_feature (31)..(31): Xaa is any aa, unknown or other
  misc_feature (33)..(33): Xaa is any aa, unknown or other
MAMAALRRXGRRLIXXSXVXNPSLAAAFSXXTXSSAVSQPEMAPLGARSISTQIVRNRMKSVRNIQKITKAMKMVAASKLRAVQTRTENSRGLWQPFTALLGDAPSVDVKKNVIVAITSDKGLCGGINSTSVKVSRALHKLTSGPEKETKYVILGEKGKVQLLRDSKDSIEMTATELQKNPINYTQVAVLADDILKNVEYDALRVIFNKFQSVISFKPTMVTILSPEVAEKESEAGGKMGDLDSYEIEGGETKSEILQNLAEFQFSCVLYNGALENACSELGARMSAMDSSSRNAGDMLDRLTLTYNRTRQASITTELTEIISGASALEG

SEQ ID NO: 16142 - protein, 328 aa, Zea mays subsp. mays
  peptide (1)..(328): Ceres Seq. ID no. 12364243
  misc_feature (7)..(7): Xaa is any aa, unknown or other
  misc_feature (13)..(13): Xaa is any aa, unknown or other
  misc_feature (14)..(14): Xaa is any aa, unknown or other
  misc_feature (16)..(16): Xaa is any aa, unknown or other
  misc_feature (18)..(18): Xaa is any aa, unknown or other
  misc_feature (28)..(28): Xaa is any aa, unknown or other
  misc_feature (29)..(29): Xaa is any aa, unknown or other
  misc_feature (31)..(31): Xaa is any aa, unknown or other
MAALRRXGRRLIXXSXVXNPSLAAAFSXXTXSSAVSQPEMAPLGARSISTQIVRNRMKSVRNIQKITKAMKMVAASKLRAVQTRTENSRGLWQPFTALLGDAPSVDVKKNVIVAITSDKGLCGGINSTSVKVSRALHKLTSGPEKETKYVILGEKGKVQLLRDSKDSIEMTATELQKNPINYTQVAVLADDILKNVEYDALRVIFNKFQSVISFKPTMVTILSPEVAEKESEAGGKMGDLDSYEIEGGETKSEILQNLAEFQFSCVLYNGALENACSELGARMSAMDSSSRNAGDMLDRLTLTYNRTRQASITTELTEIISGASALEG

SEQ ID NO: 16143 - DNA, 1431 bp, Zea mays subsp. mays
  misc_feature (1)..(1431): Ceres Seq. ID no. 12367949
  misc_feature (1)..(1431): Ortholog of  Ceres SEQ ID NO 14315614 as cited in SEQ ID NO 52972
  misc_feature (1)..(1431): Ortholog of  Ceres SEQ ID NO 14302754 as cited in SEQ ID NO 61212
gtcttcctcacaaatcccacccaaaaaaaaaacgcctcccggttgctcgcctctatcctcattgaaaatctttgaaagaggtttggatcccgaaaccgccaagggcccgccccgcaagtgcatggcagtgaacttcctggccaatgaggtgtcggacctgtgcatcggcaagccggccgtgaggtcgctaccgctctccgccgccaccggcgaccttgccgccgccctccggagggtgtcccgctctggcgccgcagcctgcgtcgcggtgaccggaccagcgcgcgccgtcgtcggccgggtcggcctcgcggacgtcctctgcttcctctgcaccgaccccgaggcgctcgcgcgccccgccgcggtgttcgccaagccggtctccgcgctcctgcctaaggacggcgccggagaggtccgccgcgtcgatccccgctccagtatcttggaggcccttgatgcggttctgagcggggcgcaggtgctggccgtcccactccgcgctggcgggcgcaagaagcagctcgttggcgccgccgacgacggcgacttctgctggctcacgcaggaggacctcgtgcgctactttctcaactacatctgcctcgtctacaatgtggcggcgcgctccgtgtcctccctcgggctcgtgcgcgccgacttcctctcggtgcgccccggcgaggcgtccctgtccgccgtgcccctcatccgccgcgccgtcgccacggagacggcggtcgccgtggtcgccgaagacgggcacctcgtcggcgagatctcccctgcccttctcgcggcctgcgacgagacggcggcggcagccatcgccacgctctcggccgccgacctcatggcctacatcgaccactacgtgtcgccgccggagcacatcctgcgcgccgtcaaggccgggctgaaggacaagggcctggacgccttgcttgcgctggttgaggacgagacgctgtcgtccttctcgtccctctccgcgtcctcctcgtccgacgaggaggcaggccgggcgcagctgaggcgcccgtcgtcggggagctacgggcggcgggcggctgacgagccggtggtgtgcagccccgcgagctcactggtggccgtcttggtgcaggccctcgcgcacagggtgagctacgtctgggtcctcgacgaggacaacgactgccgcctcgccggcatcgtcaggttcgcggacgtgctgagggtgttccgggaccagctgctgtgaggtctgacgagtgcttactgtttcctggctcccatcttgtggtgtcatggaattgagaagaatatgagctcttgtttctgaaacatttttatttgaagagtatgtgtttgcttgcttggtagccagttcagaattcagatgaacagctttggcattggtgcgttttcattaaatttcttcctatt

SEQ ID NO: 16144 - protein, 414 aa, Zea mays subsp. mays
  peptide (1)..(414): Ceres Seq. ID no. 12367950
SSSQIPPKKKTPPGCSPLSSLKIFERGLDPETAKGPPRKCMAVNFLANEVSDLCIGKPAVRSLPLSAATGDLAAALRRVSRSGAAACVAVTGPARAVVGRVGLADVLCFLCTDPEALARPAAVFAKPVSALLPKDGAGEVRRVDPRSSILEALDAVLSGAQVLAVPLRAGGRKKQLVGAADDGDFCWLTQEDLVRYFLNYICLVYNVAARSVSSLGLVRADFLSVRPGEASLSAVPLIRRAVATETAVAVVAEDGHLVGEISPALLAACDETAAAAIATLSAADLMAYIDHYVSPPEHILRAVKAGLKDKGLDALLALVEDETLSSFSSLSASSSSDEEAGRAQLRRPSSGSYGRRAADEPVVCSPASSLVAVLVQALAHRVSYVWVLDEDNDCRLAGIVRFADVLRVFRDQLL

SEQ ID NO: 16145 - protein, 374 aa, Zea mays subsp. mays
  peptide (1)..(374): Ceres Seq. ID no. 12367951
MAVNFLANEVSDLCIGKPAVRSLPLSAATGDLAAALRRVSRSGAAACVAVTGPARAVVGRVGLADVLCFLCTDPEALARPAAVFAKPVSALLPKDGAGEVRRVDPRSSILEALDAVLSGAQVLAVPLRAGGRKKQLVGAADDGDFCWLTQEDLVRYFLNYICLVYNVAARSVSSLGLVRADFLSVRPGEASLSAVPLIRRAVATETAVAVVAEDGHLVGEISPALLAACDETAAAAIATLSAADLMAYIDHYVSPPEHILRAVKAGLKDKGLDALLALVEDETLSSFSSLSASSSSDEEAGRAQLRRPSSGSYGRRAADEPVVCSPASSLVAVLVQALAHRVSYVWVLDEDNDCRLAGIVRFADVLRVFRDQLL

SEQ ID NO: 16146 - DNA, 1541 bp, Zea mays subsp. mays
  misc_feature (1)..(1541): Ceres Seq. ID no. 12373039
  misc_feature (1)..(1541): Ortholog of  Ceres SEQ ID NO 15172274 as cited in SEQ ID NO 59703
cccgttcaacccacctttctgccacacacctcgagcgaagcaagcaccgcaagaattgaagagccagggagattttccgtcgctccgtccgatccatggccgaacagtggtggggcagtgcctctcacaggagtcacggcacgtcggcgtgctcggccgccgcgccaccgccgctcacggtcacgggcagggtggcctgcggcagcaccttccccaccgcagccgttgagtcgacgagctccgtaaccttccaggacccttatagaagctccacccatcagcctttgtctgatgccgcctcctcgctcggtgatccacacctggactggacgcaaaccttcttgagcgggaggagcgatgccagcttccaagccgtgctccaagaaccctccgcgacgaacgatccattaatcagggaccacatggacatgggtgccggcttcttggccgaccaggcgcagctagcgccgtcgccgtacggcgatacggagccatcgcaagctcaagctctattcgacgccacggcggccgtgcacaacattttgatgtacggagacagcgaatcctcggtcagctacgacgccggcgcggcatcgatgcagttttcccagctgctcaggacctcggtgcccgcgtctacgcctacgcctacgcaaggcgacggcgtcagcgtcggcgtcggcgctccgatgcagtacttgtccggcagcagttacctgcctttcggtggcccgctgccgtctcaccttctcttgcaggccctgcaggcggctaagcccaatagccgcagctccaacgctaactctccgtcggcgaaggacgactgctctccaccaccggcggcgacgaggaaaagcgtctccgagccgcctgccgccgcgaaaaggccacggatcgaggcgccatcgccgctaccgacttttaaggtgcggaaagagaagctaggggacagaatcactgcgctccagcaactcgtctcgccttttggaaagactgataccgcatcggttcttcacgaggccatcgaatacatcaaattccttcacgaccaagttgcgtcactgagctctccctacttgaaaaatgggatccccatgaagcaattccagcacaagggctctgaggattccaaggataacggcgacacgaagcaagcagacctgcggagccggggcctgtgccttgtcccagtagcgagcacatacacggtggcggccgagacaccggagttctggcaccctacatttggaggcacattccgatggtgatgatcgtccagttttagtagcaagctaagtagcctgctgagacggaaagcaagaagtcatgatgcggcccaaagcaatcgaaggatgttttgcaagggaaaagatgtacgagatggatatgataataggtttccagtggtctcttctaagacatgcatgctggatcaggtgcagaagagagaatgattaattgaggccgtgtgtatgtgtggcacctatactcatatatatgcatgcatgcaactttgcaagcaaataattagtgacagctat

SEQ ID NO: 16147 - protein, 390 aa, Zea mays subsp. mays
  peptide (1)..(390): Ceres Seq. ID no. 12373040
MAEQWWGSASHRSHGTSACSAAAPPPLTVTGRVACGSTFPTAAVESTSSVTFQDPYRSSTHQPLSDAASSLGDPHLDWTQTFLSGRSDASFQAVLQEPSATNDPLIRDHMDMGAGFLADQAQLAPSPYGDTEPSQAQALFDATAAVHNILMYGDSESSVSYDAGAASMQFSQLLRTSVPASTPTPTQGDGVSVGVGAPMQYLSGSSYLPFGGPLPSHLLLQALQAAKPNSRSSNANSPSAKDDCSPPPAATRKSVSEPPAAAKRPRIEAPSPLPTFKVRKEKLGDRITALQQLVSPFGKTDTASVLHEAIEYIKFLHDQVASLSSPYLKNGIPMKQFQHKGSEDSKDNGDTKQADLRSRGLCLVPVASTYTVAAETPEFWHPTFGGTFRW

SEQ ID NO: 16148 - protein, 281 aa, Zea mays subsp. mays
  peptide (1)..(281): Ceres Seq. ID no. 12373041
MDMGAGFLADQAQLAPSPYGDTEPSQAQALFDATAAVHNILMYGDSESSVSYDAGAASMQFSQLLRTSVPASTPTPTQGDGVSVGVGAPMQYLSGSSYLPFGGPLPSHLLLQALQAAKPNSRSSNANSPSAKDDCSPPPAATRKSVSEPPAAAKRPRIEAPSPLPTFKVRKEKLGDRITALQQLVSPFGKTDTASVLHEAIEYIKFLHDQVASLSSPYLKNGIPMKQFQHKGSEDSKDNGDTKQADLRSRGLCLVPVASTYTVAAETPEFWHPTFGGTFRW

SEQ ID NO: 16149 - protein, 279 aa, Zea mays subsp. mays
  peptide (1)..(279): Ceres Seq. ID no. 12373042
MGAGFLADQAQLAPSPYGDTEPSQAQALFDATAAVHNILMYGDSESSVSYDAGAASMQFSQLLRTSVPASTPTPTQGDGVSVGVGAPMQYLSGSSYLPFGGPLPSHLLLQALQAAKPNSRSSNANSPSAKDDCSPPPAATRKSVSEPPAAAKRPRIEAPSPLPTFKVRKEKLGDRITALQQLVSPFGKTDTASVLHEAIEYIKFLHDQVASLSSPYLKNGIPMKQFQHKGSEDSKDNGDTKQADLRSRGLCLVPVASTYTVAAETPEFWHPTFGGTFRW

SEQ ID NO: 16150 - DNA, 1261 bp, Zea mays subsp. mays
  misc_feature (1)..(1261): Ceres Seq. ID no. 12383097
  misc_feature (1)..(1261): Ortholog of  Ceres SEQ ID NO 13585458 as cited in SEQ ID NO 60907
  misc_feature (1)..(1261): Ortholog of  Ceres SEQ ID NO 13598678 as cited in SEQ ID NO 61508
  misc_feature (1)..(1261): Ortholog of  Ceres SEQ ID NO 12625392 as cited in SEQ ID NO 63315
  misc_feature (1)..(1261): Ortholog of  Ceres SEQ ID NO 13598319 as cited in SEQ ID NO 68758
ttaaccctcactaaagggaacaaaagctggagctccaccgcggtggcggccgctctagaactagtggatcccccgggctgcaggaattcgacgagaccattacctagaacatcctaatcgaaaactcacacaccatcgaaacacaaaccagcagcaggcagagcaacgactagctgccaggcaagccggccgggggtgctgcaagagtgcaacaaacaatggccaccgcgctctccttcaaggccttggcactggccgcgctcctctccatggtcgtcgcctctggcgctcgcgccgagcaacagttcaagcgcaacgccaccaccgcctcgcaggacagatccttgttgtcctacagcagtggctggctgccggccaaggccacctggtacggcgcccccaccggcgccggccccctcgacaacggtggtgcgtgcgggttcaagggcaccaaccagtacccgttctcgtccatgacgtcctgtggcaacgagcccatcttcaaggacggcaagggttgcggctcatgctaccagatacggtgcctgaagagcaaccacccggcctgctccggcgtggctcagacggtgatcatcacggacatgaactactacccggtggccaagtaccacttcgacctgagcggcacggcgttcgggtccatggccagctggggcctgaacgacaagctccggcacgccgggatcatcgacatgcagttcaggcgggtgccgtgcaacttcccgggcctgaccatcaccttccgcgtccagcacggctccaaccccatgtacctggccgtgctcatcgagcacgagaacaaggacggcgacgtggtgcaggcggacatcatgcagagcaactccggccactgggagcccatgcacgagtcctggggctccatctggaggatcgaccccaaccgcccgctccgtggccccttctccatgcgcatcaccaacgagtccggcaggcagctggtggccaagaacgtcatcccggccaactacatccccgacgtcgactaccgctccttcgtccagtactaatgatcgagctagcttggtcattgcttaagcgtttaattgtttcttctttatttaattagtggctgccgttgccgacatgcatgtgggggaaattggaggaggcaagcatcaatgcaatgtgtgctctcccgcccactgtcactataccgttattaattaccagtgtgtaaccagcaaatcatactacatatatggttatataatttcatact

SEQ ID NO: 16151 - protein, 276 aa, Zea mays subsp. mays
  peptide (1)..(276): Ceres Seq. ID no. 12383098
MATALSFKALALAALLSMVVASGARAEQQFKRNATTASQDRSLLSYSSGWLPAKATWYGAPTGAGPLDNGGACGFKGTNQYPFSSMTSCGNEPIFKDGKGCGSCYQIRCLKSNHPACSGVAQTVIITDMNYYPVAKYHFDLSGTAFGSMASWGLNDKLRHAGIIDMQFRRVPCNFPGLTITFRVQHGSNPMYLAVLIEHENKDGDVVQADIMQSNSGHWEPMHESWGSIWRIDPNRPLRGPFSMRITNESGRQLVAKNVIPANYIPDVDYRSFVQY

SEQ ID NO: 16152 - protein, 259 aa, Zea mays subsp. mays
  peptide (1)..(259): Ceres Seq. ID no. 12383099
MVVASGARAEQQFKRNATTASQDRSLLSYSSGWLPAKATWYGAPTGAGPLDNGGACGFKGTNQYPFSSMTSCGNEPIFKDGKGCGSCYQIRCLKSNHPACSGVAQTVIITDMNYYPVAKYHFDLSGTAFGSMASWGLNDKLRHAGIIDMQFRRVPCNFPGLTITFRVQHGSNPMYLAVLIEHENKDGDVVQADIMQSNSGHWEPMHESWGSIWRIDPNRPLRGPFSMRITNESGRQLVAKNVIPANYIPDVDYRSFVQY

SEQ ID NO: 16153 - protein, 193 aa, Zea mays subsp. mays
  peptide (1)..(193): Ceres Seq. ID no. 12383100
MLPDTVPEEQPPGLLRRGSDGDHHGHELLPGGQVPLRPERHGVRVHGQLGPERQAPARRDHRHAVQAGAVQLPGPDHHLPRPARLQPHVPGRAHRAREQGRRRGAGGHHAEQLRPLGAHARVLGLHLEDRPQPPAPWPLLHAHHQRVRQAAGGQERHPGQLHPRRRLPLLRPVLMIELAWSLLKRLIVSSLFN

SEQ ID NO: 16154 - DNA, 1835 bp, Zea mays subsp. mays
  misc_feature (1)..(1835): Ceres Seq. ID no. 12349580
  misc_feature (1)..(1835): Ortholog of  Ceres SEQ ID NO 14307682 as cited in SEQ ID NO 54529
aaatccagatatcagggcagctggaactgaaggtggcgggagccgagtgatccggcggtgagctgagcggggcgggatggcggcggagcaggggcggtcgctggcggagacgcccacctggtccgtggcaaccgtcaccacgctcatggtcgctgcctgcttcctcgtcgagcgctccctctcgcgcttcgccaagtggctgcgcaagaccaagcggaaggccatgctcgccgcgctcgagaagatccgcgaagagctgatgctgctcggagtcatctcgctgctgctcagccagacggcgcgcttcatatcggagatctgcgtgccgtcctcgctcttcaccagccgcttctacatctgctccgagagcgactaccaggacctgctgcgcaacacggacgccaaccagacggcgctcgacaagaacatgttcggtggccaacggctgcacgtctgtggcgagggccatgaaccttttgtttcgtacgagggccttgagcagctgcaccggtttctcttcatccttggtatcactcatgtgttgtacagttttgtaacagtggttctgtccatgatcaagatctatagctggaggaagtgggaaaccttagcaggtccaattgctgctgaggaattgaaagctaggagaaccaaggtgatgagaaggcagtcaacctttgtttttaacaatgcttctcatccatggagcaaaaataaaatacttatttggatgctttgctttttgcgtcaattcaagggctccataataaggtcagactatttggcactgaggttgggctttgtcacatatcacaagctaccacattcatatgacttccataaatacatggtacggagcatggaagatgattacaatgggactattggtatcagttggccactttgggcatatgcgattgtctgcatattaatcaatgttcatggtatcaatatatatttctggttgtcctttgttcctgttattctggtgcttctagtgggtactgaacttcagcacgtcattgctcagttggctttggaagtcgctgaggcaacagcgccttatgttggctcacaacttaaactgcgtgatgatctattttggtttggaaagcctcgggtactctggtggcttatacagttcatttcatttcagaatgcttttgagctggcgacattcttatggtctctgtgggaactcagtgcacatacatgtttcatgaagcactactacatggttgccattcggttgatttctgggctcctagttcagttttggtgcagctacagcacactgccgctgaatgtgattatttctcagatgggttccaagttcaagaaatcactggtctcggagaacgtgagggagtcgctgcacagctggtgcaagagggttaaggacaggagccgacacaacccgctcttctcgcggaacgggaccctcacgaccagatccgtgtgctccctagacaccacctacgagacggatcacgagacgaacacggtgtgcacgctgtcgaggacggcgtcggcaacgtcgctggacgaccagttgaccgtggtcaccgtcgatgacgagccgtcctgcattgagaaggatgtctgacgcagttgctgattcgccaaaactacatactgcatcgacctgtgtgttaggaggtactctaggactgaaatgaatgtatatgtgcagtggttgcccctatcgtggcagtgaccatgtgtatatatagaactaaaaaaactataatgtctcttagctgagagtgagaggctgtacatggaaatacttgaggcagcttggaccaaatacaaaactgcggccccgtttgttt

SEQ ID NO: 16155 - protein, 509 aa, Zea mays subsp. mays
  peptide (1)..(509): Ceres Seq. ID no. 12349581
MAAEQGRSLAETPTWSVATVTTLMVAACFLVERSLSRFAKWLRKTKRKAMLAALEKIREELMLLGVISLLLSQTARFISEICVPSSLFTSRFYICSESDYQDLLRNTDANQTALDKNMFGGQRLHVCGEGHEPFVSYEGLEQLHRFLFILGITHVLYSFVTVVLSMIKIYSWRKWETLAGPIAAEELKARRTKVMRRQSTFVFNNASHPWSKNKILIWMLCFLRQFKGSIIRSDYLALRLGFVTYHKLPHSYDFHKYMVRSMEDDYNGTIGISWPLWAYAIVCILINVHGINIYFWLSFVPVILVLLVGTELQHVIAQLALEVAEATAPYVGSQLKLRDDLFWFGKPRVLWWLIQFISFQNAFELATFLWSLWELSAHTCFMKHYYMVAIRLISGLLVQFWCSYSTLPLNVIISQMGSKFKKSLVSENVRESLHSWCKRVKDRSRHNPLFSRNGTLTTRSVCSLDTTYETDHETNTVCTLSRTASATSLDDQLTVVTVDDEPSCIEKDV

SEQ ID NO: 16156 - protein, 486 aa, Zea mays subsp. mays
  peptide (1)..(486): Ceres Seq. ID no. 12349582
MVAACFLVERSLSRFAKWLRKTKRKAMLAALEKIREELMLLGVISLLLSQTARFISEICVPSSLFTSRFYICSESDYQDLLRNTDANQTALDKNMFGGQRLHVCGEGHEPFVSYEGLEQLHRFLFILGITHVLYSFVTVVLSMIKIYSWRKWETLAGPIAAEELKARRTKVMRRQSTFVFNNASHPWSKNKILIWMLCFLRQFKGSIIRSDYLALRLGFVTYHKLPHSYDFHKYMVRSMEDDYNGTIGISWPLWAYAIVCILINVHGINIYFWLSFVPVILVLLVGTELQHVIAQLALEVAEATAPYVGSQLKLRDDLFWFGKPRVLWWLIQFISFQNAFELATFLWSLWELSAHTCFMKHYYMVAIRLISGLLVQFWCSYSTLPLNVIISQMGSKFKKSLVSENVRESLHSWCKRVKDRSRHNPLFSRNGTLTTRSVCSLDTTYETDHETNTVCTLSRTASATSLDDQLTVVTVDDEPSCIEKDV

SEQ ID NO: 16157 - protein, 460 aa, Zea mays subsp. mays
  peptide (1)..(460): Ceres Seq. ID no. 12349583
MLAALEKIREELMLLGVISLLLSQTARFISEICVPSSLFTSRFYICSESDYQDLLRNTDANQTALDKNMFGGQRLHVCGEGHEPFVSYEGLEQLHRFLFILGITHVLYSFVTVVLSMIKIYSWRKWETLAGPIAAEELKARRTKVMRRQSTFVFNNASHPWSKNKILIWMLCFLRQFKGSIIRSDYLALRLGFVTYHKLPHSYDFHKYMVRSMEDDYNGTIGISWPLWAYAIVCILINVHGINIYFWLSFVPVILVLLVGTELQHVIAQLALEVAEATAPYVGSQLKLRDDLFWFGKPRVLWWLIQFISFQNAFELATFLWSLWELSAHTCFMKHYYMVAIRLISGLLVQFWCSYSTLPLNVIISQMGSKFKKSLVSENVRESLHSWCKRVKDRSRHNPLFSRNGTLTTRSVCSLDTTYETDHETNTVCTLSRTASATSLDDQLTVVTVDDEPSCIEKDV

SEQ ID NO: 16158 - DNA, 1825 bp, Zea mays subsp. mays
  misc_feature (1)..(1825): Ceres Seq. ID no. 12368369
  misc_feature (1)..(1825): Ortholog of  Ceres SEQ ID NO 15173355 as cited in SEQ ID NO 61844
gcacgagaccattacctagaacatcctaatcgaaaagtgggctggtcctcagtcctcttccgttcttcctcctcgctcccgccccctcgcgcccctcgcctttcagttttggatgccacggaggcctgccagtggtgggccaccgccgtacgcgcgcgacgatgccggtgaagcgttcggcgtccgcgctggcgctcccgccggtcggccgccgcgcgcgggcccgcctctgcatccgcctcgccgcgccgctctccttcctgctcctcttcgtggcgctgttccacgcccagccgctcctgggcgttccgcccgctgcgcagccgccctccgcggggcccggtaaggtcgccttccttttcctcgtccgcgcgggggtgccgctcgacttcctctgggacgccttcttccgcaacggcgaggaggggaagttctcggtgtacgtgcactccgcgccggggttccagctcgaccgcaccaccacgggatccccatacttctatgggcggcaacttgcgaggagcgtcaaggtggtgtggggcgaggccaccatggtggaggcagagaggatgttgtttgccgccgcgcttcaggatcccgcgaaccagcgctttgttttgctctctgatagctgtgtcccactctacaatttcagctccatatatacttacctgatggcttcacctaaaagttttgtagacagctttgttgataagacggagaagcgttataatcaaaacatgtctcctgccattccaaaggataaatggaggaaaggatctcagtgggtagtattaatcagaaaacatgctgaagttgttgttggtgacaaaaacgtattaaaagtattcagaagacattgcaagatggtagtaaccaagagcttgtttagacgaaggccaaatgctagacaactggggttcacctttcggagaaagcagatactgaaaggagtagctcaacaggagcatgattgtattccggatgaacattatgtgcagacattattttctatcaaaggacttgaagatgaactggagagaagaactttgacctatacctcgtggaaccaatcatcaaatccgaaagacaaaatgacttggcatcctatgaaatttgagtatgatacatctagccctgagcatatcaatgctatcaagagaattgatcatgtcaactatcaaatggagcacaggacagagtggtgccaatgcaatggtacctcggccccatgttttttatttgccaggaagttctcctatagtgcggccatgcatcttttggaacaaggagccattggcacaccgaaatctgctcagctgatgattaacttttaacaaaattgtttacacaagtctgcgctcacttttttgatgggtcattataccgttcacaatttcaccagcctcaatgggagctgtacattagcagcggtagctacagagacatggagtatcagagtattgacagcgaccagaatgcgcttagacagctaaggacttgaagagagttgatgcacaaactacagagcctcggttttgaagtttgtcagctctatcagtatgcgatttccaggggacagatggtagtgaaggacagagtacacacaacccttaccctaacaggacaggaaagttataacaatagcttgattttccttataaatattcttccccttgtatgattaaagaatagatagttttttttacttgcatacaggttatcagacatagcgaatagggaaacatgcaagaagatacatgtgtccataggacctactgtttagaacattggtcacattggcaagaagataagctgccttttc

SEQ ID NO: 16159 - protein, 391 aa, Zea mays subsp. mays
  peptide (1)..(391): Ceres Seq. ID no. 12368370
MPVKRSASALALPPVGRRARARLCIRLAAPLSFLLLFVALFHAQPLLGVPPAAQPPSAGPGKVAFLFLVRAGVPLDFLWDAFFRNGEEGKFSVYVHSAPGFQLDRTTTGSPYFYGRQLARSVKVVWGEATMVEAERMLFAAALQDPANQRFVLLSDSCVPLYNFSSIYTYLMASPKSFVDSFVDKTEKRYNQNMSPAIPKDKWRKGSQWVVLIRKHAEVVVGDKNVLKVFRRHCKMVVTKSLFRRRPNARQLGFTFRRKQILKGVAQQEHDCIPDEHYVQTLFSIKGLEDELERRTLTYTSWNQSSNPKDKMTWHPMKFEYDTSSPEHINAIKRIDHVNYQMEHRTEWCQCNGTSAPCFLFARKFSYSAAMHLLEQGAIGTPKSAQLMINF

SEQ ID NO: 16160 - protein, 261 aa, Zea mays subsp. mays
  peptide (1)..(261): Ceres Seq. ID no. 12368371
MVEAERMLFAAALQDPANQRFVLLSDSCVPLYNFSSIYTYLMASPKSFVDSFVDKTEKRYNQNMSPAIPKDKWRKGSQWVVLIRKHAEVVVGDKNVLKVFRRHCKMVVTKSLFRRRPNARQLGFTFRRKQILKGVAQQEHDCIPDEHYVQTLFSIKGLEDELERRTLTYTSWNQSSNPKDKMTWHPMKFEYDTSSPEHINAIKRIDHVNYQMEHRTEWCQCNGTSAPCFLFARKFSYSAAMHLLEQGAIGTPKSAQLMINF

SEQ ID NO: 16161 - protein, 255 aa, Zea mays subsp. mays
  peptide (1)..(255): Ceres Seq. ID no. 12368372
MLFAAALQDPANQRFVLLSDSCVPLYNFSSIYTYLMASPKSFVDSFVDKTEKRYNQNMSPAIPKDKWRKGSQWVVLIRKHAEVVVGDKNVLKVFRRHCKMVVTKSLFRRRPNARQLGFTFRRKQILKGVAQQEHDCIPDEHYVQTLFSIKGLEDELERRTLTYTSWNQSSNPKDKMTWHPMKFEYDTSSPEHINAIKRIDHVNYQMEHRTEWCQCNGTSAPCFLFARKFSYSAAMHLLEQGAIGTPKSAQLMINF

SEQ ID NO: 16162 - DNA, 1372 bp, Zea mays subsp. mays
  misc_feature (1)..(1372): Ceres Seq. ID no. 12377676
  misc_feature (1)..(1372): Ortholog of  Ceres SEQ ID NO 13661928 as cited in SEQ ID NO 61155
agctcgggctgtggccatatcacgatggaatggaatgaacgagaacaaggaacgccgaaagaaaaagcgtgtccacatactcctccattcaccgcctctgccgctcacacgtctacacctgacgaagtgaacgcggcacacagatttggctttgctgaagaatccggctcctttcatttgttagaaggatcccagatctagatgcagcagcgcgatctgaaaccgtgttgtcggccagccaagctgcggagtacttagtatttgtttagtcaaatttgacggtggaaaccgaagctgccattgccagtaccgctgctgctagaggctatctgctgcctgccgactgccgggcctacctggtcaaacttcgcgagcagggggaagaagacgaagccgcgcccgtgcgccgagcctggggtgtggggtcgcgtcgcatcgcgtccgcccttcgccgcagccgtcggtccgggtccggccctccctagcgcggcgatggatacggaggcggtcccggcgctggcggtggtggacgcgcggttctgcgcggcgggcgcggccacgctggccgtggccaaggcgctgagcatgtccggcagcgacttcgccgtcacggacgcggccacgggcgcgcccgtgctgcgcgtcgacggcgtgctcttcagcctgcgccggcgctgcgtgctcgtcgacgccgaccgccgccccgtcctcaccgtccaagaatcggcgctgatgctgaacacgcggtggaaggtgttccggggcgacagcacccgccggcgggacctcatgttcagcgtcgtgaagccgtccgtgatccagctgcggggccccaccaaggtcagcgtcttcctcgccagcaacgacgccgagcaggcctgcgacttcaggatcaccggcagctaccacgacggcgcctgcgccgtctccctcggcgactccgacaccgtcatcgccaagatcgaccggcggttcagcgtggtcagcgcgctgctggggaagaactcgtacagcgtcaccgtcaacccggggatcgactacgccttcgtcgtcgcgctcgtcgtcatcctcgacgagatccattaccagcgatgacacgcacgcttcagttttggttccaagccgcgcgccttcccttctgctgttggctgttgcgtggaataaggctcgccccgttctcgaatgtttgtcgcgagagactacttaatttccatacgaggatcttaaccttcctaggcacttggcagttccatctggctgtgtactcgacacggacgttctctatttgttaaatacctatgctatttattgtacacttaaatattctacatattttacttttaattaatttattgtctaaagtataaaatct

SEQ ID NO: 16163 - protein, 200 aa, Zea mays subsp. mays
  peptide (1)..(200): Ceres Seq. ID no. 12377677
MDTEAVPALAVVDARFCAAGAATLAVAKALSMSGSDFAVTDAATGAPVLRVDGVLFSLRRRCVLVDADRRPVLTVQESALMLNTRWKVFRGDSTRRRDLMFSVVKPSVIQLRGPTKVSVFLASNDAEQACDFRITGSYHDGACAVSLGDSDTVIAKIDRRFSVVSALLGKNSYSVTVNPGIDYAFVVALVVILDEIHYQR

SEQ ID NO: 16164 - protein, 169 aa, Zea mays subsp. mays
  peptide (1)..(169): Ceres Seq. ID no. 12377678
MSGSDFAVTDAATGAPVLRVDGVLFSLRRRCVLVDADRRPVLTVQESALMLNTRWKVFRGDSTRRRDLMFSVVKPSVIQLRGPTKVSVFLASNDAEQACDFRITGSYHDGACAVSLGDSDTVIAKIDRRFSVVSALLGKNSYSVTVNPGIDYAFVVALVVILDEIHYQR

SEQ ID NO: 16165 - protein, 120 aa, Zea mays subsp. mays
  peptide (1)..(120): Ceres Seq. ID no. 12377679
MLNTRWKVFRGDSTRRRDLMFSVVKPSVIQLRGPTKVSVFLASNDAEQACDFRITGSYHDGACAVSLGDSDTVIAKIDRRFSVVSALLGKNSYSVTVNPGIDYAFVVALVVILDEIHYQR

SEQ ID NO: 16166 - DNA, 1694 bp, Zea mays subsp. mays
  misc_feature (1)..(1694): Ceres Seq. ID no. 12366041
  misc_feature (1)..(1694): Ortholog of  Ceres SEQ ID NO 15174638 as cited in SEQ ID NO 53185
  misc_feature (1)..(1694): Ortholog of  Ceres SEQ ID NO 15169072 as cited in SEQ ID NO 53955
  misc_feature (1)..(1694): Ortholog of  Ceres SEQ ID NO 13656643 as cited in SEQ ID NO 60740
  misc_feature (1)..(1694): Ortholog of  Ceres SEQ ID NO 15224912 as cited in SEQ ID NO 63475
  misc_feature (1)..(1694): Ortholog of  Ceres SEQ ID NO 13657460 as cited in SEQ ID NO 66115
  misc_feature (1)..(1694): Ortholog of  Ceres SEQ ID NO 13659394 as cited in SEQ ID NO 67049
acccggttgtcatcgtcagccgctcgctccctcggtcactcactcactcactcccctctagtacatcactcaccgcccgccaagcgcgaagctgtcactctgctgaccgcttgacagagcagagcacggcacctagccgccctctcaccgacccatggccatgggcggcgcgttccccttccagtggcccgagggccccgcggatcctgttctcgacgacgtgaccttgcctccgctgcccacggcggcgcccgacgccggggtcgccgcgtactacgcggacgcggcggacgtgcacgcgatgcacatggcgctgcccgatttcgcggcggcgctggctgcgatgcggcgggaggaggaggaggccgcgggcatccgcctggtgcacctcctcatgagctgcgccggcgccgtcgaggcggccgaccacgcgggcgcgtccgcgcacctggcggacgcgcacgccgcgctcgccgccgtctcgcccacatccggcatcggccgcgtgtgccgtgcacttcaccgccgcgctgtcccgccggctgttccctcccacgccttcgccttcgcctccgcccccggccccgcacgccgccgacgccgaccgagccttcctctaccaccgcttctacgaggcgggtccctacctcaagtttgcgcacttcacggccaaccaggccatcctggaggccgtccagggctgcaagcacgtgcacatcatcgacttcagcatcatgcagggcctccagtggccagcgctaatccaggccctcgcgctccggcccggcgggccgccgtcggtccgcctcacgggcattgggccgccgtccccgccagggcgcgacgacctccgcgacgtcggggtccgcctcgccgacctggcgcgctccgtgcgcgtccacttctccttccgcggcgtggccgccaaccgcctcgacgaggtgcggccctggatgctgcaggtctcgcagggcgaggccgtggccgtgaactccgtgctccagctgcaccgcctcctcgccgacgctccctcgtcgggcgacgcccgggcgcccatcgacgccgtgctggagtgcgtcgcgtccgtgcgccccagggtgttcacggtggtggagcaggaggcggaccacaacaagtcggggttcctggaccggttcacggaggcgctcttctactactcggcggtgttcgactccctggacgcggcgagcggcggcgcgggcgacgcggcggcggaggcctacctggagcgcgagatctgcgacatcgtgtgcggcgagggcgcggagcgcagggagcggcacgagccgctgtggcggtggcgggacaggctgggtcgcacggggctggccgccgtgccgctgggggccaacgcgctgcggcaggcgaggatgctggtggggctcttctccggggaaggacactgcgtggaggaggccgaggggtgcctgacactgggctgacacgggcgcccgctcttctcggcgtccgcgtggcgcgcggaagagaacaatcagagtgacagcaggagcaggagcagcggcagtgaggagagcaatatcagctgcagcagctagagcgtcgctactttactgtaaattccttcggtgagaggctagtagcggggtttactgtaaaatcgcggtgcccgcgatccaaatggttcgattgagagagcgttggcatcggtcgtc

SEQ ID NO: 16167 - protein, 455 aa, Zea mays subsp. mays
  peptide (1)..(455): Ceres Seq. ID no. 12366042
MAMGGAFPFQWPEGPADPVLDDVTLPPLPTAAPDAGVAAYYADAADVHAMHMALPDFAAALAAMRREEEEAAGIRLVHLLMSCAGAVEAADHAGASAHLADAHAALAAVSPTSGIGRVCRALHRRAVPPAVPSHAFAFASAPGPARRRRRPSLPLPPLLRGGSLPQVCALHGQPGHPGGRPGLQARAHHRLQHHAGPPVASANPGPRAPARRAAVGPPHGHWAAVPARARRPPRRRGPPRRPGALRARPLLLPRRGRQPPRRGAALDAAGLAGRGRGRELRAPAAPPPRRRSLVGRRPGAHRRRAGVRRVRAPQGVHGGGAGGGPQQVGVPGPVHGGALLLLGGVRLPGRGERRRGRRGGGGLPGARDLRHRVRRGRGAQGAARAAVAVAGQAGSHGAGRRAAGGQRAAAGEDAGGALLRGRTLRGGGRGVPDTGLTRAPALLGVRVARGREQSE

SEQ ID NO: 16168 - protein, 453 aa, Zea mays subsp. mays
  peptide (1)..(453): Ceres Seq. ID no. 12366043
MGGAFPFQWPEGPADPVLDDVTLPPLPTAAPDAGVAAYYADAADVHAMHMALPDFAAALAAMRREEEEAAGIRLVHLLMSCAGAVEAADHAGASAHLADAHAALAAVSPTSGIGRVCRALHRRAVPPAVPSHAFAFASAPGPARRRRRPSLPLPPLLRGGSLPQVCALHGQPGHPGGRPGLQARAHHRLQHHAGPPVASANPGPRAPARRAAVGPPHGHWAAVPARARRPPRRRGPPRRPGALRARPLLLPRRGRQPPRRGAALDAAGLAGRGRGRELRAPAAPPPRRRSLVGRRPGAHRRRAGVRRVRAPQGVHGGGAGGGPQQVGVPGPVHGGALLLLGGVRLPGRGERRRGRRGGGGLPGARDLRHRVRRGRGAQGAARAAVAVAGQAGSHGAGRRAAGGQRAAAGEDAGGALLRGRTLRGGGRGVPDTGLTRAPALLGVRVARGREQSE

SEQ ID NO: 16169 - protein, 406 aa, Zea mays subsp. mays
  peptide (1)..(406): Ceres Seq. ID no. 12366044
MHMALPDFAAALAAMRREEEEAAGIRLVHLLMSCAGAVEAADHAGASAHLADAHAALAAVSPTSGIGRVCRALHRRAVPPAVPSHAFAFASAPGPARRRRRPSLPLPPLLRGGSLPQVCALHGQPGHPGGRPGLQARAHHRLQHHAGPPVASANPGPRAPARRAAVGPPHGHWAAVPARARRPPRRRGPPRRPGALRARPLLLPRRGRQPPRRGAALDAAGLAGRGRGRELRAPAAPPPRRRSLVGRRPGAHRRRAGVRRVRAPQGVHGGGAGGGPQQVGVPGPVHGGALLLLGGVRLPGRGERRRGRRGGGGLPGARDLRHRVRRGRGAQGAARAAVAVAGQAGSHGAGRRAAGGQRAAAGEDAGGALLRGRTLRGGGRGVPDTGLTRAPALLGVRVARGREQSE

SEQ ID NO: 16170 - DNA, 495 bp, Zea mays subsp. mays
  misc_feature (1)..(495): Ceres Seq. ID no. 13565414
  misc_feature (1)..(495): Ortholog of  Ceres SEQ ID NO 13600397 as cited in SEQ ID NO 0
agcgcccgcaggccgcagctgcagtctgcagagcacagccgtgcgcggtttgcaaccgtaccagcacaagcaccccaggcgggcaggaaacaagcctcctccgctgctccgccgcaatggcgtccccgcgcggccatcgccgggccagcgtgctgcagaaggcggcggcgctcctcctgctcgccctgtcctgctgcggctgcaccggtgccggcgccggtccatcggcgccaaccccgaaggtgccggcggtgatcgtgttcggggactcgacggtggacacgggcaacaacaacgcgatcgggaccatcctgaagagcaacttcccgccgtacgggcgcgacatggccggcggggcccagcccacggggcggttctgcaacgggcgcctgccgccggacttcatctccgaggcgctcggcctgccgccgctggtcccggcctacctcgaccccgcctacggcatccaggacttcgcccgcggcgtctgcttcg

SEQ ID NO: 16171 - protein, 164 aa, Zea mays subsp. mays
  peptide (1)..(164): Ceres Seq. ID no. 13565415
RPQAAAAVCRAQPCAVCNRTSTSTPGGQETSLLRCSAAMASPRGHRRASVLQKAAALLLLALSCCGCTGAGAGPSAPTPKVPAVIVFGDSTVDTGNNNAIGTILKSNFPPYGRDMAGGAQPTGRFCNGRLPPDFISEALGLPPLVPAYLDPAYGIQDFARGVCF

SEQ ID NO: 16172 - protein, 164 aa, Zea mays subsp. mays
  peptide (1)..(164): Ceres Seq. ID no. 13565416
APAGRSCSLQSTAVRGLQPYQHKHPRRAGNKPPPLLRRNGVPARPSPGQRAAEGGGAPPARPVLLRLHRCRRRSIGANPEGAGGDRVRGLDGGHGQQQRDRDHPEEQLPAVRARHGRRGPAHGAVLQRAPAAGLHLRGARPAAAGPGLPRPRLRHPGLRPRRLL

SEQ ID NO: 16173 - protein, 126 aa, Zea mays subsp. mays
  peptide (1)..(126): Ceres Seq. ID no. 13565417
MASPRGHRRASVLQKAAALLLLALSCCGCTGAGAGPSAPTPKVPAVIVFGDSTVDTGNNNAIGTILKSNFPPYGRDMAGGAQPTGRFCNGRLPPDFISEALGLPPLVPAYLDPAYGIQDFARGVCF

SEQ ID NO: 16174 - DNA, 1740 bp, Zea mays subsp. mays
  misc_feature (1)..(1740): Ceres Seq. ID no. 12566955
  misc_feature (1)..(1740): Ortholog of  Ceres SEQ ID NO 13656012 as cited in SEQ ID NO 69067
gcacgagaccattacctagaacatcctaatcaaaagtttatattcttgtgaggaagaaacattcccatccccgtcattgaggaattcggaatcggggatcgagtacatctccacttcttcccaggcggccaggccctggcccgcggccgcaccgcaccgtagtttgttccttccgccaggaagcgagagaaaatcgagtgaaaaggaaggggaaataaggctgaatcacagtttctggatcggaggagcatccccgcctaggtctctgcagccatggttcgcggatcgctcggcaagcttgcatcgcgcgccctctccgtcgccgggagatggcagcaccagcagctccgccgcctcaacatccacgagtaccagggcgcggagttgatgggtaaatacgggatcaacgtgcccaggggcgcggcggctgggtccgtacacgaggtcaaggacgccttgaagaacatgttccccagcgagaaagagatagttgttaaaagtcaaatccttgctggtggccgagggctgggaactttcaaaagcggactgcaaggtggtgtccatattgttaaggctgaggaagctgaattgattgcaagtaaaatgttaggccagattctgataacgaaacaaactggtccagagggaaagattgtgagcaaggtctacttgtgtgagaaactatctcttactaatgagatgtactttgccatcacccttgataggaaaactgctggtccgctcattattgcttgcagcaagggaggaaccagtattgaagatcttgcggagaagtatcctgatatgattattaaggttcctattgatgtatttaaaggaatcacagatgaggatgcagctaaagttgttgatggtctagctctaaaggcagcggataggcagtcttctatagaacagattaagaagctgtatgaacttttctgcaagtgtgattgcacattgctggagataaatcctctggcggagacagctgacaacaagcttgttgctgctgatgcaaaattgaactttgatgataatgctgcatttagacagaaagaaatatttgcactgcgtgatacaactcaggaagaccccagggaggtcgctgctgccaaagcagatttgaactatattggtcttgatggagagattggttgcatggtgaatggagcaggattggccatggcgaccatggatattataaagttgcatggtggtacgcccgccaattttcttgatgtcggtggaagtgcatcagaggggcaggttgtggaagcttttaagatactgacttcagatgatagagtgaaggcaattctagtgaacatttttggtggcattatgaaatgtgatgtgatagcaagtggaattgttaatgctgccaaacaggttgacctgaaagttcctgttgttgttcggttggaaggcaccaatgtagaccaaggaaagaggattcttaaggaaagtggaatgactttgatcactgcagaagatcttgatgatgcggcagagaaagctgtaaaagcatccgtcaaataactagtgtatcaatctgaagtttttttttcactggtacaagatgagcagtgctcttttacggatttcgatttggagcagaagtcgtgaactgcaacatttttgaagtggggttattttggccttgttttgctgttaaatgttgccagtgccgaaattgtggtctcgttttaataaacaaatctatcggtcccattggtc

SEQ ID NO: 16175 - protein, 422 aa, Zea mays subsp. mays
  peptide (1)..(422): Ceres Seq. ID no. 12566956
MVRGSLGKLASRALSVAGRWQHQQLRRLNIHEYQGAELMGKYGINVPRGAAAGSVHEVKDALKNMFPSEKEIVVKSQILAGGRGLGTFKSGLQGGVHIVKAEEAELIASKMLGQILITKQTGPEGKIVSKVYLCEKLSLTNEMYFAITLDRKTAGPLIIACSKGGTSIEDLAEKYPDMIIKVPIDVFKGITDEDAAKVVDGLALKAADRQSSIEQIKKLYELFCKCDCTLLEINPLAETADNKLVAADAKLNFDDNAAFRQKEIFALRDTTQEDPREVAAAKADLNYIGLDGEIGCMVNGAGLAMATMDIIKLHGGTPANFLDVGGSASEGQVVEAFKILTSDDRVKAILVNIFGGIMKCDVIASGIVNAAKQVDLKVPVVVRLEGTNVDQGKRILKESGMTLITAEDLDDAAEKAVKASVK

SEQ ID NO: 16176 - protein, 384 aa, Zea mays subsp. mays
  peptide (1)..(384): Ceres Seq. ID no. 12566957
MGKYGINVPRGAAAGSVHEVKDALKNMFPSEKEIVVKSQILAGGRGLGTFKSGLQGGVHIVKAEEAELIASKMLGQILITKQTGPEGKIVSKVYLCEKLSLTNEMYFAITLDRKTAGPLIIACSKGGTSIEDLAEKYPDMIIKVPIDVFKGITDEDAAKVVDGLALKAADRQSSIEQIKKLYELFCKCDCTLLEINPLAETADNKLVAADAKLNFDDNAAFRQKEIFALRDTTQEDPREVAAAKADLNYIGLDGEIGCMVNGAGLAMATMDIIKLHGGTPANFLDVGGSASEGQVVEAFKILTSDDRVKAILVNIFGGIMKCDVIASGIVNAAKQVDLKVPVVVRLEGTNVDQGKRILKESGMTLITAEDLDDAAEKAVKASVK

SEQ ID NO: 16177 - protein, 358 aa, Zea mays subsp. mays
  peptide (1)..(358): Ceres Seq. ID no. 12566958
MFPSEKEIVVKSQILAGGRGLGTFKSGLQGGVHIVKAEEAELIASKMLGQILITKQTGPEGKIVSKVYLCEKLSLTNEMYFAITLDRKTAGPLIIACSKGGTSIEDLAEKYPDMIIKVPIDVFKGITDEDAAKVVDGLALKAADRQSSIEQIKKLYELFCKCDCTLLEINPLAETADNKLVAADAKLNFDDNAAFRQKEIFALRDTTQEDPREVAAAKADLNYIGLDGEIGCMVNGAGLAMATMDIIKLHGGTPANFLDVGGSASEGQVVEAFKILTSDDRVKAILVNIFGGIMKCDVIASGIVNAAKQVDLKVPVVVRLEGTNVDQGKRILKESGMTLITAEDLDDAAEKAVKASVK

SEQ ID NO: 16178 - DNA, 1405 bp, Zea mays subsp. mays
  misc_feature (1)..(1405): Ceres Seq. ID no. 13577701
  misc_feature (1)..(1405): Ortholog of  Ceres SEQ ID NO 15175368 as cited in SEQ ID NO 60071
  misc_feature (1)..(1405): Ortholog of  Ceres SEQ ID NO 15225423 as cited in SEQ ID NO 64689
gcacgagaccattacctagaacatcctaatcgaaaaacccctaggaaacgacgaccgcaactacataccagccagccgacccgacccccagcagtcttgcaggctacagcccctgcggcaccagagggagcggccgcggcagggcgtcctcgtcgccgcggcagggcgctagggcaggcaggcatgcgctgatggaattcacggcccaggagggggaggagcccgtctcggaggagatgggcgcgagctccgcgccgccgccctgcctcggccccggccgcggcacggggaaccagaaccacgccgccgaggcgacgtaccacgagtgtctgcgcaaccacgcggcggcgctgggcggacacgtcgtcgatggctgcggcgagttcatgcccgaggacgccgacaggctcaagtgcgcagcctgcggctgccaccgcagcttccaccgcaagggcgacgcggggcgccgccaccagctcctgctgccgccgcccgccgcggcggtcccgcgcgtcccgctgctcctgcctccgccccacccctacgcggccggctgctgcccacccccactacgcgtcgccgccgctgttcccgtaccacggcacgcccagcggcaccacgaccgagtcgtccagcgaggagcgtggcccgccgtccgggttcgccgccgcgccgcacgcgcacgcgcagggccacgtccggcggaagcggatccggaccaagttcacgccggagcagaaggagcagatgctggcgttcgcggaacgcctcggctggcggatgcagaagcaggacgacgcgctggtgcagcacttctgcgaccaggtcggcgtccggcggcaggtcttcaaggtctggatgcacaacaacaagcacatcggcagcggcggcaggaggcagccgccgccgcacctgccgcctcccgaggggcagcaacagccccagcagccccagtagccacggtgggagacaaggctcagcagtcagcagcaccaccaccaccaccaccatttgcttaatcccccgcctcatttttttatgggctccgagagggggtgtgggattaaacaagggaagtcaggaggggttcctatcctttcttcccttccgtttttgggttcaccttatccttgattttttgtagtcacttcacgtcttcaccatcctcttttgcttcacgattcttgcttgcatatctttggttttattctgttcttactagcttgggggatcaattggaaggaggaggaggcactgtgcatgttttgtagctacaatcctgctaccttattgccatttagcccccttcggcgagcaaggttaaccaatctaaattccgatctatatttccatcttcacttaatctgttaatcaatagcgaatatagccggtggtctctcctccg

SEQ ID NO: 16179 - protein, 275 aa, Zea mays subsp. mays
  peptide (1)..(275): Ceres Seq. ID no. 13577702
MEFTAQEGEEPVSEEMGASSAPPPCLGPGRGTGNQNHAAEATYHECLRNHAAALGGHVVDGCGEFMPEDADRLKCAACGCHRSFHRKGDAGRRHQLLLPPPAAAVPRVPLLLPPPHPYAAGCCPPPLRVAAAVPVPRHAQRHHDRVVQRGAWPAVRVRRRAARARAGPRPAEADPDQVHAGAEGADAGVRGTPRLADAEAGRRAGAALLRPGRRPAAGLQGLDAQQQAHRQRRQEAAAAAPAASRGAATAPAAPVATVGDKAQQSAAPPPPPPFA

SEQ ID NO: 16180 - protein, 260 aa, Zea mays subsp. mays
  peptide (1)..(260): Ceres Seq. ID no. 13577703
MGASSAPPPCLGPGRGTGNQNHAAEATYHECLRNHAAALGGHVVDGCGEFMPEDADRLKCAACGCHRSFHRKGDAGRRHQLLLPPPAAAVPRVPLLLPPPHPYAAGCCPPPLRVAAAVPVPRHAQRHHDRVVQRGAWPAVRVRRRAARARAGPRPAEADPDQVHAGAEGADAGVRGTPRLADAEAGRRAGAALLRPGRRPAAGLQGLDAQQQAHRQRRQEAAAAAPAASRGAATAPAAPVATVGDKAQQSAAPPPPPPFA

SEQ ID NO: 16181 - protein, 210 aa, Zea mays subsp. mays
  peptide (1)..(210): Ceres Seq. ID no. 13577704
MPEDADRLKCAACGCHRSFHRKGDAGRRHQLLLPPPAAAVPRVPLLLPPPHPYAAGCCPPPLRVAAAVPVPRHAQRHHDRVVQRGAWPAVRVRRRAARARAGPRPAEADPDQVHAGAEGADAGVRGTPRLADAEAGRRAGAALLRPGRRPAAGLQGLDAQQQAHRQRRQEAAAAAPAASRGAATAPAAPVATVGDKAQQSAAPPPPPPFA

SEQ ID NO: 16182 - protein, 195 aa, Zea mays subsp. mays
  peptide (1)..(195): Ceres Seq. ID no. 13577705
MAAASSCPRTPTGSSAQPAAATAASTARATRGAATSSCCRRPPRRSRASRCSCLRPTPTRPAAAHPHYASPPLFPYHGTPSGTTTESSSEERGPPSGFAAAPHAHAQGHVRRKRIRTKFTPEQKEQMLAFAERLGWRMQKQDDALVQHFCDQVGVRRQVFKVWMHNNKHIGSGGRRQPPPHLPPPEGQQQPQQPQ

SEQ ID NO: 16183 - DNA, 1801 bp, Zea mays subsp. mays
  misc_feature (1)..(1801): Ceres Seq. ID no. 12358426
  misc_feature (1)..(1801): Ortholog of  Ceres SEQ ID NO 13654928 as cited in SEQ ID NO 62546
aggagaaaggttgccatctcgtgtgtgtgtgtctgttggatggatctctgtgagccatgccctctttgtcttcttgcttttgctttcttggtcccttcccttctcttttctagcagagctctcgtggttcttggccttccgtgtgtctgccaggtagaaattttaaccgaaaaaaagattcttccgagcaaaggagcgctgccagctttcacataaacaagttggggaagcagttgaggttttctaattcttcttggaaggattgagatctccagttctgataatgggttcttttgggatgaactggaatcagaaggaccccatggtgtgggattgggaacatctagtaccgtctgtctcaaatgcagttacaaggcacggatctgctaattcatctggtggtactcttacttctaactcagagctagggcatggttcatccaagagctctatttcagcgtccattgattcaccctctggagtagggaacagcttagagttcaacttcgccgctgttgagaggcatgttaagaacacgggcacgaacggcagagtcgatgactcggggaattctccatcgtcaatgatagctttcaaccaaggagagccattaatcagcctgaaacttgggaagagggcttacttcgaaaacgcctgcggaggacaggatgccaaggtttctgcagcttcagacgttacttctgcagccagcgtggtcaagaagactaaggtgtctcagcagaatgcaaagaactggtactgtcaggttgaagggtgcaaagttgacctgtcttctgctaaagattacaatcgcaagcacaaggtctgtgtagtccattctaaagctaccaaggtggttgttgctggtctagagcgtcggttttgtcaacagtgtagccgttttcatggtttagcggagtttgatcagaacaaacgaagctgtcgtaggcgtctgatgcatcataatgcacggaggaggaaacctcaggcagacacaatttcattcaattcatcgacaatgttttatgatacaaggcagcggacaaatcttttctttagtcaaccactttatggccaagtgaggagcaatgcagggtcttcatgggataacttgggaggcttaaaattcatggagacgaaacatccgccagtgcatccaacaaaaacagcatcccctgatgaactgcatttctcagccctccagataactagtgctgcggctcacaccggacatcatcatgatctcgatgggttcatggcgttcaagggaaccagcacaaaggtccttaaccaaggcgtggaggcttgggcggccgcttccagctcgaacaacggaggcccagaaggtgggcgtgctctctctcttctgtcagacggctcgtggggctcgagttcagccgtcatccagcagcccacatctcacgcggacgccggtgcattgctgccgcccctcgccaccgttgccgtctccaacgccgccgccgccgccgggcatcctctggacccgtccccgggaaggttctggccgcaagacgatcatcccccgctcgtcgacggacccgccacgcagattccggagctggcgcacctccggatatggtgaaaggaaacgcatgtgatgcggtgactggtgacatgccagttcgagggcctggctgggaacacatctggttggttagcctgccgctctggcttgaatttgccggcgacgacagtctttgtttgtatcttttgatcagaacggacacagacatgtttgcacaatataatgtgacgagtccctctttggggttgaggagtt

SEQ ID NO: 16184 - protein, 439 aa, Zea mays subsp. mays
  peptide (1)..(439): Ceres Seq. ID no. 12358427
MGSFGMNWNQKDPMVWDWEHLVPSVSNAVTRHGSANSSGGTLTSNSELGHGSSKSSISASIDSPSGVGNSLEFNFAAVERHVKNTGTNGRVDDSGNSPSSMIAFNQGEPLISLKLGKRAYFENACGGQDAKVSAASDVTSAASVVKKTKVSQQNAKNWYCQVEGCKVDLSSAKDYNRKHKVCVVHSKATKVVVAGLERRFCQQCSRFHGLAEFDQNKRSCRRRLMHHNARRRKPQADTISFNSSTMFYDTRQRTNLFFSQPLYGQVRSNAGSSWDNLGGLKFMETKHPPVHPTKTASPDELHFSALQITSAAAHTGHHHDLDGFMAFKGTSTKVLNQGVEAWAAASSSNNGGPEGGRALSLLSDGSWGSSSAVIQQPTSHADAGALLPPLATVAVSNAAAAAGHPLDPSPGRFWPQDDHPPLVDGPATQIPELAHLRIW

SEQ ID NO: 16185 - protein, 434 aa, Zea mays subsp. mays
  peptide (1)..(434): Ceres Seq. ID no. 12358428
MNWNQKDPMVWDWEHLVPSVSNAVTRHGSANSSGGTLTSNSELGHGSSKSSISASIDSPSGVGNSLEFNFAAVERHVKNTGTNGRVDDSGNSPSSMIAFNQGEPLISLKLGKRAYFENACGGQDAKVSAASDVTSAASVVKKTKVSQQNAKNWYCQVEGCKVDLSSAKDYNRKHKVCVVHSKATKVVVAGLERRFCQQCSRFHGLAEFDQNKRSCRRRLMHHNARRRKPQADTISFNSSTMFYDTRQRTNLFFSQPLYGQVRSNAGSSWDNLGGLKFMETKHPPVHPTKTASPDELHFSALQITSAAAHTGHHHDLDGFMAFKGTSTKVLNQGVEAWAAASSSNNGGPEGGRALSLLSDGSWGSSSAVIQQPTSHADAGALLPPLATVAVSNAAAAAGHPLDPSPGRFWPQDDHPPLVDGPATQIPELAHLRIW

SEQ ID NO: 16186 - protein, 426 aa, Zea mays subsp. mays
  peptide (1)..(426): Ceres Seq. ID no. 12358429
MVWDWEHLVPSVSNAVTRHGSANSSGGTLTSNSELGHGSSKSSISASIDSPSGVGNSLEFNFAAVERHVKNTGTNGRVDDSGNSPSSMIAFNQGEPLISLKLGKRAYFENACGGQDAKVSAASDVTSAASVVKKTKVSQQNAKNWYCQVEGCKVDLSSAKDYNRKHKVCVVHSKATKVVVAGLERRFCQQCSRFHGLAEFDQNKRSCRRRLMHHNARRRKPQADTISFNSSTMFYDTRQRTNLFFSQPLYGQVRSNAGSSWDNLGGLKFMETKHPPVHPTKTASPDELHFSALQITSAAAHTGHHHDLDGFMAFKGTSTKVLNQGVEAWAAASSSNNGGPEGGRALSLLSDGSWGSSSAVIQQPTSHADAGALLPPLATVAVSNAAAAAGHPLDPSPGRFWPQDDHPPLVDGPATQIPELAHLRIW

SEQ ID NO: 16187 - DNA, 1774 bp, Zea mays subsp. mays
  misc_feature (1)..(1774): Ceres Seq. ID no. 13565630
  misc_feature (1)..(1774): Ortholog of  Ceres SEQ ID NO 14307843 as cited in SEQ ID NO 20508
  misc_feature (1)..(1774): Ortholog of  Ceres SEQ ID NO 15170811 as cited in SEQ ID NO 52649
  misc_feature (1)..(1774): Ortholog of  Ceres SEQ ID NO 13638331 as cited in SEQ ID NO 58047
  misc_feature (1)..(1774): Ortholog of  Ceres SEQ ID NO 15225845 as cited in SEQ ID NO 65125
  misc_feature (1)..(1774): Ortholog of  Ceres SEQ ID NO 15170135 as cited in SEQ ID NO 67647
atccatctatccatcatcaccagctagcacctcctttcccacgactcccgagcgctctgcgtgtggcgcgcggcagcatggcgactgcgaacgggagcagcaaggggtcgttcgaggtgcccaaggtggaggtcaggttcaccaagctcttcatcgacggcaagttcgtcgacgccgtctccggcaagacgttcgagacccgggaccctcgcaccggcgaggtgatcgccagcatcgcggagggaggcaaggccgacgtcgacctcgccgtcaaggccgcccgggaggccttcgacaacgggccctggcccaggatgacgggatacgagcgtggtcggatcctccacaggttcgcggacctgatcgacgagcacgtggaggagctggcggcgctggacacggtggacgccggcaagctgttcgccgtgggcaaggcgcgggacatcccgggcgccgcgcacctgctgcgctactacgccggcgccgccgacaaggtgcacggcgcgacgctcaagatggcgcagcggatgcacgggtacacgctcaaggagcccgtgggcgtggtgggccacatcgtgccctggaactaccccaccaccatgttcttcttcaaggtagggcccgcgctcgccgccggctgcgccgtcgtcgtcaagcccgccgagcagacgccgctgtccgcgctcttctacgcgcacctcgccagggaggccggcgtcccagccggcgtgctcaacgtcgtgccgggattcgggcccacggccggggccgccgtcgccgcccacatggacgtcgacaaggtcagcttcaccgggtccacggaggtcggccgcctcgtcatgagggccgcggccgagagcaacctcaagcccgtgtcgctcgagctgggcggcaagtctcccgtcatcgtcttcgacgacgccgacctcgacatggccgttaacctcgtcaacttcgccacctacaccaacaagggcgagatctgtgtggccggcacacgcatctacgtgcaggaagggatctacgacgagttcgtgaagaaggccgccgagctcgccagcaagtccgtggtcggagacccgttcaacccgagtgtcagccagggcccccaggttgacaaggaccagtacgagaaggtcctcaggtacattgacatcggaaagcgcgaaggcgccacgctggtcaccggagggaagccctgcggcgacaataagggctactacatcgagcccaccatcttcacggacgtcaaggacgacatgacgatcgcacaggatgaaatctttgggccggtgatggctctcatgaaattcaagaccgtggaggaggtgatccagaaagcgaacaacacccggtacggcctggccgccggcatcgtgaccaagaacatcgacgtcgccaacaccgtgtcgcggtccatccgcgccggcgccatctggatcaactgctacttcgcgttcgacccggacgcgccgttcggcgggtacaagatgagcgggttcggcaaggacatgggcatggacgcgctcgacaagtacctgcagaccaagaccgtcgtcactccgctgtacaacactccatggctctgaccgaccgacctctcatcctgtccgatgaacagttcaacatcacaaacaagaagaaacatgtcttgtaagatactcctccaaaggatcgggtgcctgtagctgtactcttacacctgcatggattgatgtcttgatgatgtagtgcaatgtagcattcagaacaataaagacatgtttcggactgc

SEQ ID NO: 16188 - protein, 528 aa, Zea mays subsp. mays
  peptide (1)..(528): Ceres Seq. ID no. 13565631
PSIHHHQLAPPFPRLPSALRVARGSMATANGSSKGSFEVPKVEVRFTKLFIDGKFVDAVSGKTFETRDPRTGEVIASIAEGGKADVDLAVKAAREAFDNGPWPRMTGYERGRILHRFADLIDEHVEELAALDTVDAGKLFAVGKARDIPGAAHLLRYYAGAADKVHGATLKMAQRMHGYTLKEPVGVVGHIVPWNYPTTMFFFKVGPALAAGCAVVVKPAEQTPLSALFYAHLAREAGVPAGVLNVVPGFGPTAGAAVAAHMDVDKVSFTGSTEVGRLVMRAAAESNLKPVSLELGGKSPVIVFDDADLDMAVNLVNFATYTNKGEICVAGTRIYVQEGIYDEFVKKAAELASKSVVGDPFNPSVSQGPQVDKDQYEKVLRYIDIGKREGATLVTGGKPCGDNKGYYIEPTIFTDVKDDMTIAQDEIFGPVMALMKFKTVEEVIQKANNTRYGLAAGIVTKNIDVANTVSRSIRAGAIWINCYFAFDPDAPFGGYKMSGFGKDMGMDALDKYLQTKTVVTPLYNTPWL

SEQ ID NO: 16189 - protein, 503 aa, Zea mays subsp. mays
  peptide (1)..(503): Ceres Seq. ID no. 13565632
MATANGSSKGSFEVPKVEVRFTKLFIDGKFVDAVSGKTFETRDPRTGEVIASIAEGGKADVDLAVKAAREAFDNGPWPRMTGYERGRILHRFADLIDEHVEELAALDTVDAGKLFAVGKARDIPGAAHLLRYYAGAADKVHGATLKMAQRMHGYTLKEPVGVVGHIVPWNYPTTMFFFKVGPALAAGCAVVVKPAEQTPLSALFYAHLAREAGVPAGVLNVVPGFGPTAGAAVAAHMDVDKVSFTGSTEVGRLVMRAAAESNLKPVSLELGGKSPVIVFDDADLDMAVNLVNFATYTNKGEICVAGTRIYVQEGIYDEFVKKAAELASKSVVGDPFNPSVSQGPQVDKDQYEKVLRYIDIGKREGATLVTGGKPCGDNKGYYIEPTIFTDVKDDMTIAQDEIFGPVMALMKFKTVEEVIQKANNTRYGLAAGIVTKNIDVANTVSRSIRAGAIWINCYFAFDPDAPFGGYKMSGFGKDMGMDALDKYLQTKTVVTPLYNTPWL

SEQ ID NO: 16190 - protein, 424 aa, Zea mays subsp. mays
  peptide (1)..(424): Ceres Seq. ID no. 13565633
MTGYERGRILHRFADLIDEHVEELAALDTVDAGKLFAVGKARDIPGAAHLLRYYAGAADKVHGATLKMAQRMHGYTLKEPVGVVGHIVPWNYPTTMFFFKVGPALAAGCAVVVKPAEQTPLSALFYAHLAREAGVPAGVLNVVPGFGPTAGAAVAAHMDVDKVSFTGSTEVGRLVMRAAAESNLKPVSLELGGKSPVIVFDDADLDMAVNLVNFATYTNKGEICVAGTRIYVQEGIYDEFVKKAAELASKSVVGDPFNPSVSQGPQVDKDQYEKVLRYIDIGKREGATLVTGGKPCGDNKGYYIEPTIFTDVKDDMTIAQDEIFGPVMALMKFKTVEEVIQKANNTRYGLAAGIVTKNIDVANTVSRSIRAGAIWINCYFAFDPDAPFGGYKMSGFGKDMGMDALDKYLQTKTVVTPLYNTPWL

SEQ ID NO: 16191 - DNA, 1478 bp, Zea mays subsp. mays
  misc_feature (1)..(1478): Ceres Seq. ID no. 12407112
  misc_feature (1)..(1478): Ortholog of  Ceres SEQ ID NO 15171297 as cited in SEQ ID NO 51458
actactacagcgcgccaccaggcagtacactgcagccagccagccacctccctcctctcagttcagttggctccctcccggctcccgccccactagtcgttgtagtcaatactgtgcagtacgccacccaccacctctccaagtctccattaaagaaaaggggaggcaagtcggggcctcggggagaaggggctgagcatcagaccatgacgtccggggcggcggcggcggcaggaggtctggggcggacgccgacgtggaaggagcgggagaacaacaagcgccgggagcgccggcggagggccatcgccgccaagatcttcacgggcctgcgcgcgctcggcaactacaagctgcccaagcactgcgacaacaacgaggtgctcaaggcgctctgccgcgaggcggggtgggtcgtcgaggacgacggcaccacctaccggaagggttgcaggccgccgccggggatgctgagcccgtgctcgtcgtcgcagctgctgagcgcgccgtcctcgagcttcccgagcccggtgccgtcctaccacgccagcccggcgtcgtcgagcttcccgagcccgacgcgcctcgaccacagcagcggcggcagcagcacccacaaccccgccgcggcggccgccgccgccgcctccctgctcccgttcctccggggcctgccgaacctgccgccgctccgcgtgtccagcagcgcgcccgtcacgccgccgctctcctctcccacggccgcggcggcggcgtcgcgaccgcccaccaaggtccgcaggcccgactgggacgccgccgccgaccccttccggcaccccttcttcgcggtctccgcccccgccagccccacccgcgcgcgccggcgcgagcacccggacaccatcccggagtgcgacgagtccgacgtctgctccgcggccgactccgcccggtggatcagcttccaggccaccacggcgcccgcgtcgcccacgtacaacctcgtccacccggcctccgactccatggagctggacgggacgacggcagccgtcgaggagttcgagttcgacaagggccgcgtcgtcacgccatgggaaggcgagcggatccacgaggtggccgccgaggagctcgagctcacgctcggcgtcggcgccaagtgaagcgaagctctcaagcaaagctcggatctttgagctcccgtactgcaaatgccgcgattggcagaaaaaaaaatgtgtacgtactacgtagcgtcgtagccgcgtgaagaaatcgtggatgcattcgtgctgagtttcgatcggaggcacattcggtgtagggcgtaggtgttgtttcattcatggacagctgatcaggtgaaagaacaatcgttgttcgtccgtccctccgcctgtattgcattgcattattgatcacagactgtatgctgactccattcggatgtagtactaggtggatctttggcatctacttactgtttgttctgc

SEQ ID NO: 16192 - protein, 381 aa, Zea mays subsp. mays
  peptide (1)..(381): Ceres Seq. ID no. 12407113
YYSAPPGSTLQPASHLPPLSSVGSLPAPAPLVVVVNTVQYATHHLSKSPLKKRGGKSGPRGEGAEHQTMTSGAAAAAGGLGRTPTWKERENNKRRERRRRAIAAKIFTGLRALGNYKLPKHCDNNEVLKALCREAGWVVEDDGTTYRKGCRPPPGMLSPCSSSQLLSAPSSSFPSPVPSYHASPASSSFPSPTRLDHSSGGSSTHNPAAAAAAAASLLPFLRGLPNLPPLRVSSSAPVTPPLSSPTAAAAASRPPTKVRRPDWDAAADPFRHPFFAVSAPASPTRARRREHPDTIPECDESDVCSAADSARWISFQATTAPASPTYNLVHPASDSMELDGTTAAVEEFEFDKGRVVTPWEGERIHEVAAEELELTLGVGAK

SEQ ID NO: 16193 - protein, 313 aa, Zea mays subsp. mays
  peptide (1)..(313): Ceres Seq. ID no. 12407114
MTSGAAAAAGGLGRTPTWKERENNKRRERRRRAIAAKIFTGLRALGNYKLPKHCDNNEVLKALCREAGWVVEDDGTTYRKGCRPPPGMLSPCSSSQLLSAPSSSFPSPVPSYHASPASSSFPSPTRLDHSSGGSSTHNPAAAAAAAASLLPFLRGLPNLPPLRVSSSAPVTPPLSSPTAAAAASRPPTKVRRPDWDAAADPFRHPFFAVSAPASPTRARRREHPDTIPECDESDVCSAADSARWISFQATTAPASPTYNLVHPASDSMELDGTTAAVEEFEFDKGRVVTPWEGERIHEVAAEELELTLGVGAK

SEQ ID NO: 16194 - protein, 226 aa, Zea mays subsp. mays
  peptide (1)..(226): Ceres Seq. ID no. 12407115
MLSPCSSSQLLSAPSSSFPSPVPSYHASPASSSFPSPTRLDHSSGGSSTHNPAAAAAAAASLLPFLRGLPNLPPLRVSSSAPVTPPLSSPTAAAAASRPPTKVRRPDWDAAADPFRHPFFAVSAPASPTRARRREHPDTIPECDESDVCSAADSARWISFQATTAPASPTYNLVHPASDSMELDGTTAAVEEFEFDKGRVVTPWEGERIHEVAAEELELTLGVGAK

SEQ ID NO: 16195 - DNA, 1814 bp, Zea mays subsp. mays
  misc_feature (1)..(1814): Ceres Seq. ID no. 12382156
  misc_feature (1)..(1814): Ortholog of  Ceres SEQ ID NO 13657610 as cited in SEQ ID NO 66165
gcacgagaccattacctagaacatcctaatcgaaaaaaacacagacacagttgcgtcgtcgcccggccgctgtgcgtgcgtgcgtgcgtgctgtgctgcctttctttctcgctttaatttctttccatccatccgctttccccccctcccaatcccaatccctccaaaaatccgctccgcgcgcgcaagcgcggccggcctttatcgatccctcccggcctctagcgctgctccggcggcggagtccggccccaggaaacaaaggccgcgcgcgccgaccggaccgaccggggggccgtccagttccagttccagttccaggccgcacaagcacatgagatcatgagctcggaggactcgctcaagtcgctgtcgctggactacctgaacctgctcatcaacgggcaggccttcagcgacgtggccttcagcgtggagggccggctggtgcacgcgcaccgctgcgtgctggccgcgcgcagcctcttcttccgcaagctcttctgcggcctggacccgagccaccagccgcccccacccaccgccggcgggcgcgcgccggacctcgtcatccccgtcagctccatccgctacgaggtgctggtgctggtgctccagttcctctacagcggccaggcctccgtcgccgctcccaagagcggcccgctcccgggctgcggcgccaggggctgctggcacacccgctgcggcgccgccgtcgacctcgccctcgacaccctcgccgctgcgcgctccttcggcgtcgagcagctcgcgctcctcgtccagaagcagctggaggccatggtgaaggaggcgtccgtggacgacgtgatgaaggtgctgatggcgtcgcgcaagttcgagatgcaggagctctgggccgcctgctcccacctggtggcgcgctcgggcctctccgccgacctcctcgccaagcacctccccatcgacgtggtcgccaagatcgaggagatccgcgccaagtcccccggcggcgccgccgccgcgggcggcgccgggccgcgctcgccgttcctcacccaccactacctccccatcaacgcggcgtcgtcggcggccgaccgcgagcaccggatccggcgcatgcggcgcgcgctggacgccgccgacatcgagctcgtcaagctgatggtgatgggcgaggggctggacctggacgacgcgctggccgtgcactacgccgtccagcactgcggccgcgacgtcgtcaaggcgctgctggagctgggcgccgccgacgtcaactcccgcgccgggcccgcgggcaagacggcgctgcacctggcggccgagatggtgtcccccgacatggtctccgtgctcctggaccaccacgccgaccccaacgcccgcacgctcgacggcgtcaccccgctcgacgtgctccgcagcctcacctccgagttcctcttcaagggcgccgtgccggggctcacgcacatcgagcccaacaagctcaggctctgcctcgagctcgtgcagtccgcagtcatggtggccacgcgcgacgacggcggcgcgcacggcgacgccgggggaggtgggagcgacggcgggagcttcccgaggggcggcgacgccgccgacgacagcttggtgagcctcaccatgaactccacgctcatgtaccagggccaggagatggcggcggcgctggccggcgacgccaggaaagggagcggcggcggccgagggagtccgtccagcttgtacttccccaatggcttcgcatgagtatttaatctccttcatcaagcaagagcaatgcattttcgtttctctctacatat

SEQ ID NO: 16196 - protein, 471 aa, Zea mays subsp. mays
  peptide (1)..(471): Ceres Seq. ID no. 12382157
MSSEDSLKSLSLDYLNLLINGQAFSDVAFSVEGRLVHAHRCVLAARSLFFRKLFCGLDPSHQPPPPTAGGRAPDLVIPVSSIRYEVLVLVLQFLYSGQASVAAPKSGPLPGCGARGCWHTRCGAAVDLALDTLAAARSFGVEQLALLVQKQLEAMVKEASVDDVMKVLMASRKFEMQELWAACSHLVARSGLSADLLAKHLPIDVVAKIEEIRAKSPGGAAAAGGAGPRSPFLTHHYLPINAASSAADREHRIRRMRRALDAADIELVKLMVMGEGLDLDDALAVHYAVQHCGRDVVKALLELGAADVNSRAGPAGKTALHLAAEMVSPDMVSVLLDHHADPNARTLDGVTPLDVLRSLTSEFLFKGAVPGLTHIEPNKLRLCLELVQSAVMVATRDDGGAHGDAGGGGSDGGSFPRGGDAADDSLVSLTMNSTLMYQGQEMAAALAGDARKGSGGGRGSPSSLYFPNGFA

SEQ ID NO: 16197 - protein, 317 aa, Zea mays subsp. mays
  peptide (1)..(317): Ceres Seq. ID no. 12382158
MVKEASVDDVMKVLMASRKFEMQELWAACSHLVARSGLSADLLAKHLPIDVVAKIEEIRAKSPGGAAAAGGAGPRSPFLTHHYLPINAASSAADREHRIRRMRRALDAADIELVKLMVMGEGLDLDDALAVHYAVQHCGRDVVKALLELGAADVNSRAGPAGKTALHLAAEMVSPDMVSVLLDHHADPNARTLDGVTPLDVLRSLTSEFLFKGAVPGLTHIEPNKLRLCLELVQSAVMVATRDDGGAHGDAGGGGSDGGSFPRGGDAADDSLVSLTMNSTLMYQGQEMAAALAGDARKGSGGGRGSPSSLYFPNGFA

SEQ ID NO: 16198 - protein, 307 aa, Zea mays subsp. mays
  peptide (1)..(307): Ceres Seq. ID no. 12382159
MKVLMASRKFEMQELWAACSHLVARSGLSADLLAKHLPIDVVAKIEEIRAKSPGGAAAAGGAGPRSPFLTHHYLPINAASSAADREHRIRRMRRALDAADIELVKLMVMGEGLDLDDALAVHYAVQHCGRDVVKALLELGAADVNSRAGPAGKTALHLAAEMVSPDMVSVLLDHHADPNARTLDGVTPLDVLRSLTSEFLFKGAVPGLTHIEPNKLRLCLELVQSAVMVATRDDGGAHGDAGGGGSDGGSFPRGGDAADDSLVSLTMNSTLMYQGQEMAAALAGDARKGSGGGRGSPSSLYFPNGFA

SEQ ID NO: 16199 - DNA, 1562 bp, Zea mays subsp. mays
  misc_feature (1)..(1562): Ceres Seq. ID no. 12386730
  misc_feature (1)..(1562): Ortholog of  Ceres SEQ ID NO 12593464 as cited in SEQ ID NO 69039
gattcactcacctcactccacctcttgactgaagaagccgtctgcctgcctccgactcccgcgtctctcctccaagtgatctccttccacctttgccgatcgcccgttgccaccggccgggcgatcctcgtacttccacttccaccatggcctcctcctcctcttcctcctcctcctcctcctcctcctcctcctcctcccgcttcctcctcccgctgctactgctctgttcgcacctctccctcgcctcggcagaggaggcggcgtcggcggcagcggacctcctcagcgaggcgcgcgcgccggggttcgccgcgtggctgcgcggcgtgcggcggcgcatccaccagcgtcccgagctggccttccaggagttccgcaccagcgagctcgtgcgggccgagctcgacgcgatcggcgtcccgtaccggtggcccgtcgcccagaccggcgtcgtggccaccatcgcgggcgccgccgccggccccgtcgtcgcgctccgggccgacatggacgcgctccccgtgcaggagctggtggactgggagcacaagagccaggagagtgggaaaatgcacgcttgcggacacgacgtgcacacgacaatgcttctgggggctgccagaatactccaggatcgcaagagcgacctaatgggcaccgtgaagcttgtattccagccggcagaggagggccagggcggcgcgtactacgtgctgcaagaaggcgtccttgacgacgcgtcagccatattcggcttgcacgttgacccggccctccccgtcggcgtcgtttcgtccaggccagggcccttcgcggcgacgtccggtcggttcctggcgacggtcaccggtaaaggcgggcacgccgcgatgccccacgaatccatcgaccctgttgtagctgcagccactactgtcgtcagcctccagaagatcatctcccgagaaatcgatcccctgcagggcgcggttgtgtccgtcacttttctgaagggaggagaagcgtacaatgtcatcccagagaatgtggcctttggcggcaccatgaggagcatgacgaatgaaggtctatcgtatctcaagaagaggatcaaagagatcgtcgaaggacaggcagcggtgcaccactgcagtgccagcgtggacttcatggaggacacgatgaagccgtacccggccgtggtcaacgacgaagggatgtacgctcacgccaaggaggtggccgagggcctccttggggagaagaacgtcagggtgggtccccaggtgatgggcgcggaggacttcgggttctacgcgcagaggatggcgggcgccttcttcaccatcggggtcggcaacgcgagcaccatggcgaccatccattccacccactcgcctcacttcgtcgtcgacgaggacgtgcttcccgtcggagctgcgttccatgctgctgtggcgattgaatatgtcaggaagaaccgtgcgtcgacctaaacgctaaactcaaataaatcagacggaacaaaacggcagtagtttgtcttaggtgtcactatatataatgcgagtatttacatc

SEQ ID NO: 16200 - protein, 443 aa, Zea mays subsp. mays
  peptide (1)..(443): Ceres Seq. ID no. 12386731
MASSSSSSSSSSSSSSSSRFLLPLLLLCSHLSLASAEEAASAAADLLSEARAPGFAAWLRGVRRRIHQRPELAFQEFRTSELVRAELDAIGVPYRWPVAQTGVVATIAGAAAGPVVALRADMDALPVQELVDWEHKSQESGKMHACGHDVHTTMLLGAARILQDRKSDLMGTVKLVFQPAEEGQGGAYYVLQEGVLDDASAIFGLHVDPALPVGVVSSRPGPFAATSGRFLATVTGKGGHAAMPHESIDPVVAAATTVVSLQKIISREIDPLQGAVVSVTFLKGGEAYNVIPENVAFGGTMRSMTNEGLSYLKKRIKEIVEGQAAVHHCSASVDFMEDTMKPYPAVVNDEGMYAHAKEVAEGLLGEKNVRVGPQVMGAEDFGFYAQRMAGAFFTIGVGNASTMATIHSTHSPHFVVDEDVLPVGAAFHAAVAIEYVRKNRAST

SEQ ID NO: 16201 - protein, 322 aa, Zea mays subsp. mays
  peptide (1)..(322): Ceres Seq. ID no. 12386732
MDALPVQELVDWEHKSQESGKMHACGHDVHTTMLLGAARILQDRKSDLMGTVKLVFQPAEEGQGGAYYVLQEGVLDDASAIFGLHVDPALPVGVVSSRPGPFAATSGRFLATVTGKGGHAAMPHESIDPVVAAATTVVSLQKIISREIDPLQGAVVSVTFLKGGEAYNVIPENVAFGGTMRSMTNEGLSYLKKRIKEIVEGQAAVHHCSASVDFMEDTMKPYPAVVNDEGMYAHAKEVAEGLLGEKNVRVGPQVMGAEDFGFYAQRMAGAFFTIGVGNASTMATIHSTHSPHFVVDEDVLPVGAAFHAAVAIEYVRKNRAST

SEQ ID NO: 16202 - protein, 301 aa, Zea mays subsp. mays
  peptide (1)..(301): Ceres Seq. ID no. 12386733
MHACGHDVHTTMLLGAARILQDRKSDLMGTVKLVFQPAEEGQGGAYYVLQEGVLDDASAIFGLHVDPALPVGVVSSRPGPFAATSGRFLATVTGKGGHAAMPHESIDPVVAAATTVVSLQKIISREIDPLQGAVVSVTFLKGGEAYNVIPENVAFGGTMRSMTNEGLSYLKKRIKEIVEGQAAVHHCSASVDFMEDTMKPYPAVVNDEGMYAHAKEVAEGLLGEKNVRVGPQVMGAEDFGFYAQRMAGAFFTIGVGNASTMATIHSTHSPHFVVDEDVLPVGAAFHAAVAIEYVRKNRAST

SEQ ID NO: 16203 - DNA, 1476 bp, Zea mays subsp. mays
  misc_feature (1)..(1476): Ceres Seq. ID no. 12357049
  misc_feature (1)..(1476): Ortholog of  Ceres SEQ ID NO 15174879 as cited in SEQ ID NO 53786
  misc_feature (1)..(1476): Ortholog of  Ceres SEQ ID NO 14313336 as cited in SEQ ID NO 55501
  misc_feature (1)..(1476): Ortholog of  Ceres SEQ ID NO 13656662 as cited in SEQ ID NO 65594
  misc_feature (1)..(1476): Ortholog of  Ceres SEQ ID NO 13584744 as cited in SEQ ID NO 69137
ctcccgcggccattgcaggtcttgcagcaacgtctctctcctctgggcggtgggcgctcgatgttcttggctccttcacttggacttcgccccgtcggcgtccactgatcaattgatcatctgcaggtagataagctaccagcatctattttgcgtatctgaactccaaaaaggagagctcgaaactacagcaatgggttgctaccctgtgttctgtaggaagaagaactccagaagccaggttgtgcagcttgaccaagacatcccaatcgcgggcaacgtgaaaatctactcgtccaaggagctgaggaaagccacgggaaatttctgcccgggaagcaagcttggacagggttctttcggccgtgtatacctgggaaaactgaacaatggcgagaaagttgccatcaaggtgctctcctcagagtccaggcaagggacaaaggagttcttgaatgaactgagtgtcatatccaacataactcaccacaaccttgtcaaactgcatggctgctgcatcgacggaggccagaagatgctggtctacaactacgtggagaacaacagccttgcacaaacccttttcggtaattcccgcagcggcatcagatttgactggagaacaagggtggagatctgcgttggcgttgccgatgggctcacgtacctccacgaagaagtccgtccaccgatcgtccaccgcgacatcaaagcgagcaacatccttctcgacagaaatctgagacccaagatagcagactttgggctggcgaagttcttccctggcaacatgacacacatcagcaccagagttgcagggacgctaggatatcttgcgccagagtacgccatccgagggcagctgaccaagaaggccgacgtctacagctttggtgtactgctgctggagatcgtcagtggcagatgccacactgatcccacattacctcttgacgagcagttcctcctagaaaaggtctggacactctcggagtccgatgatcttgagagcatcatcgacggtaccatggagcgcgatttcgacaccgaggaagcacgtcggttgctgaaaataggtcttctgtgcacccaggatagccccaagatcaggccctccatgtcaatggttgccaagatgctgaagggtgagtgtgatgtgagtgaaaagatcatgcggcccagcctgatcacagacgtcatggacctgaaagtcaggacagtagagccgatccagttcagtttatccccatcgatgtcacctgcgctgagcagctcactggtgtccacacttgcattagctggtagcacagttgtagagagccgctgaaggaactagttaaaggaccaggttcctacaaaaaatggtttgttagaagcagcatgaattgtttttttgtttgtgttttagtacattgtaaggttgtcagtttgtatatataacatcctagtttgattatcgagattagagattttggc

SEQ ID NO: 16204 - protein, 377 aa, Zea mays subsp. mays
  peptide (1)..(377): Ceres Seq. ID no. 12357050
MGCYPVFCRKKNSRSQVVQLDQDIPIAGNVKIYSSKELRKATGNFCPGSKLGQGSFGRVYLGKLNNGEKVAIKVLSSESRQGTKEFLNELSVISNITHHNLVKLHGCCIDGGQKMLVYNYVENNSLAQTLFGNSRSGIRFDWRTRVEICVGVADGLTYLHEEVRPPIVHRDIKASNILLDRNLRPKIADFGLAKFFPGNMTHISTRVAGTLGYLAPEYAIRGQLTKKADVYSFGVLLLEIVSGRCHTDPTLPLDEQFLLEKVWTLSESDDLESIIDGTMERDFDTEEARRLLKIGLLCTQDSPKIRPSMSMVAKMLKGECDVSEKIMRPSLITDVMDLKVRTVEPIQFSLSPSMSPALSSSLVSTLALAGSTVVESR

SEQ ID NO: 16205 - protein, 263 aa, Zea mays subsp. mays
  peptide (1)..(263): Ceres Seq. ID no. 12357051
MLVYNYVENNSLAQTLFGNSRSGIRFDWRTRVEICVGVADGLTYLHEEVRPPIVHRDIKASNILLDRNLRPKIADFGLAKFFPGNMTHISTRVAGTLGYLAPEYAIRGQLTKKADVYSFGVLLLEIVSGRCHTDPTLPLDEQFLLEKVWTLSESDDLESIIDGTMERDFDTEEARRLLKIGLLCTQDSPKIRPSMSMVAKMLKGECDVSEKIMRPSLITDVMDLKVRTVEPIQFSLSPSMSPALSSSLVSTLALAGSTVVESR

SEQ ID NO: 16206 - DNA, 1266 bp, Zea mays subsp. mays; identical to SEQ ID NO: 8858
  misc_feature (1)..(1266): Ceres Seq. ID no. 12358430
  misc_feature (1)..(1266): Ortholog of  Ceres SEQ ID NO 13589020 as cited in SEQ ID NO 68432

SEQ ID NO: 16207 - protein, 352 aa, Zea mays subsp. mays; identical to SEQ ID NO: 8859
  peptide (1)..(352): Ceres Seq. ID no. 12358431

SEQ ID NO: 16208 - protein, 325 aa, Zea mays subsp. mays; identical to SEQ ID NO: 8860
  peptide (1)..(325): Ceres Seq. ID no. 12358432

SEQ ID NO: 16209 - protein, 196 aa, Zea mays subsp. mays; identical to SEQ ID NO: 8861
  peptide (1)..(196): Ceres Seq. ID no. 12358433

SEQ ID NO: 16210 - DNA, 1783 bp, Zea mays subsp. mays
  misc_feature (1)..(1783): Ceres Seq. ID no. 12376532
  misc_feature (1)..(1783): Ortholog of  Ceres SEQ ID NO 15168366 as cited in SEQ ID NO 60199
aagagctaccgcttcttctcgcagctcgaggcgctgcacgcctcggcgccgcctccgccgcccccgccctcgggcatgaccacggtgcaagctagccctcatcagccgatggaaatggcatggacggcgggccctacggtgctgggccctgccgccgtcgccggcctgccagacctcagcttctcgtcgatgtccgagtccgactcagagtacgactcggacgacgactctggtgcgggggaggagggcctcagcgggggcgagtgcgacagggagatgatggccatcttcgaggggatgatgaagcagttcacggagaagcaagaccgccatgcagcgcgtgttcctggagacgctggagcggtgcgaggcagagcgcacggcgcgcgaggaggcgtggcggcgccaggaggtcgcccgcatgaaccgcgagcgcgagcagctcgccagggagcgcgccgccgcggcctcccgcgacgccgcgctgatcgcgttcctccagcgtgtcggcggggggcagggcgagcccgcgcggctccctccgcacggcgccggcgtcgtgcccgcgccgccgatgccggactgcgcccctccgtcgcctcggcgcgacgcggcggccgcctcgcttcagcagctggtgcccgcaccgccgaaggcggtggaggccttggcgcgcgctggaggagagggcggcgggtccacgccgtcgcggtggcccaaggaggaagtggaggcgctgatccagatgcggaacgagaagggcgagaagtaccacgacgcgggggccaaggggcccctttgggaggacatcgccgccgcgatgcgggggatcgggtacagccggagcgccaagcggtgcaaggagaagtgggagaacatcaacaagtactacaagaaggtgaaggagagcaacaagaggcgccccgaggactccaagacctgtccttacttccaccagctcgacgccatgtaccgcaacaaacaccgcggcggcacaggcggcagaacggcacccagagcgaacatggcctccgccgtcgccgtcgccgtcgcagcaaacgtgcaggacaacccgagcaagcgcgagctcgagggaaagagcagcaacgatgccgacaaccggaagaatggtgaacaggggaacgtgcttacttctcccgctagcggcgatacagcaccaggtggcgccgccaaaaacaagacggcagagggcaatgtggatgatacagatgtgcagcaccagcagcggttcagtgccgacgagacggacagcgacgacgaggacatgtacatggcaagaaactacacagtctacactgaagaaggcaacgacgaagacaaaatgaagtacaagatgggcgtccaggagcgtgatgtgatcgggagcagcgggcaacgtgcttgcgccaccaccaccagcagcagcagcagccacggctgcggcaccgacgagttcagctgccccaacgagcagcaccttccttgccgttcagtagagggcaatgctgcaggaggaggcccggtgccagccgatcagcaccagtgcatcaccaccttttgcggcccataatcaccgagtatacttgccctgcatctgaaccatccgaataccatttattgatttgttctgtaataagtaccagatcatggaaacctcaaaaggtaaaaagaagacaatgaagaacagaggaggcagcagagacgcctaaacagaaagttcttttcttttttctctcattataggtcatgttatactttacctattgctaacaattgtacattc

SEQ ID NO: 16211 - protein, 412 aa, Zea mays subsp. mays
  peptide (1)..(412): Ceres Seq. ID no. 12376533
MQRVFLETLERCEAERTAREEAWRRQEVARMNREREQLARERAAAASRDAALIAFLQRVGGGQGEPARLPPHGAGVVPAPPMPDCAPPSPRRDAAAASLQQLVPAPPKAVEALARAGGEGGGSTPSRWPKEEVEALIQMRNEKGEKYHDAGAKGPLWEDIAAAMRGIGYSRSAKRCKEKWENINKYYKKVKESNKRRPEDSKTCPYFHQLDAMYRNKHRGGTGGRTAPRANMASAVAVAVAANVQDNPSKRELEGKSSNDADNRKNGEQGNVLTSPASGDTAPGGAAKNKTAEGNVDDTDVQHQQRFSADETDSDDEDMYMARNYTVYTEEGNDEDKMKYKMGVQERDVIGSSGQRACATTTSSSSSHGCGTDEFSCPNEQHLPCRSVEGNAAGGGPVPADQHQCITTFCGP

SEQ ID NO: 16212 - protein, 382 aa, Zea mays subsp. mays
  peptide (1)..(382): Ceres Seq. ID no. 12376534
MNREREQLARERAAAASRDAALIAFLQRVGGGQGEPARLPPHGAGVVPAPPMPDCAPPSPRRDAAAASLQQLVPAPPKAVEALARAGGEGGGSTPSRWPKEEVEALIQMRNEKGEKYHDAGAKGPLWEDIAAAMRGIGYSRSAKRCKEKWENINKYYKKVKESNKRRPEDSKTCPYFHQLDAMYRNKHRGGTGGRTAPRANMASAVAVAVAANVQDNPSKRELEGKSSNDADNRKNGEQGNVLTSPASGDTAPGGAAKNKTAEGNVDDTDVQHQQRFSADETDSDDEDMYMARNYTVYTEEGNDEDKMKYKMGVQERDVIGSSGQRACATTTSSSSSHGCGTDEFSCPNEQHLPCRSVEGNAAGGGPVPADQHQCITTFCGP

SEQ ID NO: 16213 - protein, 377 aa, Zea mays subsp. mays
  peptide (1)..(377): Ceres Seq. ID no. 12376535
KSYRFFSQLEALHASAPPPPPPPSGMTTVQASPHQPMEMAWTAGPTVLGPAAVAGLPDLSFSSMSESDSEYDSDDDSGAGEEGLSGGECDREMMAIFEGMMKQFTEKQDRHAARVPGDAGAVRGRAHGARGGVAAPGGRPHEPRARAARQGARRRGLPRRRADRVPPACRRGAGRARAAPSARRRRRARAADAGLRPSVASARRGGRLASAAGARTAEGGGGLGARWRRGRRVHAVAVAQGGSGGADPDAEREGREVPRRGGQGAPLGGHRRRDAGDRVQPERQAVQGEVGEHQQVLQEGEGEQQEAPRGLQDLSLLPPARRHVPQQTPRRHRRQNGTQSEHGLRRRRRRRSKRAGQPEQARARGKEQQRCRQPEEW

SEQ ID NO: 16214 - DNA, 1740 bp, Zea mays subsp. mays
  misc_feature (1)..(1740): Ceres Seq. ID no. 12372698
  misc_feature (1)..(1740): Ortholog of  Ceres SEQ ID NO 13654409 as cited in SEQ ID NO 68534
gcaacgccgttgcttcaactcgactccagcatccctcgtccccgcatcaccgcgccgccgacactccgctcgctttcgctcccgagacccgggcctgccgagccgccgccatggacgaggagtacgacgtgatcgttctgggcacggggctcaaggagtgcatcctcagcggtctcctctctgtcgacggcctcaaggttctacacatggatagaaatgattactacggaggagattccacctccctaaacctgaaccagctctggaagaggtttaggggggaagacaagccaccggcacatctaggtgcaagcagagattacaatgtagacatggttccaaagtttatgatggcaaacgggactttggttcgcactctcattcacactgatgtgacaaaatatttgtcattcaaagctgttgatggaagctatgtcttcagcaaacggaagattcacaaggttcctgccaccgatatggaggctctaaaatctcctttgatgggtctatttgagaaacgtagagcaaggaacttttttgtttacgtccaaaattacaatgaagctgatccagtgacacatcaggggttggacctcacaaggattacaactagagaattgattttgaaacatggattgagtgatgacactgtggattttattggccatgcactcgctctgcacagggatgatcgttacctaaatgaacctgcccttgatactgtaaaaaggatgaagctttacgctgagtctcttgcacgttttcaaggaggctcgccttatatttatccattatatgggttgggtgagctgccacaggcttttgcacgtctaagtgctgtttatggtggtacatatatgttaaataaaccagagtgcaaggttgaatttgatatcgaagggaaagtgtgtggtgttacttcagaaggtgaaacggcgaaatgcaaaaaggttgtctgtgatccttcttacttgcctagcaaggtaaggaagattggaaaagttgcacgtgcaatcgctattatgagccacccaattccaaacacaaatgagtcccactcgattcagattattttgccgcagaagcaacttgggcgcaagtcagacatgtatgttttctgttgctcatatacacataatgttgcgccaaaagggaagttcattgcatttgtgtctgcggaagctgagaccgataatccacagtccgaactaaagcctggaattgatctacttggtcaagtagatgaactgttttttgatatgtatgacagatacaaacctgtcaatgaaccatctcttgataattgctttgtttcaatgagttatgatgctactacacactttgagacaactgtgacagatgttctcagtatgtacacagcaattactggaaagaccgttgatctcagtgtggacctgagcgctgccagcgcagctgaagaatactagagattttcctattagagataccatactctaaagaagaacggtgttaacacaggccctgcctggtggcttgccaggtttagatctatgctgcagctgcagccaattaaacggacagaacatatcaccctatagcatttacatggcgtttaaacacaagaccgtttaggatgatggtggtggttcctttgttccttgcattattgatcggatggttaacttttaactgtgctcacgtttgctacaacctgctcgttcttgtcagtgatgcattgtgatcgcttttcagatatgc

SEQ ID NO: 16215 - protein, 481 aa, Zea mays subsp. mays
  peptide (1)..(481): Ceres Seq. ID no. 12372699
NAVASTRLQHPSSPHHRAADTPLAFAPETRACRAAAMDEEYDVIVLGTGLKECILSGLLSVDGLKVLHMDRNDYYGGDSTSLNLNQLWKRFRGEDKPPAHLGASRDYNVDMVPKFMMANGTLVRTLIHTDVTKYLSFKAVDGSYVFSKRKIHKVPATDMEALKSPLMGLFEKRRARNFFVYVQNYNEADPVTHQGLDLTRITTRELILKHGLSDDTVDFIGHALALHRDDRYLNEPALDTVKRMKLYAESLARFQGGSPYIYPLYGLGELPQAFARLSAVYGGTYMLNKPECKVEFDIEGKVCGVTSEGETAKCKKVVCDPSYLPSKVRKIGKVARAIAIMSHPIPNTNESHSIQIILPQKQLGRKSDMYVFCCSYTHNVAPKGKFIAFVSAEAETDNPQSELKPGIDLLGQVDELFFDMYDRYKPVNEPSLDNCFVSMSYDATTHFETTVTDVLSMYTAITGKTVDLSVDLSAASAAEEY

SEQ ID NO: 16216 - protein, 445 aa, Zea mays subsp. mays
  peptide (1)..(445): Ceres Seq. ID no. 12372700
MDEEYDVIVLGTGLKECILSGLLSVDGLKVLHMDRNDYYGGDSTSLNLNQLWKRFRGEDKPPAHLGASRDYNVDMVPKFMMANGTLVRTLIHTDVTKYLSFKAVDGSYVFSKRKIHKVPATDMEALKSPLMGLFEKRRARNFFVYVQNYNEADPVTHQGLDLTRITTRELILKHGLSDDTVDFIGHALALHRDDRYLNEPALDTVKRMKLYAESLARFQGGSPYIYPLYGLGELPQAFARLSAVYGGTYMLNKPECKVEFDIEGKVCGVTSEGETAKCKKVVCDPSYLPSKVRKIGKVARAIAIMSHPIPNTNESHSIQIILPQKQLGRKSDMYVFCCSYTHNVAPKGKFIAFVSAEAETDNPQSELKPGIDLLGQVDELFFDMYDRYKPVNEPSLDNCFVSMSYDATTHFETTVTDVLSMYTAITGKTVDLSVDLSAASAAEEY

SEQ ID NO: 16217 - protein, 413 aa, Zea mays subsp. mays
  peptide (1)..(413): Ceres Seq. ID no. 12372701
MDRNDYYGGDSTSLNLNQLWKRFRGEDKPPAHLGASRDYNVDMVPKFMMANGTLVRTLIHTDVTKYLSFKAVDGSYVFSKRKIHKVPATDMEALKSPLMGLFEKRRARNFFVYVQNYNEADPVTHQGLDLTRITTRELILKHGLSDDTVDFIGHALALHRDDRYLNEPALDTVKRMKLYAESLARFQGGSPYIYPLYGLGELPQAFARLSAVYGGTYMLNKPECKVEFDIEGKVCGVTSEGETAKCKKVVCDPSYLPSKVRKIGKVARAIAIMSHPIPNTNESHSIQIILPQKQLGRKSDMYVFCCSYTHNVAPKGKFIAFVSAEAETDNPQSELKPGIDLLGQVDELFFDMYDRYKPVNEPSLDNCFVSMSYDATTHFETTVTDVLSMYTAITGKTVDLSVDLSAASAAEEY

SEQ ID NO: 16218 - DNA, 494 bp, Zea mays subsp. mays
  misc_feature (1)..(494): Ceres Seq. ID no. 3465404
  misc_feature (1)..(494): Ortholog of  Ceres SEQ ID NO 14308225 as cited in SEQ ID NO 59062
taatcgaaaactcctttttttctctcatccgaattcccaggcaggcaggtcggcgaggagggcaggaagaccgaagaccgagccgtgcgggggctcgggacgggaacgggacaggaccccaaaatctcagatccttcctgcccgcccgcccgtgcccgtcgacgcgtcgttcttgccggccgcgccccacctccgccctctcctcctccagggggatcggatacgccacaggctgcgcgatggtgctgtgggtcttcggctacggctccctcatctggaaccccggcttcgacttcgacgacaaaatcctcggcttcatcaaaggctacaagcgcacctttaatctcgcttgcattgaccacagaggcacaccggagcatccggcgaggacctgcacgcttgaaaccgacgacgaggccatatgctggggaattgcatattgtgtcmagggtggtcccagaaaaagagctaaaagcaatacagtacttggagag

SEQ ID NO: 16219 - protein, 164 aa, Zea mays subsp. mays
  peptide (1)..(164): Ceres Seq. ID no. 3465405
  misc_feature (149)..(149): Xaa is any aa, unknown or other
IENSFFSLIRIPRQAGRRGGQEDRRPSRAGARDGNGTGPQNLRSFLPARPCPSTRRSCRPRPTSALSSSRGIGYATGCAMVLWVFGYGSLIWNPGFDFDDKILGFIKGYKRTFNLACIDHRGTPEHPARTCTLETDDEAICWGIAYCVXGGPRKRAKSNTVLGE

SEQ ID NO: 16220 - protein, 113 aa, Zea mays subsp. mays
  peptide (1)..(113): Ceres Seq. ID no. 3465406
NRKLLFFSHPNSQAGRSARRAGRPKTEPCGGSGRERDRTPKSQILPARPPVPVDASFLPAAPHLRPLLLQGDRIRHRLRDGAVGLRLRLPHLEPRLRLRRQNPRLHQRLQAHL

SEQ ID NO: 16221 - protein, 85 aa, Zea mays subsp. mays
  peptide (1)..(85): Ceres Seq. ID no. 3465407
  misc_feature (70)..(70): Xaa is any aa, unknown or other
MVLWVFGYGSLIWNPGFDFDDKILGFIKGYKRTFNLACIDHRGTPEHPARTCTLETDDEAICWGIAYCVXGGPRKRAKSNTVLGE

SEQ ID NO: 16222 - DNA, 1588 bp, Zea mays subsp. mays
  misc_feature (1)..(1588): Ceres Seq. ID no. 12363408
  misc_feature (1)..(1588): Ortholog of  Ceres SEQ ID NO 14312293 as cited in SEQ ID NO 58744
  misc_feature (1)..(1588): Ortholog of  Ceres SEQ ID NO 15177596 as cited in SEQ ID NO 59731
cccggcttaggaaccctcgaaaagacgcctcaccatctcctttgtgtccttgctaactaactccccattagatccggccttcttcctccccgtctccgtcctttgtgtccagttgcttcataagctacccatcgccaattcgccatatacgcacatacccaacgacgacgcacgcgcgtgcgcaaaccaccaaccggagcgagtaccaaccggccggcccgcccaacaagcaggcggctagccatcgacgaccgagcacatcgagctgcccccggccggtcatatatatatgcagggcggcggcggtgatcaagcaggagggagcctgggcatgggcatgggcgtggggtacgccggcggcggaggcgccgagtgctcgtcgtcctcggtggcggccgcggctgccgccgccgcggcggcggcggaggcggaggagcggcagctgctcaagggggagatcgcggtgcacccgctgtgcgagcagctggtggcggcgcacgtggggtgcctgcgcgtggccacgcccatcgaccacctccccctcatcgacgcccagctcgcgcagtccagcggcctcctccactcctacgccgcccaccacagccccttcctctccccgcacgacaagcacgacctcgactccttcctcgcgcagtacctgatgctgctgtgctcgttccgggagcagctgcagcagcacgtccgggtgcacgccgtggaggccgtcatggcatgccgcgagatcgagcagtccctgcaagacctaactggggtgacgctggaggaagggacgggagcgaccatgtcggaggaggacgaggacgaggcgccgatgctggaggtgggtctggtggacatgggctccgacgggcacgacatgatgggcttcggcccgctcctgcccaccgactccgagcgctcgctcatggatagggtccgacaggagcttaagatcgagctcaagcagggtttcaagtcaagaatagaggatgtgagggaggagattctgaggaaaaggagggccgggaagctgcctggggacaccaccagcatcctcaagcaatggtggcagcagcactccaagtggccataccccacggaggacgataaggcgaggctcgttgaagagaccggcctgcagctgaaacaaatcaacaactggttcatcaaccagaggaagaggaactggcacaacaactcccagacgtcaaccctcaaatcaaagcgtaaaaggtgatggagagctgcgccaccatgtactgcacacctgacacgtataccaattaccaacacgctaatcagacgacgtacggccatgcatggcgactcacaagaaataaagaggatcgatcgattcaactgtatatttctagtcattagtcagagaggtgacaggttcatgacacacacaaacacacgtacactagtctgaccactggcatatttgcttgctgtgattaatattttgagccgatcatttgctcggagcatactttattcttgttattattgtacagccatagtttgtcctcccagcgtacgtacataatctttgaggttgcattcatatatacagtgatctgatctg

SEQ ID NO: 16223 - protein, 315 aa, Zea mays subsp. mays
  peptide (1)..(315): Ceres Seq. ID no. 12363409
MQGGGGDQAGGSLGMGMGVGYAGGGGAECSSSSVAAAAAAAAAAAEAEERQLLKGEIAVHPLCEQLVAAHVGCLRVATPIDHLPLIDAQLAQSSGLLHSYAAHHSPFLSPHDKHDLDSFLAQYLMLLCSFREQLQQHVRVHAVEAVMACREIEQSLQDLTGVTLEEGTGATMSEEDEDEAPMLEVGLVDMGSDGHDMMGFGPLLPTDSERSLMDRVRQELKIELKQGFKSRIEDVREEILRKRRAGKLPGDTTSILKQWWQQHSKWPYPTEDDKARLVEETGLQLKQINNWFINQRKRNWHNNSQTSTLKSKRKR

SEQ ID NO: 16224 - protein, 301 aa, Zea mays subsp. mays
  peptide (1)..(301): Ceres Seq. ID no. 12363410
MGMGVGYAGGGGAECSSSSVAAAAAAAAAAAEAEERQLLKGEIAVHPLCEQLVAAHVGCLRVATPIDHLPLIDAQLAQSSGLLHSYAAHHSPFLSPHDKHDLDSFLAQYLMLLCSFREQLQQHVRVHAVEAVMACREIEQSLQDLTGVTLEEGTGATMSEEDEDEAPMLEVGLVDMGSDGHDMMGFGPLLPTDSERSLMDRVRQELKIELKQGFKSRIEDVREEILRKRRAGKLPGDTTSILKQWWQQHSKWPYPTEDDKARLVEETGLQLKQINNWFINQRKRNWHNNSQTSTLKSKRKR

SEQ ID NO: 16225 - protein, 299 aa, Zea mays subsp. mays
  peptide (1)..(299): Ceres Seq. ID no. 12363411
MGVGYAGGGGAECSSSSVAAAAAAAAAAAEAEERQLLKGEIAVHPLCEQLVAAHVGCLRVATPIDHLPLIDAQLAQSSGLLHSYAAHHSPFLSPHDKHDLDSFLAQYLMLLCSFREQLQQHVRVHAVEAVMACREIEQSLQDLTGVTLEEGTGATMSEEDEDEAPMLEVGLVDMGSDGHDMMGFGPLLPTDSERSLMDRVRQELKIELKQGFKSRIEDVREEILRKRRAGKLPGDTTSILKQWWQQHSKWPYPTEDDKARLVEETGLQLKQINNWFINQRKRNWHNNSQTSTLKSKRKR

SEQ ID NO: 16226 - DNA, 1292 bp, Zea mays subsp. mays
  misc_feature (1)..(1292): Ceres Seq. ID no. 12368161
  misc_feature (1)..(1292): Ortholog of  Ceres SEQ ID NO 14312711 as cited in SEQ ID NO 1401
  misc_feature (1)..(1292): Ortholog of  Ceres SEQ ID NO 13586635 as cited in SEQ ID NO 14217
  misc_feature (1)..(1292): Ortholog of  Ceres SEQ ID NO 15170220 as cited in SEQ ID NO 55383
  misc_feature (1)..(1292): Ortholog of  Ceres SEQ ID NO 14304198 as cited in SEQ ID NO 56479
  misc_feature (1)..(1292): Ortholog of  Ceres SEQ ID NO 14316543 as cited in SEQ ID NO 57118
  misc_feature (1)..(1292): Ortholog of  Ceres SEQ ID NO 12616285 as cited in SEQ ID NO 63483
acccgataagtagcaggggcagggagaacgaagacgacgacgacgtacgccggccgtaagtgagccgagagcccccgatataccagctagctagataaccagccagcgcgagcatggaggcggcggcggcggcggtccggcaccggacggtggaggcgaacggcatctcgatgcacgtggcggagtccggccccgacggcggcgacggcgcgcccgcggtggtgttcctgcacggcttcccggagctctggtactcgtggcgccaccagatggcgcacctggccgcgcggggctaccgctgcgtggcgccggacctccgcggctacggcggcaccgccgcgccgcccgacgtcgcgtcctactccgccttccacgtcgtcggcgacgtcgtcgccctgctcgacgcgatcggcatccacaacaaggtgttcgtggtgggtcacgactggggcgccatcatcgcgtggtacctctgcctgttccggccggaccgggtggcggcgcttgtcaacaccagcgtcgccttcatgcgccacatcttcgtccgcgccgccgccgccgccgtcacgcccatcgactacttccaccgcacctacgggcccacctactacatctgccgcttccaggagcctggtgtcgcagagaaggagttctcgccggccaacgccgggtacctgatgaagcggatcctgtgcaaccgcttcacctcctcggcggccggcgacgacaagccgccggcggcggacgccgccgaggaggagccgctgccgccgtggctgacggaggaggacgtgagccacttcgcgtcggagttcgagcggacaggcttcacggggcccatcaactactaccgcaacatggaccgcaactgggagctggcggcgccgtgggcggacgccaaggtgcgggtgcccaccaggttcatcgtcggcgacggcgacctcacctaccactacccgggcatccaggactacatccacaagggcgggttcgaggccgacgtcccggggctcgagagcgtcgtcgtcatccccggcgccggccacttcgtccagcaggagaaggccgacgaggtcagccagcacatctacgacttcatctccaagttctgatacatgtgcagcttgcttgcttacctgctaaaacctgtaatctcaacctcgatatccgtgctgccaacttgttttgtttgacgaactaagagtaataagtgttcgcatatatatatgtttggtttaatttgtgacttggacatggtatgttcgatgtgaaatggataaaccgtgcgtttc

SEQ ID NO: 16227 - protein, 332 aa, Zea mays subsp. mays
  peptide (1)..(332): Ceres Seq. ID no. 12368162
MEAAAAAVRHRTVEANGISMHVAESGPDGGDGAPAVVFLHGFPELWYSWRHQMAHLAARGYRCVAPDLRGYGGTAAPPDVASYSAFHVVGDVVALLDAIGIHNKVFVVGHDWGAIIAWYLCLFRPDRVAALVNTSVAFMRHIFVRAAAAAVTPIDYFHRTYGPTYYICRFQEPGVAEKEFSPANAGYLMKRILCNRFTSSAAGDDKPPAADAAEEEPLPPWLTEEDVSHFASEFERTGFTGPINYYRNMDRNWELAAPWADAKVRVPTRFIVGDGDLTYHYPGIQDYIHKGGFEADVPGLESVVVIPGAGHFVQQEKADEVSQHIYDFISKF

SEQ ID NO: 16228 - protein, 313 aa, Zea mays subsp. mays
  peptide (1)..(313): Ceres Seq. ID no. 12368163
MHVAESGPDGGDGAPAVVFLHGFPELWYSWRHQMAHLAARGYRCVAPDLRGYGGTAAPPDVASYSAFHVVGDVVALLDAIGIHNKVFVVGHDWGAIIAWYLCLFRPDRVAALVNTSVAFMRHIFVRAAAAAVTPIDYFHRTYGPTYYICRFQEPGVAEKEFSPANAGYLMKRILCNRFTSSAAGDDKPPAADAAEEEPLPPWLTEEDVSHFASEFERTGFTGPINYYRNMDRNWELAAPWADAKVRVPTRFIVGDGDLTYHYPGIQDYIHKGGFEADVPGLESVVVIPGAGHFVQQEKADEVSQHIYDFISKF

SEQ ID NO: 16229 - protein, 280 aa, Zea mays subsp. mays
  peptide (1)..(280): Ceres Seq. ID no. 12368164
MAHLAARGYRCVAPDLRGYGGTAAPPDVASYSAFHVVGDVVALLDAIGIHNKVFVVGHDWGAIIAWYLCLFRPDRVAALVNTSVAFMRHIFVRAAAAAVTPIDYFHRTYGPTYYICRFQEPGVAEKEFSPANAGYLMKRILCNRFTSSAAGDDKPPAADAAEEEPLPPWLTEEDVSHFASEFERTGFTGPINYYRNMDRNWELAAPWADAKVRVPTRFIVGDGDLTYHYPGIQDYIHKGGFEADVPGLESVVVIPGAGHFVQQEKADEVSQHIYDFISKF

SEQ ID NO: 16230 - DNA, 520 bp, Zea mays subsp. mays
  misc_feature (1)..(520): Ceres Seq. ID no. 1556286
  misc_feature (1)..(520): Ortholog of  Ceres SEQ ID NO 14307123 as cited in SEQ ID NO 54182
gggcaggngctcgtgtcgaacactcgaacagaaccaccgccattctagaggcatccagtattccagcccaatcctatctttgtattcctctccctcgtctcggaagtctggttcgccgaacagtcccgaacccccgattcactgccgctgccccgtctcgtcctcttcgccagcgaaaaccctagtctaggggacgggagcgcaatccacgcacggcaacatggacgccatccgcaagcagctcgaccagctcatgggggccaaccgcaacggcgatgtacgggaggtcagccgcaagtactatgatcgcgacgtctgccgcctctacctcgccggcctctgcccccacgacctcttccagcttaccaagatggacatgggcccgtgcccgaagctgcactcgctgcaactgcgcaaagaatatgaagaagccaaagccaaaggtactgataactatgaccgtgaattggaagaaaccattgaaagactaattgttgagtgtgaaaggagatcmgagagc

SEQ ID NO: 16231 - protein, 100 aa, Zea mays subsp. mays
  peptide (1)..(100): Ceres Seq. ID no. 1556287
  misc_feature (98)..(98): Xaa is any aa, unknown or other
MDAIRKQLDQLMGANRNGDVREVSRKYYDRDVCRLYLAGLCPHDLFQLTKMDMGPCPKLHSLQLRKEYEEAKAKGTDNYDRELEETIERLIVECERRXES

SEQ ID NO: 16232 - protein, 89 aa, Zea mays subsp. mays
  peptide (1)..(89): Ceres Seq. ID no. 1556288
  misc_feature (87)..(87): Xaa is any aa, unknown or other
MGANRNGDVREVSRKYYDRDVCRLYLAGLCPHDLFQLTKMDMGPCPKLHSLQLRKEYEEAKAKGTDNYDRELEETIERLIVECERRXES

SEQ ID NO: 16233 - protein, 71 aa, Zea mays subsp. mays
  peptide (1)..(71): Ceres Seq. ID no. 1556289
MYGRSAASTMIATSAASTSPASAPTTSSSLPRWTWARARSCTRCNCAKNMKKPKPKVLITMTVNWKKPLKD

SEQ ID NO: 16234 - DNA, 1321 bp, Zea mays subsp. mays
  misc_feature (1)..(1321): Ceres Seq. ID no. 12373031
  misc_feature (1)..(1321): Ortholog of  Ceres SEQ ID NO 13579556 as cited in SEQ ID NO 53743
tctgcttcaaccaagttacttgttgatattctccttagtgagtgggaggacaggatgactcgaggcttattccgctacgatgtcactgcctgtgagaccaaggtcattcctggcaaccttgggtttgttgcacaactcaatgaagggcgccatcttaagaagcgccctactgagtttcgtgtggaccgtgtgctccagccgtttgaccctgccaaattcaatttcacaaaagttggccaggaagaggttctcttccaatttgagaatagtggtggtgatgacagctatttcctgaacaacgctccaatcattgctgttgatcgggctccaaatgttattgctatcaatgtaagcccaattgaatatggacatgtgcttctcattcctcgtgttctggaccgcctgcctcagaggattgatccagagagcttcttgcttgcactgcaaatggcagccgagggaggtagcccatacttcaggcttggttacaatagcttgggtgcgtttgccaccatcaatcacctccactttcaggcgtactacttgtcagtgcctttccctgttgagaaggcagctacccacaagatcccactctctgaggacacgaagaagaatggggtgaccgtgtccaagctgataaattatcctgtgagaggcctggtatttgagggagggaacaccctggacgacctggccactgtggtttctaatgcttggcatttggctgcaagacaacaatgtgccttacaatgtgctcatttctgactgtggcaagagggttttcctgttcccccagtgctacgcagagaagcaggctctgggtgaagtgagccaggagctgctggacactcaggtgaacccagctgtgtgggagatcagtggacacatggtgctgaaacggaggatggactatgaggaggcatctgaaacctccgcgtggaaactcctcgccgaggtctctctctccgaggagcgcttcgaggaagtgaaggcgtacatcttcagcgctgctggcctggttcagtatgatgaggaagaggaggaagccagcgacggtgagggccctacggcctatgttcctgtcaaggttacccctctgcccgtcgctgaagggtgcctcgtcctcccgtgagtccgtggtcggttaaataaagggccgtatatgattgcgagccctgtgctctgccgctattttcttctcgtttgtgtcttgctgctctcgtggtgaactcgctactccagtactctgcaatattaagcagaagctattgtattgtttgggtcgtttgtcagctaaattgaaatgcgatggacatttact

SEQ ID NO: 16235 - protein, 254 aa, Zea mays subsp. mays
  peptide (1)..(254): Ceres Seq. ID no. 12373032
SASTKLLVDILLSEWEDRMTRGLFRYDVTACETKVIPGNLGFVAQLNEGRHLKKRPTEFRVDRVLQPFDPAKFNFTKVGQEEVLFQFENSGGDDSYFLNNAPIIAVDRAPNVIAINVSPIEYGHVLLIPRVLDRLPQRIDPESFLLALQMAAEGGSPYFRLGYNSLGAFATINHLHFQAYYLSVPFPVEKAATHKIPLSEDTKKNGVTVSKLINYPVRGLVFEGGNTLDDLATVVSNAWHLAARQQCALQCAHF

SEQ ID NO: 16236 - protein, 236 aa, Zea mays subsp. mays
  peptide (1)..(236): Ceres Seq. ID no. 12373033
MTRGLFRYDVTACETKVIPGNLGFVAQLNEGRHLKKRPTEFRVDRVLQPFDPAKFNFTKVGQEEVLFQFENSGGDDSYFLNNAPIIAVDRAPNVIAINVSPIEYGHVLLIPRVLDRLPQRIDPESFLLALQMAAEGGSPYFRLGYNSLGAFATINHLHFQAYYLSVPFPVEKAATHKIPLSEDTKKNGVTVSKLINYPVRGLVFEGGNTLDDLATVVSNAWHLAARQQCALQCAHF

SEQ ID NO: 16237 - protein, 140 aa, Zea mays subsp. mays
  peptide (1)..(140): Ceres Seq. ID no. 12373034
MLGIWLQDNNVPYNVLISDCGKRVFLFPQCYAEKQALGEVSQELLDTQVNPAVWEISGHMVLKRRMDYEEASETSAWKLLAEVSLSEERFEEVKAYIFSAAGLVQYDEEEEEASDGEGPTAYVPVKVTPLPVAEGCLVLP

SEQ ID NO: 16238 - DNA, 1181 bp, Zea mays subsp. mays
  misc_feature (1)..(1181): Ceres Seq. ID no. 12566272
  misc_feature (1)..(1181): Ortholog of  Ceres SEQ ID NO 14302584 as cited in SEQ ID NO 0
acacacacacatccatcaaagaaacaagcgcacaagatcaaatacctcgccgccaataatggcctccaggtcctccatcctgctcgccatggtgatgctggctgcgctattcgccgttggtttgtgcaccacccccctcaccttccaggtcggcaagggatccaagcctggccacctgatcctcacccccaatgttgccaccatatccgacgtggagatcaaagagcacggtggcgatgacttctcctttacgctcaaggagggcccgactggcacctggacgctcgacaccaaggccccgctcaagtaccccctttgcatccgctttgctgtcaagtccggcggctaccgcatcgccgacgacgtcatccctgccgatttcaaggccggcaccacctataagaccacactcagcatctaatcaatctctggtgatgaattagatgctgagtgtggtcttataggtggcggcgcctacgggagctccccgacgccggcttacggcgacgccccctcgcacggcggcatagggacctcgtcgccgacgccgttcgacccccacagcttcggctctctcccgggctcctgcgactactggaggtcgcacccgatggagatctggtcggcgatcggcgggcggttcccgggcacgtcgtcgtcgatggggacgatgggccacttcttcggcgcggctggcagggtaggcgggacggacgtgagcatccaggacgcgctggcgaacacgcggtcggacggcgcgggcgcgctgctgcgcgagggcgccgccgcgctgctcaactccatgacccgttcgggcttcccctacacgacggagcaggtgcgcgacacgttcgccgcggcggcggcggcggcggcgggcgggtccgacggcgcggccgcggcgcaggcggccgccttcaggatggccaacgaggggaaggcgtagagatcgagcatgtgtacgtacgtgcatggtaaactggagtgtgtgctccggagcacggtacattcttggctgctgctgttgctttcatgcatggctacgacgtaatacgtgccttggttgtgtgcgtttgtgtgtgtgtgtgtgtttgagtgtttcatcggtgaagaagacaccgagctagacctagcttattctggtgtgtagtcgctcgctcttgctattttttgtcgtttgg

SEQ ID NO: 16239 - protein, 139 aa, Zea mays subsp. mays
  peptide (1)..(139): Ceres Seq. ID no. 12566273
HTHIHQRNKRTRSNTSPPIMASRSSILLAMVMLAALFAVGLCTTPLTFQVGKGSKPGHLILTPNVATISDVEIKEHGGDDFSFTLKEGPTGTWTLDTKAPLKYPLCIRFAVKSGGYRIADDVIPADFKAGTTYKTTLSI

SEQ ID NO: 16240 - protein, 120 aa, Zea mays subsp. mays
  peptide (1)..(120): Ceres Seq. ID no. 12566274
MASRSSILLAMVMLAALFAVGLCTTPLTFQVGKGSKPGHLILTPNVATISDVEIKEHGGDDFSFTLKEGPTGTWTLDTKAPLKYPLCIRFAVKSGGYRIADDVIPADFKAGTTYKTTLSI

SEQ ID NO: 16241 - protein, 111 aa, Zea mays subsp. mays
  peptide (1)..(111): Ceres Seq. ID no. 12566275
MEIWSAIGGRFPGTSSSMGTMGHFFGAAGRVGGTDVSIQDALANTRSDGAGALLREGAAALLNSMTRSGFPYTTEQVRDTFAAAAAAAAGGSDGAAAAQAAAFRMANEGKA

SEQ ID NO: 16242 - DNA, 1320 bp, Zea mays subsp. mays
  misc_feature (1)..(1320): Ceres Seq. ID no. 13577760
  misc_feature (1)..(1320): Ortholog of  Ceres SEQ ID NO 15171289 as cited in SEQ ID NO 51570
actaggtcgacaagaaaatggtggtagcgtcgagtggtggcgcgggaggcgtggagggtggcagcggctgcggtgtctcggcgtcggtgccgccggtggtgtcgtcgagcggtggcgcgggagaggtggagggtggcgacggcggctcggctgcggtgtcggggtcccgccggagggtgaaggggtcgtggacgccggaggaggacgagctgctgcggcgcgcgatcacgcggcacgggccgcggaactggaccgtgatcagctccgagatccccggccggtccggcaagtcgtgccgcctgcggtggtgcaaccagctcagccccagcgtggagcgccgcgccttcacgcccgaggaggacgccatcatcgtcgccgcgcacgcgcagcacggcaacaggtgggccaccatcgcgcggatgctccacggccgcaccgacaactccgtcaagaaccactggaactccacgctgctccgccagcgcagggcggcggccgcccacgccagcgccgccgggtgcgccctccagctgcggccggcaaccacggcctccgtcccgctccgccatctgctggatcgtcctaaggaggcggcggcatccgtttcgttccgtcgtctggacccaaaggcggaggaggaggaggacgaggacatggacgaaggcggcagcagcagcgaggattcggcgcatcggcatcgttcgctgtcacccgcgccggtcgagccgctcacactcaatctatttagcgacggagcccacgggctccctacccccgcccccgcacccgcaccgcagggtacggcagccagaacggagggtgccgccatgaggaggaaggcgaagctggagcaggacccgtggttgagcggcggagtccacggggcccccgcacccgcgccgcagagtgcggcagcgagaacggaaggtgccgtcgtcacgaggatgaagacgaagctggagcatgacccgtggttggtgaccttggtgcggcagatgatatctgtggaggtggagcggcagatgcatggagtgggcccgcaggccagaagcagcgccggtggtggtggtggtgcagacggcgacggcgtgaacggccaggacacgtcgatggacgtggacccgtgacggaatggcggcggtggcgttgggcttaccgagttccttctaccctgtttgtcccgttcgctaatcgcgcgcttgaaccattaacgtccgtcacaccatccgttgatacgtaggtattctagcttgtggttcagtattactttcactctagctgtgatcatcctatagattgaagcttctatttttttcttgg

SEQ ID NO: 16243 - protein, 369 aa, Zea mays subsp. mays
  peptide (1)..(369): Ceres Seq. ID no. 13577761
MVVASSGGAGGVEGGSGCGVSASVPPVVSSSGGAGEVEGGDGGSAAVSGSRRRVKGSWTPEEDELLRRAITRHGPRNWTVISSEIPGRSGKSCRLRWCNQLSPSVERRAFTPEEDAIIVAAHAQHGNRWATIARMLHGRTDNSVKNHWNSTLLRQRRAAAAHASAAGCALQLRPATTASVPLRHLLDRPKEAAASVSFRRLDPKAEEEEDEDMDEGGSSSEDSAHRHRSLSPAPVEPLTLNLFSDGAHGLPTPAPAPAPQGTAARTEGAAMRRKAKLEQDPWLSGGVHGAPAPAPQSAAARTEGAVVTRMKTKLEHDPWLVTLVRQMISVEVERQMHGVGPQARSSAGGGGGADGDGVNGQDTSMDVDP

SEQ ID NO: 16244 - protein, 235 aa, Zea mays subsp. mays
  peptide (1)..(235): Ceres Seq. ID no. 13577762
MLHGRTDNSVKNHWNSTLLRQRRAAAAHASAAGCALQLRPATTASVPLRHLLDRPKEAAASVSFRRLDPKAEEEEDEDMDEGGSSSEDSAHRHRSLSPAPVEPLTLNLFSDGAHGLPTPAPAPAPQGTAARTEGAAMRRKAKLEQDPWLSGGVHGAPAPAPQSAAARTEGAVVTRMKTKLEHDPWLVTLVRQMISVEVERQMHGVGPQARSSAGGGGGADGDGVNGQDTSMDVDP

SEQ ID NO: 16245 - protein, 194 aa, Zea mays subsp. mays
  peptide (1)..(194): Ceres Seq. ID no. 13577763
LGRQENGGSVEWWRGRRGGWQRLRCLGVGAAGGVVERWRGRGGGWRRRLGCGVGVPPEGEGVVDAGGGRAAAARDHAARAAELDRDQLRDPRPVRQVVPPAVVQPAQPQRGAPRLHARGGRHHRRRARAARQQVGHHRADAPRPHRQLRQEPLELHAAPPAQGGGRPRQRRRVRPPAAAGNHGLRPAPPSAGSS

SEQ ID NO: 16246 - DNA, 1449 bp, Zea mays subsp. mays
  misc_feature (1)..(1449): Ceres Seq. ID no. 12349549
  misc_feature (1)..(1449): Ortholog of  Ceres SEQ ID NO 14305917 as cited in SEQ ID NO 0
actcggaaaccgtaagccgtgcaaacaacaggcgacgcaccggcgccgcgcgcgcacgcctatttctagctcgatcgtgtcctctcgccgcgctccggagtcgtcaatccacacgcttgggcgagcgagccttgttgcggaagcgcgcggacgacatgctgatgctgcacccgaggctggtgtcgtcgagcgccgtggacgacgaggaccactgcgagagctgcgcctgctactgcgccatggtgtcctgcgtctcgctgctgctcttcatcgtgctggctgccgcggtcagcatcccgagggcctgcgccatcgccggcgtcatgctgctcctgctggggctcgtcggctggctcgtgcccacggggaatggagccggtccggcggcgcagcagcagcagggccaggctgctgccgatcctggggcgcggcggctggtggtgcaccaccggtgcgcgtgcgggctaacggacgccgctatcgccgcgctgccggcggcgttcacgtactacgaggcgcccgcggtgaagaatggagtcgggagcgaggacgagaagcagccgcgcggcagctccttgctgtgcgcggtttgtctggacgacgtgcggggcggcgagatggtgcggcagctgccggcgtgccgccacctgttccacgtcgactgcgtcgacgcctggttgcgcgctcaccggacgtgcccgctctgccgctgccagctctccccgaggaacgacgtcagcacaaagcgggccgccacggtcgtcggggagtcatccgtcgacgcgttgccgccggtgtgagtgtcactcactcatcaatcctccgaagctggccggcgcattggtaaactgtattggaccagattcttcatttcttaacaccacataatagaacatatttctgcccgaataaagaaaacttcggcacgatttcgagggcgcgcagcagacttgtgtctctactctctaggcatgagcacgagcctcaacatcgatcgagtggttccaaccacatcgcccgacccgacgcttccagcagcagtcgcgaaagaagggaaaaaaatttggtgcatgcagctcctcacaaaaaagaggatagaccccacccgcagcaacaaaaatgttatctggtggatctgcaggtggggtccatccacctttttgtgagaggctgcaaaccactctggtttgcagcagtgctgcaccaaatttttttccgaaagaaggagcatctcgccgatggggacgggtaccagaccgtacggaccagggagtctacaacttgacacgcttcagttctgccgctaccagacaggcaatcgagtctatcatgtcagtgccagcttttgtactgtatgctccgttgcaccgttacatttttgtgagttgtaaaaccagaacaaatacccgtgtttcttaggaaactgaaggcttttgggctcttggatcc

SEQ ID NO: 16247 - protein, 281 aa, Zea mays subsp. mays
  peptide (1)..(281): Ceres Seq. ID no. 12349550
LGNRKPCKQQATHRRRARTPISSSIVSSRRAPESSIHTLGRASLVAEARGRHADAAPEAGVVERRGRRGPLRELRLLLRHGVLRLAAALHRAGCRGQHPEGLRHRRRHAAPAGARRLARAHGEWSRSGGAAAAGPGCCRSWGAAAGGAPPVRVRANGRRYRRAAGGVHVLRGARGEEWSRERGREAAARQLLAVRGLSGRRAGRRDGAAAAGVPPPVPRRLRRRLVARSPDVPALPLPALPEERRQHKAGRHGRRGVIRRRVAAGVSVTHSSILRSWPAHW

SEQ ID NO: 16248 - protein, 265 aa, Zea mays subsp. mays
  peptide (1)..(265): Ceres Seq. ID no. 12349551
SETVSRANNRRRTGAARARLFLARSCPLAALRSRQSTRLGERALLRKRADDMLMLHPRLVSSSAVDDEDHCESCACYCAMVSCVSLLLFIVLAAAVSIPRACAIAGVMLLLLGLVGWLVPTGNGAGPAAQQQQGQAAADPGARRLVVHHRCACGLTDAAIAALPAAFTYYEAPAVKNGVGSEDEKQPRGSSLLCAVCLDDVRGGEMVRQLPACRHLFHVDCVDAWLRAHRTCPLCRCQLSPRNDVSTKRAATVVGESSVDALPPV

SEQ ID NO: 16249 - protein, 214 aa, Zea mays subsp. mays
  peptide (1)..(214): Ceres Seq. ID no. 12349552
MLMLHPRLVSSSAVDDEDHCESCACYCAMVSCVSLLLFIVLAAAVSIPRACAIAGVMLLLLGLVGWLVPTGNGAGPAAQQQQGQAAADPGARRLVVHHRCACGLTDAAIAALPAAFTYYEAPAVKNGVGSEDEKQPRGSSLLCAVCLDDVRGGEMVRQLPACRHLFHVDCVDAWLRAHRTCPLCRCQLSPRNDVSTKRAATVVGESSVDALPPV

SEQ ID NO: 16250 - DNA, 507 bp, Zea mays subsp. mays
  misc_feature (1)..(507): Ceres Seq. ID no. 12340841
  misc_feature (1)..(507): Ortholog of  Ceres SEQ ID NO 14307288 as cited in SEQ ID NO 54318
ttcacacaatattattattaatcaagttatatttgatgaggaagctgtcgagtcaaaactgctaaaagcacggatgaaaatgcaacaaaaatacattgatcagttccatatgttatacgatgacttcaacatcaccaagcttcccttgctttcagaagaggtttgtggtgttcaagctctccaaaacttttcccagcacttccttacaccatacaagtctactcttaaaaggggcaccgtcgaggagctcgaacagagaataactatattaaaatctgcactgcaagaagctgagacagagttagatagggttaggaaagggaagcagtcagtgtgattttttttccacaggtcaagtgtgtaaaaccagagagacgatcaattttttcgtgtcattacactcttgttgatttcactatcatgtttcctcatcgaggagtttagacttgtaatagctatcggcagagaagtgtttgattcacacaagatatatagatccattctttt

SEQ ID NO: 16251 - protein, 111 aa, Zea mays subsp. mays
  peptide (1)..(111): Ceres Seq. ID no. 12340842
SHNIIINQVIFDEEAVESKLLKARMKMQQKYIDQFHMLYDDFNITKLPLLSEEVCGVQALQNFSQHFLTPYKSTLKRGTVEELEQRITILKSALQEAETELDRVRKGKQSV

SEQ ID NO: 16252 - protein, 87 aa, Zea mays subsp. mays
  peptide (1)..(87): Ceres Seq. ID no. 12340843
MKMQQKYIDQFHMLYDDFNITKLPLLSEEVCGVQALQNFSQHFLTPYKSTLKRGTVEELEQRITILKSALQEAETELDRVRKGKQSV

SEQ ID NO: 16253 - protein, 85 aa, Zea mays subsp. mays
  peptide (1)..(85): Ceres Seq. ID no. 12340844
MQQKYIDQFHMLYDDFNITKLPLLSEEVCGVQALQNFSQHFLTPYKSTLKRGTVEELEQRITILKSALQEAETELDRVRKGKQSV

SEQ ID NO: 16254 - DNA, 1329 bp, Zea mays subsp. mays
  misc_feature (1)..(1329): Ceres Seq. ID no. 12588709
  misc_feature (1)..(1329): Ortholog of  Ceres SEQ ID NO 14314823 as cited in SEQ ID NO 52565
  misc_feature (1)..(1329): Ortholog of  Ceres SEQ ID NO 14307324 as cited in SEQ ID NO 54131
  misc_feature (1)..(1329): Ortholog of  Ceres SEQ ID NO 13594940 as cited in SEQ ID NO 55819
gcacgagaccattacctagaacatcctaatcgaaaacccacactcccctgcacacccaacccatccacatccactcgcccaagccggccttcgtccctgcccaacgctgcttcactctctccagcgatagatagcatcatcctctccacctgcacaggagacgacgaagcagcaccatcgtccgcggtcctttgcttcttctggcgccatgacgtcgccggtgccggagacgttcagcctgcaggaccagcagccgccgccgccgccgccagcggagcaggagcagatctgctacgtgcactgcagctactgcgacaccatcctcgcggtgggcgtgccgtgcagcagcctgttccagacggtcaccgtgcggtgcggccactgcgccaacctgctctacgtcaacctccgcgccctcctgctgccgccggcgacggcgcccgcggccgccaaccatctaccgcccttcggccaggctctcctctccccgacctcaccgcacggtctactcgatgctgagacgatgtcgtcgtcgtcgttccaagcgccgagcctgccgagcgctgaaccgccgagcgccgcctgcgtgagcggcatcacgagcatcaacaacaccgcctgcggtggcaacaacgccgcgtcggccatggcgccgccaccggccaaacctgcactgcacgagccgccgcagctgcccaggagcgcagcgtcagcgaacaagacttcagagaagcggcagagagttccttccgcatacaaccgtttcatcaaagatgagatccagcgcattaaggccagcaatcccgacatcactcacagggaagctttcagcgcggctgccaagaattgggcccatttcccacacatccatttcggcctcatgcccgatcagggtctgaagaagcaccccatgcaaactcaggagggagctgaatgcatgcttttcaaggacggtctatacgccgccgccgccgccgccacagcggcgtccagcatgggcatctctccattctgatgacttcagctccaccgcggaatggtctatagcgttctgcctctctgtgcgcgcctagccgcttagggttctgatgtctcagttccctcgttatctcccggttgcttgagtgagagatagcttcaatgtctatcccagccggagaatctcgaaatgtctctcagtacccatatatctctaatagttctcctcagtttccagcttcttactttgttaatttgttattatgcaacctctagagaggttgttatgtgtatgacgatgtgcggcctcttatctttatatggacataattcgagctggatattcggctg

SEQ ID NO: 16255 - protein, 268 aa, Zea mays subsp. mays
  peptide (1)..(268): Ceres Seq. ID no. 12588710
MTSPVPETFSLQDQQPPPPPPAEQEQICYVHCSYCDTILAVGVPCSSLFQTVTVRCGHCANLLYVNLRALLLPPATAPAAANHLPPFGQALLSPTSPHGLLDAETMSSSSFQAPSLPSAEPPSAACVSGITSINNTACGGNNAASAMAPPPAKPALHEPPQLPRSAASANKTSEKRQRVPSAYNRFIKDEIQRIKASNPDITHREAFSAAAKNWAHFPHIHFGLMPDQGLKKHPMQTQEGAECMLFKDGLYAAAAAATAASSMGISPF

SEQ ID NO: 16256 - protein, 172 aa, Zea mays subsp. mays
  peptide (1)..(172): Ceres Seq. ID no. 12588711
ARDHYLEHPNRKPTLPCTPNPSTSTRPSRPSSLPNAASLSPAIDSIILSTCTGDDEAAPSSAVLCFFWRHDVAGAGDVQPAGPAAAAAAASGAGADLLRALQLLRHHPRGGRAVQQPVPDGHRAVRPLRQPALRQPPRPPAAAGDGARGRQPSTALRPGSPLPDLTARSTRC

SEQ ID NO: 16257 - protein, 163 aa, Zea mays subsp. mays
  peptide (1)..(163): Ceres Seq. ID no. 12588712
MSSSSFQAPSLPSAEPPSAACVSGITSINNTACGGNNAASAMAPPPAKPALHEPPQLPRSAASANKTSEKRQRVPSAYNRFIKDEIQRIKASNPDITHREAFSAAAKNWAHFPHIHFGLMPDQGLKKHPMQTQEGAECMLFKDGLYAAAAAATAASSMGISPF

SEQ ID NO: 16258 - DNA, 1253 bp, Zea mays subsp. mays
  misc_feature (1)..(1253): Ceres Seq. ID no. 12407485
  misc_feature (1)..(1253): Ortholog of  Ceres SEQ ID NO 14304969 as cited in SEQ ID NO 53193
  misc_feature (1)..(1253): Ortholog of  Ceres SEQ ID NO 14314851 as cited in SEQ ID NO 54014
  misc_feature (1)..(1253): Ortholog of  Ceres SEQ ID NO 15227214 as cited in SEQ ID NO 55368
  misc_feature (1)..(1253): Ortholog of  Ceres SEQ ID NO 13638897 as cited in SEQ ID NO 55839
  misc_feature (1)..(1253): Ortholog of  Ceres SEQ ID NO 15173484 as cited in SEQ ID NO 61804
  misc_feature (1)..(1253): Ortholog of  Ceres SEQ ID NO 13596958 as cited in SEQ ID NO 63319
  misc_feature (1)..(1253): Ortholog of  Ceres SEQ ID NO 12614814 as cited in SEQ ID NO 68816
ctctgctcagctcgaacgaacaaaaagaactcccctcggccctctcctcttgtgcttctgcttccccaccgagtctcctcaaccccaggcactcgccctctgtcggtctgtcccctcccttcctcgcctccgatgccgccgccgccgccgcttctcgagccgcgcgactacctcggcgccggcgccacctcgtcgtgctgctcgtcgtcctgctcctccggccgcgagggcgcggggccccacctcgcgctgcggctcgggcttccggggtccgacgactcccccggccgcaggcgcggacgcggagcacgccggcgcccacgtcgacgccgcgctcaccctcggccccgcccccgcccccgcgcctcccaggggcagcgccaagcgcgggttcgccgactccctcgaccggtccgcgaagcgggacggcgttgccgcggatgacgctgctgggggcgtcacgcgggtagctggagctgctgccggagctccgcccgctgccaaggcacaagttgttggatggccgcctgttaggagctaccggaagaataccctagctgccagtgccacaaagacaaatgggggagatgaaggtaggagtgaggcgggatgctgttatgtcaaggtcagcatggatggagccccatacctaaggaaggtggacctcaagacctattcaagctatgaggatctctcgcttggtctggagaaaatgttcagttgcttcatcactggtcaaaacagttcatgcaagacatcaagaagggataggcttactgatggttctagggctgatgcccttcaggaccaagaatatgtccttacttacgaagataaagatgctgactggatgctcgttggtgatctgccctgggacttgttcaccacattttgccggaaacttaggatcatgagaggctctgatgctgctggcatggctcctccaagaccaccggaacagacagttcggaacaaatgagggcgggcagcttacttacctggcgctgaactgaagggagagcgacgctgccttggtcaggccttctttcacttgtgcagtgggatctgcgtcctgctgtctcggacgcccattttgcccacgagctggtcgtcacgtgctgtcgctttttgtctgggaaagatagcgtactgcttgctgtatgatactttcatctgtgttcggaagtttgtagcgcttcatatcctggaagggagtaaagaaaatgtccatgtgtccggtgagaatttctttc

SEQ ID NO: 16259 - protein, 325 aa, Zea mays subsp. mays
  peptide (1)..(325): Ceres Seq. ID no. 12407486
SAQLERTKRTPLGPLLLCFCFPTESPQPQALALCRSVPSLPRLRCRRRRRFSSRATTSAPAPPRRAARRPAPPAARARGPTSRCGSGFRGPTTPPAAGADAEHAGAHVDAALTLGPAPAPAPPRGSAKRGFADSLDRSAKRDGVAADDAAGGVTRVAGAAAGAPPAAKAQVVGWPPVRSYRKNTLAASATKTNGGDEGRSEAGCCYVKVSMDGAPYLRKVDLKTYSSYEDLSLGLEKMFSCFITGQNSSCKTSRRDRLTDGSRADALQDQEYVLTYEDKDADWMLVGDLPWDLFTTFCRKLRIMRGSDAAGMAPPRPPEQTVRNK

SEQ ID NO: 16260 - DNA, 1726 bp, Zea mays subsp. mays
  misc_feature (1)..(1726): Ceres Seq. ID no. 12406291
  misc_feature (1)..(1726): Ortholog of  Ceres SEQ ID NO 13600098 as cited in SEQ ID NO 0
acctcccttcccccactctcttctctccccgcggcccgtgactcatccacccacagtccactcgccactccccccggaacggcggcggcggcgacggcggaggagtaacgcaagatggcgaggaaacctctcgactacgaggagctgaacgagaacgtcaagagggtgcagtacgcggtgcgcggggagctgtacctccgcgcctccgagctgcagaaggagggcaagaagatcatcttcaccaacgtcggcaacccgcacgccctcggccagaaaccgctcaccttcccgcgccaggtggtggcgctgtgccaggctccgttcctcctcgacgatccccacgtcggcctcatgttcccggcggacgccatcgctagggccaagcactatctcgccatggcgcccggcggtctaggtgcgtacagtgactcccgcggcatcccgggaatcaggaaggaagttgccgacttcatccacaagcgtgatggatatcccagtgatccggaactcatctacctcacagacggtgccagcaaaggtgtgatgcagatcctgaacaccatcattagaaacgagatggatgggatcttggtccctgttcctcagtacccactttattccgccaccatttccctctatggtggttctctggtcccgtactacttggaagaagaggctaactggagcctcgactttgtgaatatccggcaaacagtggcggaggcacggtccaagggaatctctgttcgagcgatggtgatgataaatccaggaaatcccactggccaatgccttagtgaagcgaatataaaggaacttctgcaattttgctaccatgaaaacttagttctgctagcagatgaagtgtatcaacagaacatttatcaagatgaacggccatttataagcgcaagaaaggttatgttcgacatgggtccaccaataagcagtgagcttcaggttgtttctttccacactgtgtcgaaagggtactggggagagtgcggacaacgtggtggatacttcgaaatgacaaatcttcctcccaagacagtagatgagatctacaaggttgcatcgatagcactgagtccaaacgttcctgggcaaatttttatgggagtaatggttaaccctcctaaacctggagatatctcgtacctgaagttcgctgctgaaagcaagtccatccatgaatctttgaggaggagagcacgcatgatgacagatggtttcaacagttgccgaaacgtcgtgtgcaatttcactgaaggagctatgtactctttcccccaaatacgtctgccaccgagagctattgaggcggcaagaagagccggcaaatcagcggacgtcttctactgcctcaagctcctggaggcgacaggaatctccactgttccgggctctggttttgggcaaaaggaaggggtgttccaccttcggaccactatccttccagcggaggaagacttccctgccatcatgtcgagcttcaagaagttcaacgactcgttcatggagcagtacgagggctactccaggctgtgagcaggaagagaaacaagagtttacagatctgaagaagagattattgattggaagcttattagttattgtaactcccttgaaaagcaggttgtgcggggattattgtttattgaataaaaagtccgccatttgattctactgccataccagtatatataattgtgaattggcttgt

SEQ ID NO: 16261 - protein, 478 aa, Zea mays subsp. mays
  peptide (1)..(478): Ceres Seq. ID no. 12406292
MARKPLDYEELNENVKRVQYAVRGELYLRASELQKEGKKIIFTNVGNPHALGQKPLTFPRQVVALCQAPFLLDDPHVGLMFPADAIARAKHYLAMAPGGLGAYSDSRGIPGIRKEVADFIHKRDGYPSDPELIYLTDGASKGVMQILNTIIRNEMDGILVPVPQYPLYSATISLYGGSLVPYYLEEEANWSLDFVNIRQTVAEARSKGISVRAMVMINPGNPTGQCLSEANIKELLQFCYHENLVLLADEVYQQNIYQDERPFISARKVMFDMGPPISSELQVVSFHTVSKGYWGECGQRGGYFEMTNLPPKTVDEIYKVASIALSPNVPGQIFMGVMVNPPKPGDISYLKFAAESKSIHESLRRRARMMTDGFNSCRNVVCNFTEGAMYSFPQIRLPPRAIEAARRAGKSADVFYCLKLLEATGISTVPGSGFGQKEGVFHLRTTILPAEEDFPAIMSSFKKFNDSFMEQYEGYSRL

SEQ ID NO: 16262 - protein, 399 aa, Zea mays subsp. mays
  peptide (1)..(399): Ceres Seq. ID no. 12406293
MFPADAIARAKHYLAMAPGGLGAYSDSRGIPGIRKEVADFIHKRDGYPSDPELIYLTDGASKGVMQILNTIIRNEMDGILVPVPQYPLYSATISLYGGSLVPYYLEEEANWSLDFVNIRQTVAEARSKGISVRAMVMINPGNPTGQCLSEANIKELLQFCYHENLVLLADEVYQQNIYQDERPFISARKVMFDMGPPISSELQVVSFHTVSKGYWGECGQRGGYFEMTNLPPKTVDEIYKVASIALSPNVPGQIFMGVMVNPPKPGDISYLKFAAESKSIHESLRRRARMMTDGFNSCRNVVCNFTEGAMYSFPQIRLPPRAIEAARRAGKSADVFYCLKLLEATGISTVPGSGFGQKEGVFHLRTTILPAEEDFPAIMSSFKKFNDSFMEQYEGYSRL

SEQ ID NO: 16263 - protein, 384 aa, Zea mays subsp. mays
  peptide (1)..(384): Ceres Seq. ID no. 12406294
MAPGGLGAYSDSRGIPGIRKEVADFIHKRDGYPSDPELIYLTDGASKGVMQILNTIIRNEMDGILVPVPQYPLYSATISLYGGSLVPYYLEEEANWSLDFVNIRQTVAEARSKGISVRAMVMINPGNPTGQCLSEANIKELLQFCYHENLVLLADEVYQQNIYQDERPFISARKVMFDMGPPISSELQVVSFHTVSKGYWGECGQRGGYFEMTNLPPKTVDEIYKVASIALSPNVPGQIFMGVMVNPPKPGDISYLKFAAESKSIHESLRRRARMMTDGFNSCRNVVCNFTEGAMYSFPQIRLPPRAIEAARRAGKSADVFYCLKLLEATGISTVPGSGFGQKEGVFHLRTTILPAEEDFPAIMSSFKKFNDSFMEQYEGYSRL

SEQ ID NO: 16264 - DNA, 972 bp, Zea mays subsp. mays
  misc_feature (1)..(972): Ceres Seq. ID no. 12366045
  misc_feature (1)..(972): Ortholog of  Ceres SEQ ID NO 15174842 as cited in SEQ ID NO 53054
  misc_feature (1)..(972): Ortholog of  Ceres SEQ ID NO 14310917 as cited in SEQ ID NO 53231
  misc_feature (1)..(972): Ortholog of  Ceres SEQ ID NO 15170037 as cited in SEQ ID NO 55447
actatggaccaggccttcgtgcaggcccccgagcaccgccccaagcccatcgtcaccgaggccaccggcatccctctcatcgacctctcgcctctggccgccagcggcggcgccgtggacgcgctggccgccgaggtgggcgcggcgagccgccgccgccggcagccgtggccgacggcgagcttgtgttcgataacaagtggccccaggatctaccgggcttcagagaggcgctggaggagtacgcgaaagcgatggaagagctggcgttcaagctgctggagctgatcgcccggagcctgaagctgaggcccgaccggctgcacggcttcttcaaggaccagacgaccttcatccggctgaaccactaccctccttgcccgagccccgacctggccctcggcgtggggcggcacaaggacgccggcgccctgaccatcctgtaccaggacgacgtcggggggctcgacgtccggcggcggctccgacggcgagtgggtccgcgtcaggcccgtgcccgactcgttcatcatcaacgtcggcgacctcatccaggtacgagagcgcggagcaccgggcgtcggtgaactcggcgagggagaggttctccatgccctacttcttcaacccggcgacctacaccatggtggagccggtggaggagctggtgagcaaggacgatccgcccaggtacgacgcctacaactggggcgacttcttcagcaccaggaagaacagcaacttcaagaagctcaacgtggagaacattcagatcgcgcatttcaagaagagcctcgtcctcgcctaactactgctactgctaggatccatgccattgccatgtcgtcttcagattcagagcacgccatgtcgtcgctagcttcgtggtagaacaaataatgatgtgcgtgctgtgtgtaagcatggatatggatgtgaatatgtaatatgatgagcactcctactttggtg

SEQ ID NO: 16265 - protein, 194 aa, Zea mays subsp. mays
  peptide (1)..(194): Ceres Seq. ID no. 12366046
YGPGLRAGPRAPPQAHRHRGHRHPSHRPLASGRQRRRRGRAGRRGGRGEPPPPAAVADGELVFDNKWPQDLPGFREALEEYAKAMEELAFKLLELIARSLKLRPDRLHGFFKDQTTFIRLNHYPPCPSPDLALGVGRHKDAGALTILYQDDVGGLDVRRRLRRRVGPRQARARLVHHQRRRPHPGTRARSTGRR

SEQ ID NO: 16266 - protein, 110 aa, Zea mays subsp. mays
  peptide (1)..(110): Ceres Seq. ID no. 12366047
MEELAFKLLELIARSLKLRPDRLHGFFKDQTTFIRLNHYPPCPSPDLALGVGRHKDAGALTILYQDDVGGLDVRRRLRRRVGPRQARARLVHHQRRRPHPGTRARSTGRR

SEQ ID NO: 16267 - DNA, 495 bp, Zea mays subsp. mays
  misc_feature (1)..(495): Ceres Seq. ID no. 5759922
  misc_feature (1)..(495): Ortholog of  Ceres SEQ ID NO 14315892 as cited in SEQ ID NO 57776
gtaccaacaggaaaaaaggcccagaggcagtgccgtgaccgattcgagacgcaagagaaggatcgagacgaggcggcggttttccggggcagcatcgtctcggccacgaagatgtcttactcaaggggctcaagtgaaaggtatggatctcgctcaccttactcgagaagcacaaggtaccgaagtcgctctaggagtgtcgactctagtgatgctgaaaaccctgggaacaacctgtatgtgactggtttgtcggctcgtgtaacggatcgagatctggagaagcacttctccactgagggtgaggtgattgatgcaagcgttgtgtatgatccttggacaagggaatcacgggggtttggttttgttaccatggctgctgttaaagatgcagatcgctgcatcaaatatctggaccgttctgtgttgcaaggtcgggtcataactgttgagaaggtaaaatcataagattgggagcatctaactttcttattt

SEQ ID NO: 16268 - protein, 155 aa, Zea mays subsp. mays
  peptide (1)..(155): Ceres Seq. ID no. 5759923
VPTGKKAQRQCRDRFETQEKDRDEAAVFRGSIVSATKMSYSRGSSERYGSRSPYSRSTRYRSRSRSVDSSDAENPGNNLYVTGLSARVTDRDLEKHFSTEGEVIDASVVYDPWTRESRGFGFVTMAAVKDADRCIKYLDRSVLQGRVITVEKVKS

SEQ ID NO: 16269 - protein, 118 aa, Zea mays subsp. mays
  peptide (1)..(118): Ceres Seq. ID no. 5759924
MSYSRGSSERYGSRSPYSRSTRYRSRSRSVDSSDAENPGNNLYVTGLSARVTDRDLEKHFSTEGEVIDASVVYDPWTRESRGFGFVTMAAVKDADRCIKYLDRSVLQGRVITVEKVKS

SEQ ID NO: 16270 - protein, 80 aa, Zea mays subsp. mays
  peptide (1)..(80): Ceres Seq. ID no. 5759925
YQQEKRPRGSAVTDSRRKRRIETRRRFSGAASSRPRRCLTQGAQVKGMDLAHLTREAQGTEVALGVSTLVMLKTLGTTCM

SEQ ID NO: 16271 - DNA, 1316 bp, Zea mays subsp. mays
  misc_feature (1)..(1316): Ceres Seq. ID no. 12349557
  misc_feature (1)..(1316): Ortholog of  Ceres SEQ ID NO 14311596 as cited in SEQ ID NO 51728
  misc_feature (1)..(1316): Ortholog of  Ceres SEQ ID NO 14307004 as cited in SEQ ID NO 59551
  misc_feature (1)..(1316): Ortholog of  Ceres SEQ ID NO 12617197 as cited in SEQ ID NO 63406
  misc_feature (1)..(1316): Ortholog of  Ceres SEQ ID NO 13597804 as cited in SEQ ID NO 64182
  misc_feature (1)..(1316): Ortholog of  Ceres SEQ ID NO 14302768 as cited in SEQ ID NO 64889
  misc_feature (1)..(1316): Ortholog of  Ceres SEQ ID NO 14301622 as cited in SEQ ID NO 65156
  misc_feature (1)..(1316): Ortholog of  Ceres SEQ ID NO 13598565 as cited in SEQ ID NO 65250
  misc_feature (1)..(1316): Ortholog of  Ceres SEQ ID NO 13598597 as cited in SEQ ID NO 65496
  misc_feature (1)..(1316): Ortholog of  Ceres SEQ ID NO 13596284 as cited in SEQ ID NO 68273
  misc_feature (1)..(1316): Ortholog of  Ceres SEQ ID NO 13600175 as cited in SEQ ID NO 0
  misc_feature (1)..(1316): Ortholog of  Ceres SEQ ID NO 14308995 as cited in SEQ ID NO 0
  misc_feature (1)..(1316): Ortholog of  Ceres SEQ ID NO 15178902 as cited in SEQ ID NO 0
gtctagatcgctcgtccggtgtggtctctggacttgcttgccgttcacttctcttcagcggcagcgtggcaaggcaacgagagcaacgaagagtattcaaaccgaaaacaatggatccggtgcggaagagcgtgtgcgtgaccggcgctggcggcttcgtcgcgtcggagctggtgaagctcctcctctcccggggccaatacgcggtccgcggcaccgtgcgcgaccctggtgctagcaagaatgcccatctcaaggtgctggaaggagctgaggaaaggttgcagcttctcaaggctgatctgatggactacgacagcattgcatcagcagttgccggctgtgagggtgtcttccatgtagctagccctgtcctttcccatcgaccctccaaccctgaggtggaggtcatagctcccgctgtaataggtacaaccaatgtgttaaaggcttgctatgaggcaaaagttaggcgagttgtggtggtgtcttcatgtggagctgtgtatgctaatcctatttatccgaagggtaaggtgtttgatgaagactgctggtcagatgaggattactgcaggaagaaggaggattggtatttagtttccaaaacactgtcggaacgagaggctcttgcttttgcagcaaaaacagggctggacgttgtaactgtttgtccgtcattagtatttggacccttgatgcagcctacagtaaatttgagcagcgaaatgatccttaaatatttcaaagatctcgagactgttgaaaatgtactcagtaatatggtggatattcgtgatgttgctgatgctcttcttctgacttacgaaaagccagaagcgtctggacgatacatctgcagttcacatgcaataaaaatttctgatatgataaacatactgaagaccatgtatccgtcttacccttatcccaaaaattttgtggaagatgatgtcaactctgtatacagctctgagaaactgcagaagctggggtggagcttcaagcctatagaggaatccctccgtgacactgttgaatcctacaaggcatttggcatcctgaattgaacatcgaactaggattgtttccatctgctgttgcctccgaactcctcctgaataatgtaggcgcagtgacaacagcactgccgttctctttatttttcaacactattatgtagtggttcaggccaaataagtaggcccggtgctgactgttgtatggtttgtggcctattgtcgttgctaaaaactagaaatatgcgtactaatgttgcattgctgcacttgatttgcttgtcgtcattctgatgc

SEQ ID NO: 16272 - protein, 355 aa, Zea mays subsp. mays
  peptide (1)..(355): Ceres Seq. ID no. 12349558
LDRSSGVVSGLACRSLLFSGSVARQREQRRVFKPKTMDPVRKSVCVTGAGGFVASELVKLLLSRGQYAVRGTVRDPGASKNAHLKVLEGAEERLQLLKADLMDYDSIASAVAGCEGVFHVASPVLSHRPSNPEVEVIAPAVIGTTNVLKACYEAKVRRVVVVSSCGAVYANPIYPKGKVFDEDCWSDEDYCRKKEDWYLVSKTLSEREALAFAAKTGLDVVTVCPSLVFGPLMQPTVNLSSEMILKYFKDLETVENVLSNMVDIRDVADALLLTYEKPEASGRYICSSHAIKISDMINILKTMYPSYPYPKNFVEDDVNSVYSSEKLQKLGWSFKPIEESLRDTVESYKAFGILN

SEQ ID NO: 16273 - protein, 319 aa, Zea mays subsp. mays
  peptide (1)..(319): Ceres Seq. ID no. 12349559
MDPVRKSVCVTGAGGFVASELVKLLLSRGQYAVRGTVRDPGASKNAHLKVLEGAEERLQLLKADLMDYDSIASAVAGCEGVFHVASPVLSHRPSNPEVEVIAPAVIGTTNVLKACYEAKVRRVVVVSSCGAVYANPIYPKGKVFDEDCWSDEDYCRKKEDWYLVSKTLSEREALAFAAKTGLDVVTVCPSLVFGPLMQPTVNLSSEMILKYFKDLETVENVLSNMVDIRDVADALLLTYEKPEASGRYICSSHAIKISDMINILKTMYPSYPYPKNFVEDDVNSVYSSEKLQKLGWSFKPIEESLRDTVESYKAFGILN

SEQ ID NO: 16274 - protein, 254 aa, Zea mays subsp. mays
  peptide (1)..(254): Ceres Seq. ID no. 12349560
MDYDSIASAVAGCEGVFHVASPVLSHRPSNPEVEVIAPAVIGTTNVLKACYEAKVRRVVVVSSCGAVYANPIYPKGKVFDEDCWSDEDYCRKKEDWYLVSKTLSEREALAFAAKTGLDVVTVCPSLVFGPLMQPTVNLSSEMILKYFKDLETVENVLSNMVDIRDVADALLLTYEKPEASGRYICSSHAIKISDMINILKTMYPSYPYPKNFVEDDVNSVYSSEKLQKLGWSFKPIEESLRDTVESYKAFGILN

SEQ ID NO: 16275 - DNA, 662 bp, Zea mays subsp. mays
  misc_feature (1)..(662): Ceres Seq. ID no. 12349561
  misc_feature (1)..(662): Ortholog of  Ceres SEQ ID NO 12635272 as cited in SEQ ID NO 495
  misc_feature (1)..(662): Ortholog of  Ceres SEQ ID NO 13594789 as cited in SEQ ID NO 52172
  misc_feature (1)..(662): Ortholog of  Ceres SEQ ID NO 14306131 as cited in SEQ ID NO 52246
  misc_feature (1)..(662): Ortholog of  Ceres SEQ ID NO 14309585 as cited in SEQ ID NO 52660
  misc_feature (1)..(662): Ortholog of  Ceres SEQ ID NO 14305267 as cited in SEQ ID NO 0
actagttgctagtgctaccaagaacaggaaggaaacaccgccgccgccgcgccttccattccagtactcgcggaggaaaggaacaccagccagcgccatggtcacgtcgacgaccgccgccgccgtgctgtccccgccgtccgtggccgggcttcgcctggcgccgtctccccgggcgcgcgtggcgttccgcgcggcgcgggcgcggcggtccgtggcggcgcgcgcggagctgagcccgtcgctggtgatcagcctgagcacgggcgtgtcgctcttcctgggccgcttcgtcttcttcaacttccagcgggagaacgtggcgaagcaggtgcccgagcagaacggcaagacgcacttcgacgccggcgacgagcgcgccaaggagttctcgggcctgctcaagtccaacgaccccgtgggcttcaacctcgtcgacgtcctcgcctggggctcgctcggccacatcgtcgcctactacatcctcgccacctcaagcaacggatacgaccccaacttcttctgagcggccggctgcgggcatgttcttgagcctgcctgtattctactccgtgtgtgttgagccatatatctgatgctcaaggattggttaatttgaacaagtggtgcaactgcgcgtgtacatggatttgctcttcccc

SEQ ID NO: 16276 - protein, 174 aa, Zea mays subsp. mays
  peptide (1)..(174): Ceres Seq. ID no. 12349562
LVASATKNRKETPPPPRLPFQYSRRKGTPASAMVTSTTAAAVLSPPSVAGLRLAPSPRARVAFRAARARRSVAARAELSPSLVISLSTGVSLFLGRFVFFNFQRENVAKQVPEQNGKTHFDAGDERAKEFSGLLKSNDPVGFNLVDVLAWGSLGHIVAYYILATSSNGYDPNFF

SEQ ID NO: 16277 - protein, 142 aa, Zea mays subsp. mays
  peptide (1)..(142): Ceres Seq. ID no. 12349563
MVTSTTAAAVLSPPSVAGLRLAPSPRARVAFRAARARRSVAARAELSPSLVISLSTGVSLFLGRFVFFNFQRENVAKQVPEQNGKTHFDAGDERAKEFSGLLKSNDPVGFNLVDVLAWGSLGHIVAYYILATSSNGYDPNFF

SEQ ID NO: 16278 - DNA, 1366 bp, Zea mays subsp. mays
  misc_feature (1)..(1366): Ceres Seq. ID no. 12406423
  misc_feature (1)..(1366): Ortholog of  Ceres SEQ ID NO 12587035 as cited in SEQ ID NO 63605
  misc_feature (1)..(1366): Ortholog of  Ceres SEQ ID NO 14302836 as cited in SEQ ID NO 65013
  misc_feature (1)..(1366): Ortholog of  Ceres SEQ ID NO 12566239 as cited in SEQ ID NO 0
ctcctctcaactgttctctcgccgccgttctagttccgttttgccttgaggtgcacgtggcggtggaagcttcccgggcggtggcggttgttggttcatgtcgatggcgcaggtgtgctgcgactcggccgcagcggcgacaccggtggccggaccggaggcggaggccagggccagggcgcgcgccgagaggcgccgccgggccgcggaggccgggaggtggaagcacgcggcggctgctggcactggcacggcagccgcagatgccacgaggaagcggagcctcgaggccggggagctgctcgtcgcgcggaagcacggggccgcgtcggtggccggccgccggagggagatggaggacgccgtgtccgtgcgcgagtccttcgccgcggagggcgaggccgacggcggccggaggcgcgacttctacggggtgttcgacggccacggctgctcgcacgtggccgaggcgtgccgggaccggatgcacgacctgctcgccgaggagctcgccgctgccgtcgccgccgacggctccgcggcgacctggaccgccgcgatggaacgcagcttcgcgcggatggacgccgaggcgatgtcggccggcgggagcgccgcctgccgctgcgacccgcacaagtgcgaccacgtgggctccaccgccgtggtggccgtcgtggaggagcgccgcgtcgtggtggccaactgtggcgacagccgcgcgctgctgtgccgcgggggcggcgcgccgccgctgccgctgtcgtcggaccacaagcccgaccgccccgacgagctggagcggatcgaggccgcgggcggccgcgtcatcttctgggagggcgcgcgcgtgctgggcgtcctcgccatgtcccgcgccatcggggacggctacctcaagccgtacgtctcgtccgtgcccgaggtcacgctcaccgaccgctccgacgccgacgagtgcctcatcctcgccagcgacggcctctgggacgtggttagcaacgaggccgcgtgcgaggtggcgcgcgcctgcctccgccgggggcgggccaggtggtgcgccgaggccgccgcgctgctcaccaagctggccctcgccaggcgcagctccgacaacgtctcggtggtcgtcgtcgatctccggaagagggatcgctagctagctctgtgccgttagtactaatacagtagtaggatggtgcacaaaaggatctcgcgggtgtctactaattgtttctctttgtcgtcaacagttattttgctgctctccctgaatcaaaaaagttcagaggagcccttagattaattgttgtggtggaaccggaatttgacccggataccatttgggatgaatggaaccttgcat

SEQ ID NO: 16279 - protein, 386 aa, Zea mays subsp. mays
  peptide (1)..(386): Ceres Seq. ID no. 12406424
PLNCSLAAVLVPFCLEVHVAVEASRAVAVVGSCRWRRCAATRPQRRHRWPDRRRRPGPGRAPRGAAGPRRPGGGSTRRLLALARQPQMPRGSGASRPGSCSSRGSTGPRRWPAAGGRWRTPCPCASPSPRRARPTAAGGATSTGCSTATAARTWPRRAGTGCTTCSPRSSPLPSPPTAPRRPGPPRWNAASRGWTPRRCRPAGAPPAAATRTSATTWAPPPWWPSWRSAASWWPTVATAARCCAAGAARRRCRCRRTTSPTAPTSWSGSRPRAAASSSGRARACWASSPCPAPSGTATSSRTSRPCPRSRSPTAPTPTSASSSPATASGTWLATRPRARWRAPASAGGGPGGAPRPPRCSPSWPSPGAAPTTSRWSSSISGRGIAS

SEQ ID NO: 16280 - protein, 353 aa, Zea mays subsp. mays
  peptide (1)..(353): Ceres Seq. ID no. 12406425
MSMAQVCCDSAAAATPVAGPEAEARARARAERRRRAAEAGRWKHAAAAGTGTAAADATRKRSLEAGELLVARKHGAASVAGRRREMEDAVSVRESFAAEGEADGGRRRDFYGVFDGHGCSHVAEACRDRMHDLLAEELAAAVAADGSAATWTAAMERSFARMDAEAMSAGGSAACRCDPHKCDHVGSTAVVAVVEERRVVVANCGDSRALLCRGGGAPPLPLSSDHKPDRPDELERIEAAGGRVIFWEGARVLGVLAMSRAIGDGYLKPYVSSVPEVTLTDRSDADECLILASDGLWDVVSNEAACEVARACLRRGRARWCAEAAALLTKLALARRSSDNVSVVVVDLRKRDR

SEQ ID NO: 16281 - protein, 351 aa, Zea mays subsp. mays
  peptide (1)..(351): Ceres Seq. ID no. 12406426
MAQVCCDSAAAATPVAGPEAEARARARAERRRRAAEAGRWKHAAAAGTGTAAADATRKRSLEAGELLVARKHGAASVAGRRREMEDAVSVRESFAAEGEADGGRRRDFYGVFDGHGCSHVAEACRDRMHDLLAEELAAAVAADGSAATWTAAMERSFARMDAEAMSAGGSAACRCDPHKCDHVGSTAVVAVVEERRVVVANCGDSRALLCRGGGAPPLPLSSDHKPDRPDELERIEAAGGRVIFWEGARVLGVLAMSRAIGDGYLKPYVSSVPEVTLTDRSDADECLILASDGLWDVVSNEAACEVARACLRRGRARWCAEAAALLTKLALARRSSDNVSVVVVDLRKRDR

SEQ ID NO: 16282 - DNA, 1271 bp, Zea mays subsp. mays
  misc_feature (1)..(1271): Ceres Seq. ID no. 12358434
  misc_feature (1)..(1271): Ortholog of  Ceres SEQ ID NO 15175048 as cited in SEQ ID NO 59975
  misc_feature (1)..(1271): Ortholog of  Ceres SEQ ID NO 14303542 as cited in SEQ ID NO 63539
  misc_feature (1)..(1271): Ortholog of  Ceres SEQ ID NO 13597333 as cited in SEQ ID NO 63974
  misc_feature (1)..(1271): Ortholog of  Ceres SEQ ID NO 12407937 as cited in SEQ ID NO 0
  misc_feature (1)..(1271): Ortholog of  Ceres SEQ ID NO 13599307 as cited in SEQ ID NO 0
ctctctccatccccagcccacgaccctccgccaccagccatcgtctgcatcagatctcccgcccgtccgttacatcccagggcgacgcggccgcggccatgacgccatcctcagctctcgccctcgcgcaccacgccgcggtatccccgctcccgtcctccacgccgcggccctcccccaggtccagctctctgagcctgggcccgggctccgccgggctcgggccgcgccggctcgtcgcggcggcgcccccacgggcgttcttctcctcgtccccctaccagccgccccagccggaggggttctcgcagcaccgcgagtacggtctggtccccatggtcatcgagaccacctcccgcggggagcgcgcctacgacatcttctcgcgcctgctcaaggagcgcatcgtctgcatccacgggcccatcgccgacgacacggcctcgcttgtcgtcgcgcagctgctcttcctcgagtccgagaacccgctcaagcccgtccacctctacatcaactcccccgggggcgtcgtcaccgcggggctcgccatctacgacaccatgcagtacatccgctgccccgtcaccaccctctgcatcggccaggcggcctccatgggctcgctcctcctcgcggctggggcgccgggtgagaggcgcgcgcttcccaacgccagggtcatgatccaccagccctcgggcggcgcgcaggggcaagccaccgacatcgccatccaggccaaggagatcctcaaaatgcgcgaccgcctcaacaagatctaccagaagcacacgcgccagcccatcgataagattgagcagtgcatggagagggacctcttcatggaccctgaagaggcgcgcgactggggcctcatcgacgaggtcatcgagaatcgacctgcctcgttcatgcccgacgtaatcggtggaggcctcgatgtgcccaggctcggtggcgttggcggcggacgggggagggacgtcgaggaaccttccgcggtgtgaggattggcctcaaaggtgaaatccttcctcatccggtggatgtgttgtttgttgttagatccaaaggttcaattcttactatacaaggttaaccttgttattatggttatggaaacgtccggctccccattgtccttgttgcttaaattgcttcaattgagctattggggatataattattgcaactctaaggaaattctgcactgttgatactgataaattgacacagtattgtgtatgttgtactatatttgtatcaattcc

SEQ ID NO: 16283 - protein, 334 aa, Zea mays subsp. mays
  peptide (1)..(334): Ceres Seq. ID no. 12358435
LSIPSPRPSATSHRLHQISRPSVTSQGDAAAAMTPSSALALAHHAAVSPLPSSTPRPSPRSSSLSLGPGSAGLGPRRLVAAAPPRAFFSSSPYQPPQPEGFSQHREYGLVPMVIETTSRGERAYDIFSRLLKERIVCIHGPIADDTASLVVAQLLFLESENPLKPVHLYINSPGGVVTAGLAIYDTMQYIRCPVTTLCIGQAASMGSLLLAAGAPGERRALPNARVMIHQPSGGAQGQATDIAIQAKEILKMRDRLNKIYQKHTRQPIDKIEQCMERDLFMDPEEARDWGLIDEVIENRPASFMPDVIGGGLDVPRLGGVGGGRGRDVEEPSAV

SEQ ID NO: 16284 - protein, 302 aa, Zea mays subsp. mays
  peptide (1)..(302): Ceres Seq. ID no. 12358436
MTPSSALALAHHAAVSPLPSSTPRPSPRSSSLSLGPGSAGLGPRRLVAAAPPRAFFSSSPYQPPQPEGFSQHREYGLVPMVIETTSRGERAYDIFSRLLKERIVCIHGPIADDTASLVVAQLLFLESENPLKPVHLYINSPGGVVTAGLAIYDTMQYIRCPVTTLCIGQAASMGSLLLAAGAPGERRALPNARVMIHQPSGGAQGQATDIAIQAKEILKMRDRLNKIYQKHTRQPIDKIEQCMERDLFMDPEEARDWGLIDEVIENRPASFMPDVIGGGLDVPRLGGVGGGRGRDVEEPSAV

SEQ ID NO: 16285 - protein, 223 aa, Zea mays subsp. mays
  peptide (1)..(223): Ceres Seq. ID no. 12358437
MVIETTSRGERAYDIFSRLLKERIVCIHGPIADDTASLVVAQLLFLESENPLKPVHLYINSPGGVVTAGLAIYDTMQYIRCPVTTLCIGQAASMGSLLLAAGAPGERRALPNARVMIHQPSGGAQGQATDIAIQAKEILKMRDRLNKIYQKHTRQPIDKIEQCMERDLFMDPEEARDWGLIDEVIENRPASFMPDVIGGGLDVPRLGGVGGGRGRDVEEPSAV

SEQ ID NO: 16286 - DNA, 1883 bp, Zea mays subsp. mays
  misc_feature (1)..(1883): Ceres Seq. ID no. 12369615
  misc_feature (1)..(1883): Ortholog of  Ceres SEQ ID NO 13599324 as cited in SEQ ID NO 0
cttgactcactcacttggccactcttcttcctcctcatcaatccgctctccagcacttgttcggaagaaaaagaagctagaacacgctaacaagacaacaaggatcatggggcgcgggcgcggccacctcctgctgccggcagcagccgcctgcctgtgggcgctgtcgtgcgcgctgctgctgcgcgcgtcccctcaccgcgctggcgccggcgccggcgggctgctgagggtcgggctcagcaggcgcggcggcgggctcgaccagcgcgcgctggcggcggccaaggccgcgaggcagcaggaggcaagccgtctcggggcctccggcggcggcgacgtccctctcgtcgactacctcaacacccagtactatggggtcgtcggcatcggcacaccgccgcagaacttcaccgtcatcttcgacaccggcagctccaacctctgggtcccctcctccagatgctacttctcgattgcctgctacctgcaccacagatacaagtcggccaagtctagcacgtacaaggcggacggcgagacctgcaagatcacctacggctccggctcgatcgccgggttcttcagcgacgacgacgtgctggtcggggacctgaccgtcaaaaaccagaagttcatcgagacaacgcgcgaaagcagcgtaacgttcataatcggcaagttcgacggcatcctcggtctcggataccccgagatctccgtcggcaaggctcctccgatctggcagagcatgcaggagcaggagctgctggcggaggacgtcttctccttctggctgaaccggagcccggacgcggacgcagcgtccggcggcgagctcgtcttcggcggcgtcgaccctgcgcacttcagcgggaaccacacctacgtccccgtctcccgcaagggatactggcagttcgacatgggggaccttctcatcgacggccactccaccggtttctgcgccaaggggtgcgctgccatcgtcgactccgggacttccttgctcgctggcccaacggccataattgcccaggtgaacgaagcgatcggggcagacgggatcatcagcacggagtgcaaggaagttgtgagccagtacggagagatgatcctcgacatgctcatcgcacagacggatccacagagggtgtgcagccaggttggtctgtgcgtgttcgatggcgctcgatctgtcagcgaggggattgaatctgttgtcgggaaagaaaacctgggctcagatgtcatgtgctcggcctgtcagatggctgtcgtgtggatagagaaccagctccgcgaaaacaagaccaaggagctcatactgcagtacgctaaccagctgtgtgagcgtctgccgagccccaacggagagtcaacagtcagctgccaggagatctccaagatgcccagccttgcgtttcaccatcgcaaacaagaccttcaccctaacacccgagcagtacattgtgaagctggagcaaggaggccaaaccgtctgcatcagtgggttcatggcgtatgacgtgccaccgccgcgtggtcctctctggattcttggggacgtcttcatgggagcttaccacacggtgttcgacttcggcaacgacaggattggcttcgcggaatctgcatgagtgtggagagcactctcatctttataaagacgataccctatgtattagggatgtgtagtttattgtctatccactacatgccaacagtacgctgcaaataaatcggtggccaaaattgctgaaaccagaaacgtgaacagtactgctttctttgtttctggagaagagcaaatggatgcttcaagacatgcatgtccgatgtgtattgagaaatagagcgatgagtgctgctcgatcgtctcg

SEQ ID NO: 16287 - protein, 508 aa, Zea mays subsp. mays
  peptide (1)..(508): Ceres Seq. ID no. 12369616
LTHSLGHSSSSSSIRSPALVRKKKKLEHANKTTRIMGRGRGHLLLPAAAACLWALSCALLLRASPHRAGAGAGGLLRVGLSRRGGGLDQRALAAAKAARQQEASRLGASGGGDVPLVDYLNTQYYGVVGIGTPPQNFTVIFDTGSSNLWVPSSRCYFSIACYLHHRYKSAKSSTYKADGETCKITYGSGSIAGFFSDDDVLVGDLTVKNQKFIETTRESSVTFIIGKFDGILGLGYPEISVGKAPPIWQSMQEQELLAEDVFSFWLNRSPDADAASGGELVFGGVDPAHFSGNHTYVPVSRKGYWQFDMGDLLIDGHSTGFCAKGCAAIVDSGTSLLAGPTAIIAQVNEAIGADGIISTECKEVVSQYGEMILDMLIAQTDPQRVCSQVGLCVFDGARSVSEGIESVVGKENLGSDVMCSACQMAVVWIENQLRENKTKELILQYANQLCERLPSPNGESTVSCQEISKMPSLAFHHRKQDLHPNTRAVHCEAGARRPNRLHQWVHGV

SEQ ID NO: 16288 - protein, 473 aa, Zea mays subsp. mays
  peptide (1)..(473): Ceres Seq. ID no. 12369617
MGRGRGHLLLPAAAACLWALSCALLLRASPHRAGAGAGGLLRVGLSRRGGGLDQRALAAAKAARQQEASRLGASGGGDVPLVDYLNTQYYGVVGIGTPPQNFTVIFDTGSSNLWVPSSRCYFSIACYLHHRYKSAKSSTYKADGETCKITYGSGSIAGFFSDDDVLVGDLTVKNQKFIETTRESSVTFIIGKFDGILGLGYPEISVGKAPPIWQSMQEQELLAEDVFSFWLNRSPDADAASGGELVFGGVDPAHFSGNHTYVPVSRKGYWQFDMGDLLIDGHSTGFCAKGCAAIVDSGTSLLAGPTAIIAQVNEAIGADGIISTECKEVVSQYGEMILDMLIAQTDPQRVCSQVGLCVFDGARSVSEGIESVVGKENLGSDVMCSACQMAVVWIENQLRENKTKELILQYANQLCERLPSPNGESTVSCQEISKMPSLAFHHRKQDLHPNTRAVHCEAGARRPNRLHQWVHGV

SEQ ID NO: 16289 - protein, 258 aa, Zea mays subsp. mays
  peptide (1)..(258): Ceres Seq. ID no. 12369618
MQEQELLAEDVFSFWLNRSPDADAASGGELVFGGVDPAHFSGNHTYVPVSRKGYWQFDMGDLLIDGHSTGFCAKGCAAIVDSGTSLLAGPTAIIAQVNEAIGADGIISTECKEVVSQYGEMILDMLIAQTDPQRVCSQVGLCVFDGARSVSEGIESVVGKENLGSDVMCSACQMAVVWIENQLRENKTKELILQYANQLCERLPSPNGESTVSCQEISKMPSLAFHHRKQDLHPNTRAVHCEAGARRPNRLHQWVHGV

SEQ ID NO: 16290 - DNA, 1384 bp, Zea mays subsp. mays
  misc_feature (1)..(1384): Ceres Seq. ID no. 12368172
  misc_feature (1)..(1384): Ortholog of  Ceres SEQ ID NO 13594918 as cited in SEQ ID NO 55747
  misc_feature (1)..(1384): Ortholog of  Ceres SEQ ID NO 12587066 as cited in SEQ ID NO 63204
attacatccgagggcactccatctcttgcgtcccttaacccctccaccaatccaatccaatcccttaaccccgcaccgaatccagccttcgaagcttcctcttcctcccggccccggtcccggtcccggtcccggagccctgttcttggtacttaggacaagacgctccgagaccctcgagattgagagctcgctcgctcgctcggtgtcttcgccagctgcccaccctccttcctgctcgtccccccgctcgcgcctcctcttcctcggactgatgggcgaccatctcgcgttgatcgtggaccggctgctgacagagtcgacgctggaggcggcgatcggcggtgggaagcacatggtcgatctgcgtcaggagacggtggacgtcgagtactgccatcgcgggctaggcggcggctcggcgacgaaggtggtggagtgcaggatttgccaggaggaggactgggacacctgcatggaggccccctgcgcctgttgtggcagcctcaagtatgcgcatcggaaatgcattcagcgctggtgcaatgagaaaggcgacactatgtgtgaaatatgcctgcagcaattcaggccaggttatacttctccacaacagctgtttcactatggaagtataccaatgaatttcagagggaactgggagattgccaggcaagatctcaatgattcccagataataacaatgatgcccacggagcgtgattttatggacaattacgatgactactttcctatcaggacaagaagcagcaccttgtgttgccggacaattgccataattttcatgtcactcctggtccttcgccacactcttcctcttgtgattggtgacaatggggagtactcattggccttattctcgcttctggtgctgagaactgcgggaatcctctttccaatcctggtgatggtgagagcattggcaagcttccatcatcgacggcggcagcaggaaagccaggaagcatatatatcttcatcagagagcgaggaggaagaggaagagtatacagttgccaattctgcacaaacaaactactcgcaaccgcgcttcataccagtctactgacatggccaagaacaagccttccaacctcacatctgacagggaattccagcgcctgagtttagctgacagatgcaaggatgaatggatgatcacaaggggggaaattacaaaattgtgaatgtggtgacatagtaagatagcctgaagccactcgcttctatgcccatagagaagaatgtagtggccctgctacttgtacataggagagagtacagcagcagagtgctgacaaacccggatactgtgactcgagtctctactgcagtaacccttgtgcactgctctccccgtccc

SEQ ID NO: 16291 - protein, 362 aa, Zea mays subsp. mays
  peptide (1)..(362): Ceres Seq. ID no. 12368173
LHPRALHLLRPLTPPPIQSNPLTPHRIQPSKLPLPPGPGPGPGPGALFLVLRTRRSETLEIESSLARSVSSPAAHPPSCSSPRSRLLFLGLMGDHLALIVDRLLTESTLEAAIGGGKHMVDLRQETVDVEYCHRGLGGGSATKVVECRICQEEDWDTCMEAPCACCGSLKYAHRKCIQRWCNEKGDTMCEICLQQFRPGYTSPQQLFHYGSIPMNFRGNWEIARQDLNDSQIITMMPTERDFMDNYDDYFPIRTRSSTLCCRTIAIIFMSLLVLRHTLPLVIGDNGEYSLALFSLLVLRTAGILFPILVMVRALASFHHRRRQQESQEAYISSSESEEEEEEYTVANSAQTNYSQPRFIPVY

SEQ ID NO: 16292 - protein, 271 aa, Zea mays subsp. mays
  peptide (1)..(271): Ceres Seq. ID no. 12368174
MGDHLALIVDRLLTESTLEAAIGGGKHMVDLRQETVDVEYCHRGLGGGSATKVVECRICQEEDWDTCMEAPCACCGSLKYAHRKCIQRWCNEKGDTMCEICLQQFRPGYTSPQQLFHYGSIPMNFRGNWEIARQDLNDSQIITMMPTERDFMDNYDDYFPIRTRSSTLCCRTIAIIFMSLLVLRHTLPLVIGDNGEYSLALFSLLVLRTAGILFPILVMVRALASFHHRRRQQESQEAYISSSESEEEEEEYTVANSAQTNYSQPRFIPVY

SEQ ID NO: 16293 - protein, 244 aa, Zea mays subsp. mays
  peptide (1)..(244): Ceres Seq. ID no. 12368175
MVDLRQETVDVEYCHRGLGGGSATKVVECRICQEEDWDTCMEAPCACCGSLKYAHRKCIQRWCNEKGDTMCEICLQQFRPGYTSPQQLFHYGSIPMNFRGNWEIARQDLNDSQIITMMPTERDFMDNYDDYFPIRTRSSTLCCRTIAIIFMSLLVLRHTLPLVIGDNGEYSLALFSLLVLRTAGILFPILVMVRALASFHHRRRQQESQEAYISSSESEEEEEEYTVANSAQTNYSQPRFIPVY

SEQ ID NO: 16294 - DNA, 1582 bp, Zea mays subsp. mays
  misc_feature (1)..(1582): Ceres Seq. ID no. 12376690
  misc_feature (1)..(1582): Ortholog of  Ceres SEQ ID NO 15224803 as cited in SEQ ID NO 56572
  misc_feature (1)..(1582): Ortholog of  Ceres SEQ ID NO 13502952 as cited in SEQ ID NO 62271
  misc_feature (1)..(1582): Ortholog of  Ceres SEQ ID NO 13502973 as cited in SEQ ID NO 68052
  misc_feature (1)..(1582): Ortholog of  Ceres SEQ ID NO 13596000 as cited in SEQ ID NO 68188
  misc_feature (1)..(1582): Ortholog of  Ceres SEQ ID NO 15179420 as cited in SEQ ID NO 0
aaagcaccagctaagctaaagacgacactagcattgcacacactaactacatatatagctaaatacactagcatacccccccaaaaaaatgtccgcgtcacgggttcctcctcgccgtcctcgtggtgggcagcgtactgtgcaccgccgccgctccccgcgcgctcgcggcggcggctcgcgagctggccggggacgacgaggccgccgccgcgatggcgtcgcggcacgagaagtggatggcggagcacgggcgcgcgtacaaggatgaggccgagaaggcgcggcggctggaggtgttccgggccaacgcggagctgatcgactcgttcaacgccgcagggacgcacagccaccggctggcgaccaacaggttcgccgacctcaccgtcgaggagttccgcgcggccaggaccgggctccggcagcgcccggcgccgtccgcgggcgccggccggttcaggtacgagaacttcagcctggcggacgcggcgcagagcgtggactggcgggccatgggtgccgtcaccggcgtcaaggaccagggagcgtgcggctgctgctgggcgttctcggcggtggcggcggtggaagggctaaacaagatccggacggggcggctggtgtcgctgtcggagcaggagctggtggactgcgacgtcagcggcgtggaccagggctgcgacggcggcctcatggacaacgccttccagttcgtcgcgcgccgcggcgggctggcctcggagtcgggctacccgtaccagggccggggacgggccctgccgctcgtccgccgccgccgccgcgtccatccggggccacgaggacgtgccgcgcaacaacgaggccgcgctcgcggccgccgtggccaaccagcccgtgtccgtggccatcaacggcgaggacatggcgttccgcttctacgacagcggcgtgctgggcggggcctgcggcacggacctcaaccacgccatcacggccgtcgggtacggcacggcgaacgacggcacaaggtactggctgatgaagaactcctggggcgcgtcgtggggcgagggcggatacgtccgcatccgccgcggcgtccgtggggagggcgtctgcggtctcgccaagctgccgtcctacccggtctagaggccaggcccagcggatcggagcaccgatcgcgtccaccaacgtaaccatcgcacagcatacagtacgcatgatgctgttacgtcatccaagacaagcgtgcacgtgcatggcatttatatttgactagctacgaatttaccgttctttttatttgtagccgacgataaatattggagaacagagatattactatttataagattgtatataatcatacgattcatggttatatatatgtatagtggtatagtcgaaatcacgacccacgccaagcattatgtattgtactcccagccataagaatgtcgctgaggtattagttggaccttacgtgtgatggtcacgtattgtaatgtacagattgcgttgaatgcaaccagtttagtgtaaacaaatacattcatactagaatgtgtgatttttaaaaaaaaaatatatgctc

SEQ ID NO: 16295 - protein, 322 aa, Zea mays subsp. mays
  peptide (1)..(322): Ceres Seq. ID no. 12376691
MASRHEKWMAEHGRAYKDEAEKARRLEVFRANAELIDSFNAAGTHSHRLATNRFADLTVEEFRAARTGLRQRPAPSAGAGRFRYENFSLADAAQSVDWRAMGAVTGVKDQGACGCCWAFSAVAAVEGLNKIRTGRLVSLSEQELVDCDVSGVDQGCDGGLMDNAFQFVARRGGLASESGYPYQGRGRALPLVRRRRRVHPGPRGRAAQQRGRARGRRGQPARVRGHQRRGHGVPLLRQRRAGRGLRHGPQPRHHGRRVRHGERRHKVLADEELLGRVVGRGRIRPHPPRRPWGGRLRSRQAAVLPGLEARPSGSEHRSRPPT

SEQ ID NO: 16296 - protein, 314 aa, Zea mays subsp. mays
  peptide (1)..(314): Ceres Seq. ID no. 12376692
MAEHGRAYKDEAEKARRLEVFRANAELIDSFNAAGTHSHRLATNRFADLTVEEFRAARTGLRQRPAPSAGAGRFRYENFSLADAAQSVDWRAMGAVTGVKDQGACGCCWAFSAVAAVEGLNKIRTGRLVSLSEQELVDCDVSGVDQGCDGGLMDNAFQFVARRGGLASESGYPYQGRGRALPLVRRRRRVHPGPRGRAAQQRGRARGRRGQPARVRGHQRRGHGVPLLRQRRAGRGLRHGPQPRHHGRRVRHGERRHKVLADEELLGRVVGRGRIRPHPPRRPWGGRLRSRQAAVLPGLEARPSGSEHRSRPPT

SEQ ID NO: 16297 - protein, 222 aa, Zea mays subsp. mays
  peptide (1)..(222): Ceres Seq. ID no. 12376693
MGAVTGVKDQGACGCCWAFSAVAAVEGLNKIRTGRLVSLSEQELVDCDVSGVDQGCDGGLMDNAFQFVARRGGLASESGYPYQGRGRALPLVRRRRRVHPGPRGRAAQQRGRARGRRGQPARVRGHQRRGHGVPLLRQRRAGRGLRHGPQPRHHGRRVRHGERRHKVLADEELLGRVVGRGRIRPHPPRRPWGGRLRSRQAAVLPGLEARPSGSEHRSRPPT

SEQ ID NO: 16298 - DNA, 1474 bp, Zea mays subsp. mays
  misc_feature (1)..(1474): Ceres Seq. ID no. 12353165
  misc_feature (1)..(1474): Ortholog of  Ceres SEQ ID NO 13661082 as cited in SEQ ID NO 60959
aacctttgttcttagcttcgaagctgtctgcatcctcgttcagatgactatttgatttctcagtattttatgtagtgtaactgttacagcactagcccacgaaggcaatcagaacaattgccaagagccccatgtttgctcgtgatccaaggcatcttcaatttgaagctgatgtgaatcgtttgtttctctatacaagctattatcgtctcggggagaatgctgacgagaaggacgctgaggagattattgacttggctagcaaagcttctattgctgatcagcagaaacaagtgcaggataatgttcattatgaacttacgcatatgtgccaagcaatggatagcattttatgtcctgatacaataaacgacccatcaaaaggaccttcagaagcacataatcattctcagcgtagtggcttaagttttgccgttggtggtgctgcatctgcaaacaagcaaagtgcaattatccctgctacacgacctttaactcgagcagaattgtcaaagaaattcagggatcattttgggtacacacttgacatcggaccatctggaattcctcataaagacgcaggtcaaggtttattcttatcaggacaagcaaatgccggtgctgtcctagccatctatcctggtgttatatattcacctgcttactatcgatatatacctggatacccaagaattgatgtttgcaacaactatctaatcacaagatatgatgggacaataattgatgcaaaaccatggtgttttggtggtgaaacaagagcattatgggatggttcagatttggtggattacaatgctatggcacctaaaggctcagagaacaactctgatcgggtgtggagaatgctaagcaagcctctagaaaaaggtgtaagggaaaattttggtgaagtgcttgaacgacgaaatccccttgcttttggtcattttgcaaatcatccacccaaaggttcaagtcctaatgtcatgatctgcccatacgattttcctttgacagagaaggacatgagagtatacatccctaacattacgtttggtggtcaagagaccattaggatgaagaggtttggctccttctatttcaagtctggaggttctgataatcaggctggtgattctctagtactgaagacgctagtgctggtgagcacaaggtccatatgtgatgaagagctctttcttaattaccgttacagtaactcaaaaagacgaccagagtggtacagccctgtcgatgaagaagaggataagaggagatggagctagtttagcacttctgtatcattctggttgtgcatttttttggctaacttttttagttctttcccccctggaaattgcaactgagcattggtaagctcctgagatcgagatgacagttttgacttaattcgtcatttggtattacatactttggtgtcccaattaccatcatgataaaagttaagctactc

SEQ ID NO: 16299 - protein, 384 aa, Zea mays subsp. mays
  peptide (1)..(384): Ceres Seq. ID no. 12353166
MFARDPRHLQFEADVNRLFLYTSYYRLGENADEKDAEEIIDLASKASIADQQKQVQDNVHYELTHMCQAMDSILCPDTINDPSKGPSEAHNHSQRSGLSFAVGGAASANKQSAIIPATRPLTRAELSKKFRDHFGYTLDIGPSGIPHKDAGQGLFLSGQANAGAVLAIYPGVIYSPAYYRYIPGYPRIDVCNNYLITRYDGTIIDAKPWCFGGETRALWDGSDLVDYNAMAPKGSENNSDRVWRMLSKPLEKGVRENFGEVLERRNPLAFGHFANHPPKGSSPNVMICPYDFPLTEKDMRVYIPNITFGGQETIRMKRFGSFYFKSGGSDNQAGDSLVLKTLVLVSTRSICDEELFLNYRYSNSKRRPEWYSPVDEEEDKRRWS

SEQ ID NO: 16300 - protein, 319 aa, Zea mays subsp. mays
  peptide (1)..(319): Ceres Seq. ID no. 12353167
MCQAMDSILCPDTINDPSKGPSEAHNHSQRSGLSFAVGGAASANKQSAIIPATRPLTRAELSKKFRDHFGYTLDIGPSGIPHKDAGQGLFLSGQANAGAVLAIYPGVIYSPAYYRYIPGYPRIDVCNNYLITRYDGTIIDAKPWCFGGETRALWDGSDLVDYNAMAPKGSENNSDRVWRMLSKPLEKGVRENFGEVLERRNPLAFGHFANHPPKGSSPNVMICPYDFPLTEKDMRVYIPNITFGGQETIRMKRFGSFYFKSGGSDNQAGDSLVLKTLVLVSTRSICDEELFLNYRYSNSKRRPEWYSPVDEEEDKRRWS

SEQ ID NO: 16301 - protein, 315 aa, Zea mays subsp. mays
  peptide (1)..(315): Ceres Seq. ID no. 12353168
MDSILCPDTINDPSKGPSEAHNHSQRSGLSFAVGGAASANKQSAIIPATRPLTRAELSKKFRDHFGYTLDIGPSGIPHKDAGQGLFLSGQANAGAVLAIYPGVIYSPAYYRYIPGYPRIDVCNNYLITRYDGTIIDAKPWCFGGETRALWDGSDLVDYNAMAPKGSENNSDRVWRMLSKPLEKGVRENFGEVLERRNPLAFGHFANHPPKGSSPNVMICPYDFPLTEKDMRVYIPNITFGGQETIRMKRFGSFYFKSGGSDNQAGDSLVLKTLVLVSTRSICDEELFLNYRYSNSKRRPEWYSPVDEEEDKRRWS

SEQ ID NO: 16302 - DNA, 1681 bp, Zea mays subsp. mays
  misc_feature (1)..(1681): Ceres Seq. ID no. 12353169
  misc_feature (1)..(1681): Ortholog of  Ceres SEQ ID NO 13523550 as cited in SEQ ID NO 58816
aaaccccgtcccaacccccactacggccttccccccatggctcccctggcctcccttcctctcccgcccagtactgccgtcaccgctcgcttcctcgccgcccccgccatccgcgtgatcagcccatcgcggcccgcgctgccgctcctctcatccgcctccgcaggcggcttccctcacgcctctcgcgctccctgcagtgccgcccgcgagcaccgccgcggcaccgtgcgggaatgctctcgagctgatgctgctggagcagctccattatcaaagacactgttagacctcaaggattcctgctggagatttttaaggccacatacaatccgaggaactgctttaggatccatagcattggttgcgagagccttgatagagaattcccatctgataaactggtggttgatattcaaagcattctatggacttggggcattgatatttggcaatggttacatagttgggattaatcagatctatgatgttgctattgacaagataaacaagccatatttacccattgctgctggtgatctctcaattcagtcagcatggttgttggtgatattatttgcagctgcaggtttttcaattgttatatcaaactttggacctttcattacctctctatactgccttggcctatttcttggcactatatattctgttcctccattcagactgaagagatatccggttgctgcttttcttatcattgcaacggttcgtggtttccttctcaactttggcgtgtactatgctactagggctgcactaggtcttacattccaatggagctcccctgttgctttcattacatgcttcgtgacactatttgctttggtcattgctataaccaaagatctccctgatgttgaaggagatcgcaagtatcaaatatcaactttggcaacaaagcttggtgtcagaaatattgcattccttggatctggtttattattagcaaactatattgctgctattgctgtagcttttaccatgcctcaggctttcaggtgcactgtaatggttcctgtgcatgctgtccttgctggtggtttaattttccagacatgggttctggagcaagcgaagtacagaaaggatgctatttcgcagtactatcggttcatctggaatctcttctatgctgaatatatcttcttcccgttaatatagagagatcttgtagttcatcttgatcttgggctacagcctaattcatggtgaaaagagggagaagttggcaaagtgaggtctgtcgtgcatattttcaacggaaacaatggagtagcaatattgctatgctagggttctgaagttgtaggagcttttctaagcttttacgatgttgaaggcgttgttggagctgtggaagctgttttccttttttttccttttgtatcaacagtgtcgcgttctgtacggtcttacttggaagtgctttgacctttgagcacatgggttgaagcttgagatctggtcccgaacaggtggcggtggaacggccaagacaagcttgtttcatgccactcgaggtcgaggctaaaccactacggcgtgctcttccatgaaacgcagaaaactagggaaatgactatatatatggtgcaatacgttgtatattttctgagtttcagctcgtatatatagtaggaacctcaacttttacctc

SEQ ID NO: 16303 - protein, 394 aa, Zea mays subsp. mays
  peptide (1)..(394): Ceres Seq. ID no. 12353170
KPRPNPHYGLPPMAPLASLPLPPSTAVTARFLAAPAIRVISPSRPALPLLSSASAGGFPHASRAPCSAAREHRRGTVRECSRADAAGAAPLSKTLLDLKDSCWRFLRPHTIRGTALGSIALVARALIENSHLINWWLIFKAFYGLGALIFGNGYIVGINQIYDVAIDKINKPYLPIAAGDLSIQSAWLLVILFAAAGFSIVISNFGPFITSLYCLGLFLGTIYSVPPFRLKRYPVAAFLIIATVRGFLLNFGVYYATRAALGLTFQWSSPVAFITCFVTLFALVIAITKDLPDVEGDRKYQISTLATKLGVRNIAFLGSGLLLANYIAAIAVAFTMPQAFRCTVMVPVHAVLAGGLIFQTWVLEQAKYRKDAISQYYRFIWNLFYAEYIFFPLI

SEQ ID NO: 16304 - protein, 382 aa, Zea mays subsp. mays; identical to SEQ ID NO: 11986
  peptide (1)..(382): Ceres Seq. ID no. 12353171

SEQ ID NO: 16305 - DNA, 1539 bp, Zea mays subsp. mays
  misc_feature (1)..(1539): Ceres Seq. ID no. 12352768
  misc_feature (1)..(1539): Ortholog of  Ceres SEQ ID NO 15175957 as cited in SEQ ID NO 20615
  misc_feature (1)..(1539): Ortholog of  Ceres SEQ ID NO 14301490 as cited in SEQ ID NO 66234
ataccggatgtgcagcgcagggtcaacttcgtcaggtttcttggctccaacaaccttcctgggtcactctaaattgtaaagagatggggtgtggcccatcgatccccgacaagtacacgataggtgggaaggggcgcaagcgccggagcgtcatacaggaggttgccgtgttcgtgcccaccatccgcatcccagtggcctctgacatagctcatccactcaggggaatagtttccaaggatcttgtcgaccgactctccacactccgtgcccatgtcgcctcgctggctgaagaaatctatcacgcggacgtatcagctgttcaggaactgcagcatgcgttagaggagtacttgccagttgttcttggtttaacaacgaaatagagccgtcttgaatcgtcagtacagttcagatggaagaccttagacgacgaccaggagtgttgtctggcgagcgcgtggtatgaggtgctctcggtggtccacatgatggccatgcttgcgttgtttcaggctaacctattgctcatcccaaagagcagccaaggtggtggtgaaaggaaggtagcagaagacgcaaagaaggatgtcgtcgattcgttgctccgggcgtcgggatgcttagactactccgtgcatcgcatacttgttcagatacctgcgcaagtcaagaagagttttcccagttacttgcaggagggcatgcttgaggccatctcaattcaggcattggctcagtgtgtggaaatacagcttggcttggcttctgaatgtgagaaggcaacgctgtcagtaaagaggaggctagcttgtgagcaagtcagctatttttctcaggctcactattgtctgtcgggatgcgatacaagtgactcgtacgggaagaagcttctgctgttcctcaagtggaagtggatggaggccaaggctgtagcgtattactaccatggtctggtgctcgacaagggcggcgaaccggcaaaccatatcagtgcagtctgctgcctctctgcagctgatgacctgctctcagacagcaaaagggcttgcttgagtttttgcttggcaaatcctgtcacgagggtgcctcctccttggggtgtcatgaaaaacatgcacaaaaagatcccagatgtcgcttacaagaagttccaagcgcacgggcatctgtttgagcaaaacaagaacagcgcactccaatccgttcctgacctaccagagtttgcgctgtcgctgagaccggatggatacgagttgccaatcactgattcgatctgggagaatgttgatggccaacctcagattcagagcctcaaggagcatatgatagatgacgaagatgaagtaggcacaaaatgatagttctcacttccaaatgcttcttttcattgtaccaccaaaagtagcagagttcaaaaacgcttaatccaaaatgttttggattcagcaaatggctcaactgaaaaaggaatcgcgatctctgtattattgcaagtattaccatatggtatagtaaagtcttatgtgtaatagaatc

SEQ ID NO: 16306 - protein, 290 aa, Zea mays subsp. mays
  peptide (1)..(290): Ceres Seq. ID no. 12352769
MMAMLALFQANLLLIPKSSQGGGERKVAEDAKKDVVDSLLRASGCLDYSVHRILVQIPAQVKKSFPSYLQEGMLEAISIQALAQCVEIQLGLASECEKATLSVKRRLACEQVSYFSQAHYCLSGCDTSDSYGKKLLLFLKWKWMEAKAVAYYYHGLVLDKGGEPANHISAVCCLSAADDLLSDSKRACLSFCLANPVTRVPPPWGVMKNMHKKIPDVAYKKFQAHGHLFEQNKNSALQSVPDLPEFALSLRPDGYELPITDSIWENVDGQPQIQSLKEHMIDDEDEVGTK

SEQ ID NO: 16307 - protein, 289 aa, Zea mays subsp. mays
  peptide (1)..(289): Ceres Seq. ID no. 12352770
MAMLALFQANLLLIPKSSQGGGERKVAEDAKKDVVDSLLRASGCLDYSVHRILVQIPAQVKKSFPSYLQEGMLEAISIQALAQCVEIQLGLASECEKATLSVKRRLACEQVSYFSQAHYCLSGCDTSDSYGKKLLLFLKWKWMEAKAVAYYYHGLVLDKGGEPANHISAVCCLSAADDLLSDSKRACLSFCLANPVTRVPPPWGVMKNMHKKIPDVAYKKFQAHGHLFEQNKNSALQSVPDLPEFALSLRPDGYELPITDSIWENVDGQPQIQSLKEHMIDDEDEVGTK

SEQ ID NO: 16308 - protein, 287 aa, Zea mays subsp. mays
  peptide (1)..(287): Ceres Seq. ID no. 12352771
MLALFQANLLLIPKSSQGGGERKVAEDAKKDVVDSLLRASGCLDYSVHRILVQIPAQVKKSFPSYLQEGMLEAISIQALAQCVEIQLGLASECEKATLSVKRRLACEQVSYFSQAHYCLSGCDTSDSYGKKLLLFLKWKWMEAKAVAYYYHGLVLDKGGEPANHISAVCCLSAADDLLSDSKRACLSFCLANPVTRVPPPWGVMKNMHKKIPDVAYKKFQAHGHLFEQNKNSALQSVPDLPEFALSLRPDGYELPITDSIWENVDGQPQIQSLKEHMIDDEDEVGTK

SEQ ID NO: 16309 - DNA, 1761 bp, Zea mays subsp. mays
  misc_feature (1)..(1761): Ceres Seq. ID no. 12362401
  misc_feature (1)..(1761): Ortholog of  Ceres SEQ ID NO 13586110 as cited in SEQ ID NO 656
gcgtcgcttccagatccagcgggcggaggagggggtgcggtgcggccgtgaccatgaagcagccgaggggccggcaggagccgcgccgggtgggcaacgccgccatggtcgtcaccatggtcgtctccctctgcgtcctcacgtacatcaaggcgcgatactgctccaaccctttccccaaggcggtggcggaggtggaggtggacgaggactacgacagcacgcggtacaagctgacgggccccgtgggcgaggaggacttcgacccgtcccgccccacctgctacaacaccagcaagcggtcggagcggtgcgccgccgtgggcgacatccgcgtggacggcaaccactcgcggatctacatcagcccgctgtcccgcgagtggcggaccaagccgtacgcgcggcggcacgacgccgtggccatggacgacgtgcgcgagttcacgctggtccccttcggcggccccaacgacacggccgtgccgccgctctgcacgcgcacccactccgtcccgggcttcctcttctccagcggcgggttcgcgggcaacctgtaccacgactacgccgacgtgctggtgccgctcttcgccagcaccaaccacctgggcggggaggtccagttcctgctggccgacatcaaggactggtgggccgacaagttccgcccggtcttccgccagctctcccgctacgacgtcatcgacgtgaacaacgaccgcgaggtgcactgcttcccgcggaccatcatcggctccaccttccaccgcgccatgggcatcgacccctcgcgctcgcccggcggcgtcacggtggccgacttcaagcgcctgctccgccgcgcgttccggctggagcgcgccgtcgcgtcgcggtcgggggcgccccggcgccgggaccggccccgcctcctcatcatctcgcgcaagagctcgcgccgcttcgtcaacgagcgcgccatggcgcgcgccgcggcggccgcccggttcgacgtgcggatcgccgagcccgacaaccacacggacatgcccaacttcgcgaggctggtgaactcggcggacgtgatgatgggcgtgcacggcgccgggctcaccaacatggtgttcctgcccagccgcgccgtgctggtgcaggtggtgccgttcggcgggctggagtggctcacccgcgtcaccttcaaggaccccgcaagggacatggacgtcacgtacatggagtacaacgtgtcgctggaggagagctcgctcagggacctctacccggaggaccacttctacctgaagcacccctacgacgtgcacaagaaggggtgggacgccatcaagacggtgtacctggacaagcagaacgtcaggctcaacctcactaggttcaccaggacgctggagcaggcgcgagatctcttgccgacgccatgactgatgatgaccccccctctttcctctgctctgctgcaggtttcattcacttcagatcagctgctcacctcacttcacgccgtgtctctcttttttttttctgttgttgttctatacatatacttgtttcctcttctcctttcccctctctctctagtctctccctctccactcttgtggcggcaagattcatttctttcattgttttgtttttttgttgttgttgaggaaggataggaacaaaaacaaggtattgtcgtgtccaaggttaatctacacaaacacacactgtaaatgatcgattgattgctgtcagtagaggcgaacacaaggaataggt

SEQ ID NO: 16310 - protein, 472 aa, Zea mays subsp. mays
  peptide (1)..(472): Ceres Seq. ID no. 12362402
VASRSSGRRRGCGAAVTMKQPRGRQEPRRVGNAAMVVTMVVSLCVLTYIKARYCSNPFPKAVAEVEVDEDYDSTRYKLTGPVGEEDFDPSRPTCYNTSKRSERCAAVGDIRVDGNHSRIYISPLSREWRTKPYARRHDAVAMDDVREFTLVPFGGPNDTAVPPLCTRTHSVPGFLFSSGGFAGNLYHDYADVLVPLFASTNHLGGEVQFLLADIKDWWADKFRPVFRQLSRYDVIDVNNDREVHCFPRTIIGSTFHRAMGIDPSRSPGGVTVADFKRLLRRAFRLERAVASRSGAPRRRDRPRLLIISRKSSRRFVNERAMARAAAAARFDVRIAEPDNHTDMPNFARLVNSADVMMGVHGAGLTNMVFLPSRAVLVQVVPFGGLEWLTRVTFKDPARDMDVTYMEYNVSLEESSLRDLYPEDHFYLKHPYDVHKKGWDAIKTVYLDKQNVRLNLTRFTRTLEQARDLLPTP

SEQ ID NO: 16311 - protein, 456 aa, Zea mays subsp. mays
  peptide (1)..(456): Ceres Seq. ID no. 12362403
RRFQIQRAEEGVRCGRDHEAAEGPAGAAPGGQRRHGRHHGRLPLRPHVHQGAILLQPFPQGGGGGGGGRGLRQHAVQADGPRGRGGLRPVPPHLLQHQQAVGAVRRRGRHPRGRQPLADLHQPAVPRVADQAVRAAARRRGHGRRARVHAGPLRRPQRHGRAAALHAHPLRPGLPLLQRRVRGQPVPRLRRRAGAALRQHQPPGRGGPVPAGRHQGLVGRQVPPGLPPALPLRRHRREQRPRGALLPADHHRLHLPPRHGHRPLALARRRHGGRLQAPAPPRVPAGARRRVAVGGAPAPGPAPPPHHLAQELAPLRQRARHGARRGGRPVRRADRRARQPHGHAQLREAGELGGRDDGRARRRAHQHGVPAQPRRAGAGGAVRRAGVAHPRHLQGPRKGHGRHVHGVQRVAGGELAQGPLPGGPLLPEAPLRRAQEGVGRHQDGVPGQAERQAQPH

SEQ ID NO: 16312 - protein, 455 aa, Zea mays subsp. mays
  peptide (1)..(455): Ceres Seq. ID no. 12362404
MKQPRGRQEPRRVGNAAMVVTMVVSLCVLTYIKARYCSNPFPKAVAEVEVDEDYDSTRYKLTGPVGEEDFDPSRPTCYNTSKRSERCAAVGDIRVDGNHSRIYISPLSREWRTKPYARRHDAVAMDDVREFTLVPFGGPNDTAVPPLCTRTHSVPGFLFSSGGFAGNLYHDYADVLVPLFASTNHLGGEVQFLLADIKDWWADKFRPVFRQLSRYDVIDVNNDREVHCFPRTIIGSTFHRAMGIDPSRSPGGVTVADFKRLLRRAFRLERAVASRSGAPRRRDRPRLLIISRKSSRRFVNERAMARAAAAARFDVRIAEPDNHTDMPNFARLVNSADVMMGVHGAGLTNMVFLPSRAVLVQVVPFGGLEWLTRVTFKDPARDMDVTYMEYNVSLEESSLRDLYPEDHFYLKHPYDVHKKGWDAIKTVYLDKQNVRLNLTRFTRTLEQARDLLPTP

SEQ ID NO: 16313 - DNA, 1314 bp, Zea mays subsp. mays
  misc_feature (1)..(1314): Ceres Seq. ID no. 12358866
  misc_feature (1)..(1314): Ortholog of  Ceres SEQ ID NO 13661015 as cited in SEQ ID NO 60921
  misc_feature (1)..(1314): Ortholog of  Ceres SEQ ID NO 13596131 as cited in SEQ ID NO 67838
acctcacacaaacacataccgaatccagccccgcacccaccgttgcgcccgccgcccgagtcgccgtggccaccgcggcagcgccctcccggcggtgagcgcggcccagcgcgcgcgccgcggccaccgccgcgctcgaggcgcccagatctgggccctagcaccccctccctcctataggcctttccccgctgcatcgccatggcgcggcgactgctgtggtggacagcgctgctcctcccttccctcctcgccggcgttggtcccgccgccgccgccgccgccgcatccccgccccacgatgcgtgcctggtgcctaccatcgcggaatccgtccttaggactcccgacacgtgctcgacgctggatcgccgccttggcgacccggtcggcgtcatcgagggagatgaggtgacgttggcaagggcagttaatcttctacacgcaaacaaggatgactacattgccgtacttttctatgcctcgtggtgcccattctcacaggaatgcaaaccgaattttgagacactggcttacttattcccagctatccggcattttgcatttgaggaatctgcaattaggccaagcataatttcgagatacggcatccatggtttcccaacactctttctcttgaactcgaccatgagagtacgatatcatggaccaaggactgttaaatcacttgcagctttctacactgatgtctcaggtatcaatgcatcggtgaagtcaactgcaggggaggccatggtacatcccttggatgatattgagcataaaaaggacgctgaacaggaaaattgcccattctggtgggctcggtcaccagagaatatacttcagcaggatacttatctagcattggcgaccgtatttgtaattttgaggttgctgtatcgtatttttccaaagatagattcctttaccagatgggcatggaggaggcacaatatgtttgcaaaattgatgggagcacatgaatatttcctcacctaccttgagcaagcaagacagaagtttcataggctatacccttcaagttcaaagcgaggaaatctgcaggagggcgcaatgaacgctaccgcttgggcttccaaatcattagcatcagtttcaattggagaaccaagtgcaattggaaggacaaactctacaagtgagctaagatgaaatctgatcttttttgtccccagggattatatgtacagtacagtagagcgatcaggatatgaacacccagaaactgttgtaacggctatattactctttgtatcctccttagaataaatacatccatgatttggctcc

SEQ ID NO: 16314 - protein, 324 aa, Zea mays subsp. mays
  peptide (1)..(324): Ceres Seq. ID no. 12358867
MARRLLWWTALLLPSLLAGVGPAAAAAAASPPHDACLVPTIAESVLRTPDTCSTLDRRLGDPVGVIEGDEVTLARAVNLLHANKDDYIAVLFYASWCPFSQECKPNFETLAYLFPAIRHFAFEESAIRPSIISRYGIHGFPTLFLLNSTMRVRYHGPRTVKSLAAFYTDVSGINASVKSTAGEAMVHPLDDIEHKKDAEQENCPFWWARSPENILQQDTYLALATVFVILRLLYRIFPKIDSFTRWAWRRHNMFAKLMGAHEYFLTYLEQARQKFHRLYPSSSKRGNLQEGAMNATAWASKSLASVSIGEPSAIGRTNSTSELR

SEQ ID NO: 16315 - protein, 175 aa, Zea mays subsp. mays
  peptide (1)..(175): Ceres Seq. ID no. 12358868
MRVRYHGPRTVKSLAAFYTDVSGINASVKSTAGEAMVHPLDDIEHKKDAEQENCPFWWARSPENILQQDTYLALATVFVILRLLYRIFPKIDSFTRWAWRRHNMFAKLMGAHEYFLTYLEQARQKFHRLYPSSSKRGNLQEGAMNATAWASKSLASVSIGEPSAIGRTNSTSELR

SEQ ID NO: 16316 - DNA, 1637 bp, Zea mays subsp. mays
  misc_feature (1)..(1637): Ceres Seq. ID no. 12349722
  misc_feature (1)..(1637): Ortholog of  Ceres SEQ ID NO 15176911 as cited in SEQ ID NO 54868
  misc_feature (1)..(1637): Ortholog of  Ceres SEQ ID NO 13596433 as cited in SEQ ID NO 68721
  misc_feature (1)..(1637): Ortholog of  Ceres SEQ ID NO 13599169 as cited in SEQ ID NO 0
aaggtcaccaaccacgcacccgcctccgcctgcccgctctcccgccatgaagcagctccacaagtcttcccctacccacgcgccatcgccggcgcacgcaccggctcccaaggccgccaagccggcgcgccctgggccgcgctcctggatcggctacgtcctccgcgagcagcgcctcctcttcgtcctgctcggtgcgctcatcgcctccaccttcttcctcctccggccctacctctcgctctccccgtcttcccacctccccgacgcccgcccgctcttctccttcgccacccgctccggtgttcccgccggcttccgcccgccgcagcgccgcgtcgtcgtaacaggcggggcagggttcgtcggcagccatctcgtcgaccggcttctggagcagggggacagcgtgatcgtggtcgacaacttcttcaccggcaggaaggagaacgtcgcgcaccacctccggaaccccaggttcgagctgctccgccacgatgtagtcgagccaatcctcctcgaggtggaccggatctaccacctcgcgtgccccgcgtcgcctgtgcactacaagtacaacccaatcaagacgatcaagacaaatgtcatgggaactttgaatatgttgggtctggcgaagcgaattggtgcaaggtttttgttgactagcacaagtgaagtttatggtgatccgcttgagcatccacagaaggagtcatactgggggcacgttaatcctataggtgttaggagctgttacgatgaggggaagagaacagcagagactttaactatggactatcatcgtggtggtggtgttgaggtgcgtattgcccgtattttcaatacatatggtcctcgtatgtgcctcgacgatggtcgtgtggtcagcaattttgttgcacaggcactgcgaaggcaaccgatgacagtctatggtgacggaaaacaaactcgaagtttccaatatgttgctgatctggttgctggactgatggctctaatggagagtgatcatattggtcctttcaacttgggaaacccaggagagtttaccatgttggagctagcacaggttgtgaaggaaacaattgacccaatggcaaccattgaattcaaacccaacacagctgatgatccccatatgagaaagccagatatcaccaaggctaagcaactgctacattgggagccaaaggtctctctcaaagaaggccttccgctaatggttcaagatttccgtcaaaggatctcggatgagtaatcaaagcaattcttttttccccgaatgtgccatgcacgtgtttgtaatcagagcaatcgtatgatactggtgaccggtttgattctgaacgatgctgcaactacagtcaggagctcttcaccaactggaggcctggagccctgcagtacgatgtactgtgtacacaacagactgtagaatcacgcaggccccatttggagtgtggggattccatagtatttctacgacatagtactatttctgtgaaatagctgaaaagttcatgggttcgtgtcgatgttttatatatatatcttggtgaggcagaacagaagcaatcaattgttttttgtgcatgtgtgaaattcctgaattgtgggtggtgagagatagg

SEQ ID NO: 16317 - protein, 420 aa, Zea mays subsp. mays
  peptide (1)..(420): Ceres Seq. ID no. 12349723
RSPTTHPPPPARSPAMKQLHKSSPTHAPSPAHAPAPKAAKPARPGPRSWIGYVLREQRLLFVLLGALIASTFFLLRPYLSLSPSSHLPDARPLFSFATRSGVPAGFRPPQRRVVVTGGAGFVGSHLVDRLLEQGDSVIVVDNFFTGRKENVAHHLRNPRFELLRHDVVEPILLEVDRIYHLACPASPVHYKYNPIKTIKTNVMGTLNMLGLAKRIGARFLLTSTSEVYGDPLEHPQKESYWGHVNPIGVRSCYDEGKRTAETLTMDYHRGGGVEVRIARIFNTYGPRMCLDDGRVVSNFVAQALRRQPMTVYGDGKQTRSFQYVADLVAGLMALMESDHIGPFNLGNPGEFTMLELAQVVKETIDPMATIEFKPNTADDPHMRKPDITKAKQLLHWEPKVSLKEGLPLMVQDFRQRISDE

SEQ ID NO: 16318 - protein, 405 aa, Zea mays subsp. mays
  peptide (1)..(405): Ceres Seq. ID no. 12349724
MKQLHKSSPTHAPSPAHAPAPKAAKPARPGPRSWIGYVLREQRLLFVLLGALIASTFFLLRPYLSLSPSSHLPDARPLFSFATRSGVPAGFRPPQRRVVVTGGAGFVGSHLVDRLLEQGDSVIVVDNFFTGRKENVAHHLRNPRFELLRHDVVEPILLEVDRIYHLACPASPVHYKYNPIKTIKTNVMGTLNMLGLAKRIGARFLLTSTSEVYGDPLEHPQKESYWGHVNPIGVRSCYDEGKRTAETLTMDYHRGGGVEVRIARIFNTYGPRMCLDDGRVVSNFVAQALRRQPMTVYGDGKQTRSFQYVADLVAGLMALMESDHIGPFNLGNPGEFTMLELAQVVKETIDPMATIEFKPNTADDPHMRKPDITKAKQLLHWEPKVSLKEGLPLMVQDFRQRISDE

SEQ ID NO: 16319 - protein, 222 aa, Zea mays subsp. mays
  peptide (1)..(222): Ceres Seq. ID no. 12349725
KVTNHAPASACPLSRHEAAPQVFPYPRAIAGARTGSQGRQAGAPWAALLDRLRPPRAAPPLRPARCAHRLHLLPPPALPLALPVFPPPRRPPALLLRHPLRCSRRLPPAAAPRRRNRRGRVRRQPSRRPASGAGGQRDRGRQLLHRQEGERRAPPPEPQVRAAPPRCSRANPPRGGPDLPPRVPRVACALQVQPNQDDQDKCHGNFEYVGSGEANWCKVFVD

SEQ ID NO: 16320 - DNA, 1614 bp, Zea mays subsp. mays
  misc_feature (1)..(1614): Ceres Seq. ID no. 12354523
  misc_feature (1)..(1614): Ortholog of  Ceres SEQ ID NO 15168464 as cited in SEQ ID NO 59187
ctcgcaactcgcgattcccaaatcccgatgcgccctcgcgcctagcccctccgccgccgccgccgccaacatcaccttccctgtcacgggacgggccccccccctccaccgcgtcctatgacgtcgccgacctcgcaccacccggactcctccaccccgcacgcggggatcggcaacggcaacggcggcaaccaccacctccacccgccgtctctgaccccggccgctccccccgcgcaggcgcacgggggcccacaggtgcgtctcatgtgcagcttcggcggccgcatcctgccgcgcccgggggaccgccagctgcgctacgtcggcggggagacccgcatcgtgtccttcccgcgcgccgcggcctccttcgccgccctcgtcgccgcgctcgccaaggccgcgcccgcgctcttcgcgcccggaacgcccaggccgtccctcaagtaccagctgccccaggacgacctcgactccctcatctccgtcacctccgacgacgacgtcgaccacctcgtcgacgagctcgaccgcatccacgatctctccgccaacgtcgcccggccgccacgcctccgcgtcttcctcttcgcgcccgcgcccgcgcccgacgccgccttcggctccgtcctctccggcaccgccggcgacgccgcccccagcgaccagtggttcgtcgacgcgctcaacgcccccgcgcctcaccccatcgagcgcgtccgatccgagtcctcctcgatcgtctccgacgtccccgactacctcttcagcctcgacagcccgtccgacgaccccggccccggcccctcgccggctcgcgccaagtccgacgccgcggagactccgcaccaccacggcgacgacgtgccgccttccgctcgacagataccgcacgtcgcaggaggagcgtcatcgtggcccgccccgccgccgccgtacatggcacagcctatgtactacttccccgtgccgccaccggtccactacctcgaccagtctgcgcagagtggctacatgcctcgcccgatctaccacattgtcggtggcggaggaagcgaggcgcctggcggagatcttcacgcggccggcggagtctacggcgtctcgcaccacatgcaggggttcccgccgatgatgtacgcgccgccgcgcgcggtcatctacaactacaagtcggaggggatgccatcgctgcctccggaaggtggggcacactcttcctaggcgcatcggctacttcacatctctgaatcctgattattgttgcagatgcctaagctaaggagttttgcgtggtaatttttttatcgattcgtctaagtcttgttcgttgttttgtatagatggaggggttgatggtgatggatagatattaatgcagctttcgtctagtggaaatatattcgtgaaatgtatatcatactaaatagtatagtatttggtgtgattaattagtattctagttaatgtaatgtgggattcatataatctaggtggttctggtcttatagaaaccatttttgggcattttatatttacataaactggatgttgggtgaatgttctaagcagtatgtgctgtgttgaacctcaatcacttatgagtggttt

SEQ ID NO: 16321 - protein, 416 aa, Zea mays subsp. mays
  peptide (1)..(416): Ceres Seq. ID no. 12354524
RNSRFPNPDAPSRLAPPPPPPPTSPSLSRDGPPPSTASYDVADLAPPGLLHPARGDRQRQRRQPPPPPAVSDPGRSPRAGARGPTGASHVQLRRPHPAAPGGPPAALRRRGDPHRVLPARRGLLRRPRRRARQGRARALRARNAQAVPQVPAAPGRPRLPHLRHLRRRRRPPRRRARPHPRSLRQRRPAATPPRLPLRARARARRRLRLRPLRHRRRRRPQRPVVRRRAQRPRASPHRARPIRVLLDRLRRPRLPLQPRQPVRRPRPRPLAGSRQVRRRGDSAPPRRRRAAFRSTDTARRRRSVIVARPAAAVHGTAYVLLPRAATGPLPRPVCAEWLHASPDLPHCRWRRKRGAWRRSSRGRRSLRRLAPHAGVPADDVRAAARGHLQLQVGGDAIAASGRWGTLFLGASATSHL

SEQ ID NO: 16322 - protein, 369 aa, Zea mays subsp. mays
  peptide (1)..(369): Ceres Seq. ID no. 12354525
MTSPTSHHPDSSTPHAGIGNGNGGNHHLHPPSLTPAAPPAQAHGGPQVRLMCSFGGRILPRPGDRQLRYVGGETRIVSFPRAAASFAALVAALAKAAPALFAPGTPRPSLKYQLPQDDLDSLISVTSDDDVDHLVDELDRIHDLSANVARPPRLRVFLFAPAPAPDAAFGSVLSGTAGDAAPSDQWFVDALNAPAPHPIERVRSESSSIVSDVPDYLFSLDSPSDDPGPGPSPARAKSDAAETPHHHGDDVPPSARQIPHVAGGASSWPAPPPPYMAQPMYYFPVPPPVHYLDQSAQSGYMPRPIYHIVGGGGSEAPGGDLHAAGGVYGVSHHMQGFPPMMYAPPRAVIYNYKSEGMPSLPPEGGAHSS

SEQ ID NO: 16323 - protein, 319 aa, Zea mays subsp. mays
  peptide (1)..(319): Ceres Seq. ID no. 12354526
MCSFGGRILPRPGDRQLRYVGGETRIVSFPRAAASFAALVAALAKAAPALFAPGTPRPSLKYQLPQDDLDSLISVTSDDDVDHLVDELDRIHDLSANVARPPRLRVFLFAPAPAPDAAFGSVLSGTAGDAAPSDQWFVDALNAPAPHPIERVRSESSSIVSDVPDYLFSLDSPSDDPGPGPSPARAKSDAAETPHHHGDDVPPSARQIPHVAGGASSWPAPPPPYMAQPMYYFPVPPPVHYLDQSAQSGYMPRPIYHIVGGGGSEAPGGDLHAAGGVYGVSHHMQGFPPMMYAPPRAVIYNYKSEGMPSLPPEGGAHSS

SEQ ID NO: 16324 - DNA, 1602 bp, Zea mays subsp. mays
  misc_feature (1)..(1602): Ceres Seq. ID no. 12381160
  misc_feature (1)..(1602): Ortholog of  Ceres SEQ ID NO 14315063 as cited in SEQ ID NO 52256
  misc_feature (1)..(1602): Ortholog of  Ceres SEQ ID NO 14310736 as cited in SEQ ID NO 52901
  misc_feature (1)..(1602): Ortholog of  Ceres SEQ ID NO 15172325 as cited in SEQ ID NO 54668
  misc_feature (1)..(1602): Ortholog of  Ceres SEQ ID NO 13594345 as cited in SEQ ID NO 58043
  misc_feature (1)..(1602): Ortholog of  Ceres SEQ ID NO 14308594 as cited in SEQ ID NO 60384
  misc_feature (1)..(1602): Ortholog of  Ceres SEQ ID NO 12614112 as cited in SEQ ID NO 60891
  misc_feature (1)..(1602): Ortholog of  Ceres SEQ ID NO 13662880 as cited in SEQ ID NO 65422
  misc_feature (1)..(1602): Ortholog of  Ceres SEQ ID NO 12779098 as cited in SEQ ID NO 67698
  misc_feature (1)..(1602): Ortholog of  Ceres SEQ ID NO 13591190 as cited in SEQ ID NO 68044
  misc_feature (1)..(1602): Ortholog of  Ceres SEQ ID NO 13596089 as cited in SEQ ID NO 68373
gcacgagaccattacctagaacatcctaatcgaaaagatactgatacacggctcagtggctcacccaagccaagaccaagaaccccgggcggacgaaaagatggccgccgatgccgcacgcacgccggcgccgcacgcgctgctgctcccttacccagcgcagggccacgtgatcccgttcatggagctggccgaccgcctcctcgacaggggcttcgccgtcaccttcgtcaacaccgagttcaaccaccgccgcgtcgtcgtggccgccgccggcggccgggcgcccgatggccggctncggctcgttggtgtcgctgacgggatgggcgacggcgaggaccgcgacaacttcgtccgcctcaacgcctgcatgaaggaggccatgccgctgcggctcgacgcgctcctcgacgccgacgacgagcgcctcggcagggtcacgtgcgtcgtggtcgacgtcggcatgtcctgggcgctggacgcggtcaagcggcgtgggctcccggccgccgcactctggcccgcgtcggcggccgtgctcgccgtcctgttcggcgccaagaagctcatacgcgatggcgtcatcgatgacgacggagctccagtgaagctggagaaccactcgttccggctggccgagtcgatgccccccatggacgccgtcttcctggcgtggaactacatgggcaaccgcgacgtcgagcgcatggtcttccactacctgaccaccactgcgtgggccgccgtggctaaggcggacgtcgtcctctgcaacaccttcgaggacctcgagccggacatcttcggcgcccactccccggcggccgcctccatcctcccgatcggcccgctgcgcacctggcagcgccggacgagcgaggcgccggccgggcacttttggcgcgccgacgacgaggcctgcgcgtccttcctggacgcgcagccccgtgggtccgtgacgtacgtggcgttcgggagcctgacggtcatgagccccgcgcagctccaggagctcgcgctggccctgctggcctccgcccgccccttcctgtgggtgttccggccagggctggcggccgagctcccgcccgcgttcacggatctcctgccacgccatgcgaggggcaaggtggtggagtgggcgccgcaggagaaagtgctcgcgcaccctgctgtcggctgcttcctgacgcattgcgggtggaactcgacgctggagggcgtccgccatggcgtgcctttgctttgttggccctactttagcgaccagttcacgaaccaggcatacatttgtgatatctggaaggtggggttaagggtggtgcccgacggtggtgatggcattgtcgccaaggaaaggatcatggagaggttgacgagcctaatgggtgacagtggtgtgaaggaaagggtgaaaagattgaaggaattggcagagaggagcatggggcctgagggcaaatctttgaagaacatcaacgccttcatggaatccatgacgaagtgattgttattgtgttattgttttattttcgggaatgactaccactgatgtccaacgcatgttccaacatccaacaagatcatacaagatatctg

SEQ ID NO: 16325 - protein, 469 aa, Zea mays subsp. mays
  peptide (1)..(469): Ceres Seq. ID no. 12381161
  misc_feature (67)..(67): Xaa is any aa, unknown or other
MAADAARTPAPHALLLPYPAQGHVIPFMELADRLLDRGFAVTFVNTEFNHRRVVVAAAGGRAPDGRXRLVGVADGMGDGEDRDNFVRLNACMKEAMPLRLDALLDADDERLGRVTCVVVDVGMSWALDAVKRRGLPAAALWPASAAVLAVLFGAKKLIRDGVIDDDGAPVKLENHSFRLAESMPPMDAVFLAWNYMGNRDVERMVFHYLTTTAWAAVAKADVVLCNTFEDLEPDIFGAHSPAAASILPIGPLRTWQRRTSEAPAGHFWRADDEACASFLDAQPRGSVTYVAFGSLTVMSPAQLQELALALLASARPFLWVFRPGLAAELPPAFTDLLPRHARGKVVEWAPQEKVLAHPAVGCFLTHCGWNSTLEGVRHGVPLLCWPYFSDQFTNQAYICDIWKVGLRVVPDGGDGIVAKERIMERLTSLMGDSGVKERVKRLKELAERSMGPEGKSLKNINAFMESMTK

SEQ ID NO: 16326 - protein, 442 aa, Zea mays subsp. mays
  peptide (1)..(442): Ceres Seq. ID no. 12381162
  misc_feature (40)..(40): Xaa is any aa, unknown or other
MELADRLLDRGFAVTFVNTEFNHRRVVVAAAGGRAPDGRXRLVGVADGMGDGEDRDNFVRLNACMKEAMPLRLDALLDADDERLGRVTCVVVDVGMSWALDAVKRRGLPAAALWPASAAVLAVLFGAKKLIRDGVIDDDGAPVKLENHSFRLAESMPPMDAVFLAWNYMGNRDVERMVFHYLTTTAWAAVAKADVVLCNTFEDLEPDIFGAHSPAAASILPIGPLRTWQRRTSEAPAGHFWRADDEACASFLDAQPRGSVTYVAFGSLTVMSPAQLQELALALLASARPFLWVFRPGLAAELPPAFTDLLPRHARGKVVEWAPQEKVLAHPAVGCFLTHCGWNSTLEGVRHGVPLLCWPYFSDQFTNQAYICDIWKVGLRVVPDGGDGIVAKERIMERLTSLMGDSGVKERVKRLKELAERSMGPEGKSLKNINAFMESMTK

SEQ ID NO: 16327 - protein, 394 aa, Zea mays subsp. mays
  peptide (1)..(394): Ceres Seq. ID no. 12381163
MGDGEDRDNFVRLNACMKEAMPLRLDALLDADDERLGRVTCVVVDVGMSWALDAVKRRGLPAAALWPASAAVLAVLFGAKKLIRDGVIDDDGAPVKLENHSFRLAESMPPMDAVFLAWNYMGNRDVERMVFHYLTTTAWAAVAKADVVLCNTFEDLEPDIFGAHSPAAASILPIGPLRTWQRRTSEAPAGHFWRADDEACASFLDAQPRGSVTYVAFGSLTVMSPAQLQELALALLASARPFLWVFRPGLAAELPPAFTDLLPRHARGKVVEWAPQEKVLAHPAVGCFLTHCGWNSTLEGVRHGVPLLCWPYFSDQFTNQAYICDIWKVGLRVVPDGGDGIVAKERIMERLTSLMGDSGVKERVKRLKELAERSMGPEGKSLKNINAFMESMTK

SEQ ID NO: 16328 - DNA, 1282 bp, Zea mays subsp. mays
  misc_feature (1)..(1282): Ceres Seq. ID no. 12352776
  misc_feature (1)..(1282): Ortholog of  Ceres SEQ ID NO 13595509 as cited in SEQ ID NO 59833
acccagacgggtcctggttcctccccctccaagccggctctgaaatttgaggcccatagccccgtcggcccccatcgccacgccgccggccacgccccagacgaccccgcccgccgccgccgcctcccgctccctccgcgcgcagccctcgtccggccgcccgggtccgagcccgctcgctcctcctccccacgttggacagtttaagtgtggcttcattgcatgagtagttgcagttagcgtggcttttctccgtgcttgctcctggtcgtgctttgccttgcaaaggaaggaatcatgacatctgttgttcacagtgtttcaggtgaccacagggctgaggatcaaaatcaacagaagaagcaagctgaacctggggaccagcaagaagccccagttactagttcagatagccaaccaacagtaggcacaccatcaacagattatgtggcaccctatgcccctcatgacatgagccatgcaatgggtcaatacgcttatccaaatattgacccatactatggaagcctttatgcagcagcttacggtggacagccattgatgcatccaccgttagttggaatgcatccggctggcttacctttgcctaccgatgcaattgaagagcctgtgtatgtaaatgcaaagcaatacaatgccatattaagacggcgtcaatctcgggctaaagctgaatcagaacgaaagcttatcaaggggcgtaagccctatctccatgagtcacgtcatcagcatgccttgaaaagggccaggggagctggaggtcggtttctcaactcaaagtcagatgacaaggaagagaactccgactcgagtcacaaagagaatcagaacggagttgcgccccacaggagcggccaaccgtcaacccctccgtctcccaacggtgcatcgtcagctaatcagggcaggcagtcgtgaatgatgattcaaaactcacagctgaagagatttcagcccctgagctagatatggcagcagttttgtacagaaaacgctagtgggcagcagcaacatggtgtcgatcggtcggtgggtcggttgttgtaggacatgttccatagaaaaagcatagacgagtctacaggttttggagccttggtttggtcctctgtgtattcacctttctgtacaatcttagtagcgttgtgtaccttcccctggaaggatagcttcagttagcgcttcagaaagtcaagtgtgtagcatattggcttattgtttgctttgcttggacaatggagatttgggagtggagttc

SEQ ID NO: 16329 - protein, 214 aa, Zea mays subsp. mays
  peptide (1)..(214): Ceres Seq. ID no. 12352777
MTSVVHSVSGDHRAEDQNQQKKQAEPGDQQEAPVTSSDSQPTVGTPSTDYVAPYAPHDMSHAMGQYAYPNIDPYYGSLYAAAYGGQPLMHPPLVGMHPAGLPLPTDAIEEPVYVNAKQYNAILRRRQSRAKAESERKLIKGRKPYLHESRHQHALKRARGAGGRFLNSKSDDKEENSDSSHKENQNGVAPHRSGQPSTPPSPNGASSANQGRQS

SEQ ID NO: 16330 - protein, 156 aa, Zea mays subsp. mays
  peptide (1)..(156): Ceres Seq. ID no. 12352778
MSHAMGQYAYPNIDPYYGSLYAAAYGGQPLMHPPLVGMHPAGLPLPTDAIEEPVYVNAKQYNAILRRRQSRAKAESERKLIKGRKPYLHESRHQHALKRARGAGGRFLNSKSDDKEENSDSSHKENQNGVAPHRSGQPSTPPSPNGASSANQGRQS

SEQ ID NO: 16331 - protein, 152 aa, Zea mays subsp. mays
  peptide (1)..(152): Ceres Seq. ID no. 12352779
MGQYAYPNIDPYYGSLYAAAYGGQPLMHPPLVGMHPAGLPLPTDAIEEPVYVNAKQYNAILRRRQSRAKAESERKLIKGRKPYLHESRHQHALKRARGAGGRFLNSKSDDKEENSDSSHKENQNGVAPHRSGQPSTPPSPNGASSANQGRQS

SEQ ID NO: 16332 - DNA, 1680 bp, Zea mays subsp. mays
  misc_feature (1)..(1680): Ceres Seq. ID no. 12360613
  misc_feature (1)..(1680): Ortholog of  Ceres SEQ ID NO 15177320 as cited in SEQ ID NO 52645
  misc_feature (1)..(1680): Ortholog of  Ceres SEQ ID NO 15171359 as cited in SEQ ID NO 57279
  misc_feature (1)..(1680): Ortholog of  Ceres SEQ ID NO 14313840 as cited in SEQ ID NO 59568
  misc_feature (1)..(1680): Ortholog of  Ceres SEQ ID NO 15168502 as cited in SEQ ID NO 60095
  misc_feature (1)..(1680): Ortholog of  Ceres SEQ ID NO 15169466 as cited in SEQ ID NO 66135
  misc_feature (1)..(1680): Ortholog of  Ceres SEQ ID NO 14303091 as cited in SEQ ID NO 66369
aaggcctccactcattcctgcccccgacactcccactgccaccagtcctctcaccgccaggcgccagccacagcggcacaatgcagccgcctactacccttctcccgctaggcgccgtcgtggtcgccatcctcctgctcgccaccgccccgagccccgccgtctcccgccaccgccactcgtccgccgcggacacggagacgctcgatgtagccgcctcgctctcccgcgcccgcgccgcgctctccaccgacgccgtctcgctgcaccagtccgcggccgccgccgccgccggggcgaagcgctccccgcgagcgcgggagggcggcctcacgttgcggctccactcccgggacttcctgcccgaggagcaggggcggcacgagacgtaccgctcgctcctgctctcccgcctccgccgcgactcggcgcgcgccgcggcggtgtcggcccgcgcgacgctggcggcggacgccgtgacccggctggacctgcgccccgcgaacgggtcggcggtgttcgcggcgtccgcggcgatccagggccccgtggtgtccggcgtcgggcagggcagcggcgagtacttctcccgcgtgggcatcggcagccccgcgcggcagctgtacatggtgctggacaccggcagcgacgtcacctgggtgcagtgccagccctgcgccgactgctaccagcagtccgacccggtgttcgacccgtccctctccgcctcctacgccgccgtctcctgcgactcccagcgctgccgggacctggacaccgcggcgtgccgcaacgccacgggcgcctgcctctacgaggtggcctacggcgacggctcctacaccgttgggcgacttcgccaccgagacgctcacgctgggggactccaccccggtcggcaacgtcgccatcgggtgcggccacgacaacgagggccttttcgtcggcgccgcggggctgctggcgctgggcggcgggccgctctccttcccgtcccagatctccgcgtccaccttctnctactgcctcgtggaccgcgactccccggccgcgtccacgctccagttcggcgacggcgccgccgaggcgggcaccgtgacggcgcctctcgtgcgcagcccgcgcacgagcaccttctactacgtggcgctgtcgggcatctcggtgggcgggcagccgctgtccatcccggcatccgccttcgccatggacgccacgtcgggctcgggcggcgtcatcgtggactccggcaccaccgtgacgcggctccagtccgccgcctacgcggcgctccgcgacgccttcgtccagggcgcgccgtcgctgccccggacctccggggtgtcgctgttcgacacgtgctacgacctgtcggaccggacgagcgtggaggtgcccgcggtgtcgctgcggttcgagggcggcggcgcgctgcggctgccggcgaagaactacctgatccccgtggacggagccggcacctactgcctggccttcgcgccgacgaacgcggccgtgtccatcatcgggaacgtgcagcagcagggcacccgcgtcagcttcgacaccgccaggggcgccgtcggcttcacccccaacaagtgctagcctagcctagcctaagcctgccttctggccctgttagccacggttgtcagtagtaatgacaagccggtgttt

SEQ ID NO: 16333 - protein, 536 aa, Zea mays subsp. mays
  peptide (1)..(536): Ceres Seq. ID no. 12360614
  misc_feature (339)..(339): Xaa is any aa, unknown or other
GLHSFLPPTLPLPPVLSPPGASHSGTMQPPTTLLPLGAVVVAILLLATAPSPAVSRHRHSSAADTETLDVAASLSRARAALSTDAVSLHQSAAAAAAGAKRSPRAREGGLTLRLHSRDFLPEEQGRHETYRSLLLSRLRRDSARAAAVSARATLAADAVTRLDLRPANGSAVFAASAAIQGPVVSGVGQGSGEYFSRVGIGSPARQLYMVLDTGSDVTWVQCQPCADCYQQSDPVFDPSLSASYAAVSCDSQRCRDLDTAACRNATGACLYEVAYGDGSYTVGRLRHRDAHAGGLHPGRQRRHRVRPRQRGPFRRRRGAAGAGRRAALLPVPDLRVHLXLLPRGPRLPGRVHAPVRRRRRRGGHRDGASRAQPAHEHLLLRGAVGHLGGRAAAVHPGIRLRHGRHVGLGRRHRGLRHHRDAAPVRRLRGAPRRLRPGRAVAAPDLRGVAVRHVLRPVGPDERGGARGVAAVRGRRRAAAAGEELPDPRGRSRHLLPGLRADERGRVHHRERAAAGHPRQLRHRQGRRRLHPQQVLA

SEQ ID NO: 16334 - protein, 510 aa, Zea mays subsp. mays
  peptide (1)..(510): Ceres Seq. ID no. 12360615
  misc_feature (313)..(313): Xaa is any aa, unknown or other
MQPPTTLLPLGAVVVAILLLATAPSPAVSRHRHSSAADTETLDVAASLSRARAALSTDAVSLHQSAAAAAAGAKRSPRAREGGLTLRLHSRDFLPEEQGRHETYRSLLLSRLRRDSARAAAVSARATLAADAVTRLDLRPANGSAVFAASAAIQGPVVSGVGQGSGEYFSRVGIGSPARQLYMVLDTGSDVTWVQCQPCADCYQQSDPVFDPSLSASYAAVSCDSQRCRDLDTAACRNATGACLYEVAYGDGSYTVGRLRHRDAHAGGLHPGRQRRHRVRPRQRGPFRRRRGAAGAGRRAALLPVPDLRVHLXLLPRGPRLPGRVHAPVRRRRRRGGHRDGASRAQPAHEHLLLRGAVGHLGGRAAAVHPGIRLRHGRHVGLGRRHRGLRHHRDAAPVRRLRGAPRRLRPGRAVAAPDLRGVAVRHVLRPVGPDERGGARGVAAVRGRRRAAAAGEELPDPRGRSRHLLPGLRADERGRVHHRERAAAGHPRQLRHRQGRRRLHPQQVLA

SEQ ID NO: 16335 - protein, 365 aa, Zea mays subsp. mays
  peptide (1)..(365): Ceres Seq. ID no. 12360616
  misc_feature (340)..(340): Xaa is any aa, unknown or other
RPPLIPAPDTPTATSPLTARRQPQRHNAAAYYPSPARRRRGRHPPARHRPEPRRLPPPPLVRRGHGDARCSRLALPRPRRALHRRRLAAPVRGRRRRRGEALPASAGGRPHVAAPLPGLPARGAGAARDVPLAPALPPPPRLGARRGGVGPRDAGGGRRDPAGPAPRERVGGVRGVRGDPGPRGVRRRAGQRRVLLPRGHRQPRAAAVHGAGHRQRRHLGAVPALRRLLPAVRPGVRPVPLRLLRRRLLRLPALPGPGHRGVPQRHGRLPLRGGLRRRLLHRWATSPPRRSRWGTPPRSATSPSGAATTTRAFSSAPRGCWRWAAGRSPSRPRSPRPPSXTASWTATPRPRPRSSSATAPPRRAP

SEQ ID NO: 16336 - DNA, 1590 bp, Zea mays subsp. mays
  misc_feature (1)..(1590): Ceres Seq. ID no. 12367781
  misc_feature (1)..(1590): Ortholog of  Ceres SEQ ID NO 13660024 as cited in SEQ ID NO 67241
agctttctaagtccagtctcccgggcagaagaggcacgagaggaaggtgggaaaggaaaccacagccgcttctggcgggcgctcaccgtgccccttccgcctcgcctcgcaatggaggtttccaggtggaccccggcggccggcctcctgctcctgttgctcctcccgctcgcggccaccccgtcacgcgccgccacgatggcgagatcgccgtcgtcgtccaccgccgtgttccagctccagggagacgtataccccaccggccactactatgtcacgatgaacattgggaacccagcgaagccctacttcctggacgtggacactggcagcgatctcacctggctgcagtgcgacgcaccctgtcggagttgcaacaaggtgccacatcccttgtatcgaccaacggcaaaccgccttgtaccgtgtgcaaacgcactctgcactgcacttcacagcggacagggctctaataacaagtgcccttcaccaaaacaatgcgactatcagataaagtacaccgacagtgcatcttctcagggtgtgctgatcaacgacagcttctcactgcccatgagatcctccaacattcgtcctggcctcacatttggctgtggatatgaccagcaagtggggaaaaatggcgctgtgcaggcagcgattgacggcatgcttgggctcgggaggggatcagttagccttgtttcacagctcaagcagcaagggatcaccaaaaatgtcgtcggccattgcctaagcacgaatggaggggggttcctcttctttggggatgatgttgtgccttcatcacgtgtaacttgggtgccgatggctcagaggacatctgggaactactactcacctggctcaggaacactgtacttcgatagacgttcactaggcgtgaagccaatggaggtggtatttgacagtggtagcacgtatacttattttactgctcaaccataccaagctgttgtttctgcgctcaaaggtggtctcagcaaatcacttaaacaggtgtcagatcccactctgcctctgtgctggaaagggcagaaagcattcaaatctgtgtttgacgtcaagaatgaattcaagtcaatgtttctgagcttttccagtgccaagaatgccgccatggagatcccacctgaaaactacctcattgtcacaaaaaatggaaatgtgtgcctgggcattcttgatggaacggctgccaagctgagtttcaacgtaattggagacatcacgatgcaggatcagatggtgatctatgacaacgagaaatcgcagctgggatgggcgcgtggggcatgcactaggagcgccaagtctattctgtcttcctttccctgagctcagttctatgtacttctgatagagtttaagaaaatcactatatcaaacctcctcgcaatgcatgaatttcctaactgaagagggagggagggagggagggagagagagagagagaatgttcctgtttatgtagagatggagtccaaaatttgtgtgcctgatgagttcttccccatatgatattaactgaaatagtatatcaattgagtgtattccattttaagtttc

SEQ ID NO: 16337 - protein, 452 aa, Zea mays subsp. mays
  peptide (1)..(452): Ceres Seq. ID no. 12367782
SFLSPVSRAEEAREEGGKGNHSRFWRALTVPLPPRLAMEVSRWTPAAGLLLLLLLPLAATPSRAATMARSPSSSTAVFQLQGDVYPTGHYYVTMNIGNPAKPYFLDVDTGSDLTWLQCDAPCRSCNKVPHPLYRPTANRLVPCANALCTALHSGQGSNNKCPSPKQCDYQIKYTDSASSQGVLINDSFSLPMRSSNIRPGLTFGCGYDQQVGKNGAVQAAIDGMLGLGRGSVSLVSQLKQQGITKNVVGHCLSTNGGGFLFFGDDVVPSSRVTWVPMAQRTSGNYYSPGSGTLYFDRRSLGVKPMEVVFDSGSTYTYFTAQPYQAVVSALKGGLSKSLKQVSDPTLPLCWKGQKAFKSVFDVKNEFKSMFLSFSSAKNAAMEIPPENYLIVTKNGNVCLGILDGTAAKLSFNVIGDITMQDQMVIYDNEKSQLGWARGACTRSAKSILSSFP

SEQ ID NO: 16338 - protein, 415 aa, Zea mays subsp. mays
  peptide (1)..(415): Ceres Seq. ID no. 12367783
MEVSRWTPAAGLLLLLLLPLAATPSRAATMARSPSSSTAVFQLQGDVYPTGHYYVTMNIGNPAKPYFLDVDTGSDLTWLQCDAPCRSCNKVPHPLYRPTANRLVPCANALCTALHSGQGSNNKCPSPKQCDYQIKYTDSASSQGVLINDSFSLPMRSSNIRPGLTFGCGYDQQVGKNGAVQAAIDGMLGLGRGSVSLVSQLKQQGITKNVVGHCLSTNGGGFLFFGDDVVPSSRVTWVPMAQRTSGNYYSPGSGTLYFDRRSLGVKPMEVVFDSGSTYTYFTAQPYQAVVSALKGGLSKSLKQVSDPTLPLCWKGQKAFKSVFDVKNEFKSMFLSFSSAKNAAMEIPPENYLIVTKNGNVCLGILDGTAAKLSFNVIGDITMQDQMVIYDNEKSQLGWARGACTRSAKSILSSFP

SEQ ID NO: 16339 - protein, 386 aa, Zea mays subsp. mays
  peptide (1)..(386): Ceres Seq. ID no. 12367784
MARSPSSSTAVFQLQGDVYPTGHYYVTMNIGNPAKPYFLDVDTGSDLTWLQCDAPCRSCNKVPHPLYRPTANRLVPCANALCTALHSGQGSNNKCPSPKQCDYQIKYTDSASSQGVLINDSFSLPMRSSNIRPGLTFGCGYDQQVGKNGAVQAAIDGMLGLGRGSVSLVSQLKQQGITKNVVGHCLSTNGGGFLFFGDDVVPSSRVTWVPMAQRTSGNYYSPGSGTLYFDRRSLGVKPMEVVFDSGSTYTYFTAQPYQAVVSALKGGLSKSLKQVSDPTLPLCWKGQKAFKSVFDVKNEFKSMFLSFSSAKNAAMEIPPENYLIVTKNGNVCLGILDGTAAKLSFNVIGDITMQDQMVIYDNEKSQLGWARGACTRSAKSILSSFP

SEQ ID NO: 16340 - DNA, 1050 bp, Zea mays subsp. mays
  misc_feature (1)..(1050): Ceres Seq. ID no. 12361897
  misc_feature (1)..(1050): Ortholog of  Ceres SEQ ID NO 14315234 as cited in SEQ ID NO 52501
gacatttatggcaaaagagaggtcatacagaagctaagacagcacctcaagaaacgtgatgagatgatcatggagatgcaaactcagattgctgatcttaagaactctcttaacattcaggtgacacagtccagcaatctgcagtctcaattggatgctgccaatcgtgatctgtttgaatctgaacgagagattcagcatctaaggaagattattgcagatcattgtgtcacagaagcactctctcatgataaacctttgcaagctgcgcattggcagccagatgccgcaaatgggcattctaatggctatggtgatggttgtgttgatgatgctgacctgcattgtattagcatcgagaagaggaaggtagaagtagagagggtggagatgctcaagaaagaggtggttgaactgaaggaagtcattgagggaaaggactttgtgcttcagagctacaaggaacagaaggtggaactcttctcaaagatcagggagttgcaggaaaagctctcagcacaagtgccaatcatcttgtaggatctatctgtgatactttttagaagattgaatctaagcataatgttgccatgtcccatgagcagcagagggggtcccgcttcagtgaagattgcagaaggtcttggcatttggcaatcgtcacgcatgccaaacaccatgctaggatctttgtggaatgcttctcttttcctttgaggggagctttgcataatgttaggttgatttgtttctttcttggttgtcataatgttaggttggtttgctttcttccttcttcaatatctagcccttggttgctcaaagtttacaaagggattctttttttcagttgctaggcctcaggtaactcaattgaacttcatactcaagttgctgtacaggttctcagatttcaggagacacagaagtctgtactgtgcctctgcctcctgtttcatgcttttttttttgttaagtgatctttggaatgttaggtccatgacatttctactatgagatttgaagactatggcattgcccttttttgtg

SEQ ID NO: 16341 - protein, 179 aa, Zea mays subsp. mays
  peptide (1)..(179): Ceres Seq. ID no. 12361898
DIYGKREVIQKLRQHLKKRDEMIMEMQTQIADLKNSLNIQVTQSSNLQSQLDAANRDLFESEREIQHLRKIIADHCVTEALSHDKPLQAAHWQPDAANGHSNGYGDGCVDDADLHCISIEKRKVEVERVEMLKKEVVELKEVIEGKDFVLQSYKEQKVELFSKIRELQEKLSAQVPIIL

SEQ ID NO: 16342 - protein, 158 aa, Zea mays subsp. mays
  peptide (1)..(158): Ceres Seq. ID no. 12361899
MIMEMQTQIADLKNSLNIQVTQSSNLQSQLDAANRDLFESEREIQHLRKIIADHCVTEALSHDKPLQAAHWQPDAANGHSNGYGDGCVDDADLHCISIEKRKVEVERVEMLKKEVVELKEVIEGKDFVLQSYKEQKVELFSKIRELQEKLSAQVPIIL

SEQ ID NO: 16343 - protein, 156 aa, Zea mays subsp. mays
  peptide (1)..(156): Ceres Seq. ID no. 12361900
MEMQTQIADLKNSLNIQVTQSSNLQSQLDAANRDLFESEREIQHLRKIIADHCVTEALSHDKPLQAAHWQPDAANGHSNGYGDGCVDDADLHCISIEKRKVEVERVEMLKKEVVELKEVIEGKDFVLQSYKEQKVELFSKIRELQEKLSAQVPIIL

SEQ ID NO: 16344 - DNA, 916 bp, Zea mays subsp. mays
  misc_feature (1)..(916): Ceres Seq. ID no. 12382210
  misc_feature (1)..(916): Ortholog of  Ceres SEQ ID NO 13624427 as cited in SEQ ID NO 0
  misc_feature (1)..(916): Ortholog of  Ceres SEQ ID NO 14305939 as cited in SEQ ID NO 0
aacacagcacgcaagcacacacaacaaccacacttgcaccgagctagcagccaagatggcgaccaaacacttggctctttgcctccttgttctccttagcataggcatgggcatggccaccgctgctgcaaaccgcaaactgggttatggccccgggggaggaggtggcggtggtggtagcggtggaggcggtggttacggaggaccaggctatgggtccggatcagggtatggtgagggcggtggcagcggaggtgctgctggagggtatggacatggtggcggcggcggtggcggtggtggtgagggcgcgggagctggtggctctgggtacgggtccgggcaaggatctggctacggagctggcagcggtgctgccggtggatatgggagtggcggaggtggtggaggtggaggtggcggtggccagggtggtggttccggatatggccatggaggtggtgaaggatacggctctgggtctggctttggtggtggtgctgctggcggcggcggtgnacatggtgncggtggtggcgncggccaaggtgggtctggctatggctctggctctggctctggctcgggatatggatcaggtgaaggatacggacaaggtggtgctcatggaggaggctatgnaagcggtggtgncggtgnaggtgncggtggtcaaggtggtggtggctctggctatgggtctggatccggctccggttatggaggtggcaacgacaacggacattactaggctctttttcagagctaggaacatgttatacaaatatgtcaccagacatgagtaggtcttgctgcatgggatgctagttgtgtccatcgtgtgtgtaacaccgcaaggcttgtaatttgtcctgtaaactgcttgctgctttacattactggcaacaactaagtg

SEQ ID NO: 16345 - protein, 249 aa, Zea mays subsp. mays
  peptide (1)..(249): Ceres Seq. ID no. 12382211
  misc_feature (173)..(173): Xaa is any aa, unknown or other
  misc_feature (176)..(176): Xaa is any aa, unknown or other
  misc_feature (180)..(180): Xaa is any aa, unknown or other
  misc_feature (214)..(214): Xaa is any aa, unknown or other
  misc_feature (218)..(218): Xaa is any aa, unknown or other
  misc_feature (220)..(220): Xaa is any aa, unknown or other
  misc_feature (222)..(222): Xaa is any aa, unknown or other
TQHASTHNNHTCTELAAKMATKHLALCLLVLLSIGMGMATAAANRKLGYGPGGGGGGGGSGGGGGYGGPGYGSGSGYGEGGGSGGAAGGYGHGGGGGGGGGEGAGAGGSGYGSGQGSGYGAGSGAAGGYGSGGGGGGGGGGGQGGGSGYGHGGGEGYGSGSGFGGGAAGGGGXHGXGGGXGQGGSGYGSGSGSGSGYGSGEGYGQGGAHGGGYXSGGXGXGXGGQGGGGSGYGSGSGSGYGGGNDNGHY

SEQ ID NO: 16346 - protein, 231 aa, Zea mays subsp. mays
  peptide (1)..(231): Ceres Seq. ID no. 12382212
  misc_feature (155)..(155): Xaa is any aa, unknown or other
  misc_feature (158)..(158): Xaa is any aa, unknown or other
  misc_feature (162)..(162): Xaa is any aa, unknown or other
  misc_feature (196)..(196): Xaa is any aa, unknown or other
  misc_feature (200)..(200): Xaa is any aa, unknown or other
  misc_feature (202)..(202): Xaa is any aa, unknown or other
  misc_feature (204)..(204): Xaa is any aa, unknown or other
MATKHLALCLLVLLSIGMGMATAAANRKLGYGPGGGGGGGGSGGGGGYGGPGYGSGSGYGEGGGSGGAAGGYGHGGGGGGGGGEGAGAGGSGYGSGQGSGYGAGSGAAGGYGSGGGGGGGGGGGQGGGSGYGHGGGEGYGSGSGFGGGAAGGGGXHGXGGGXGQGGSGYGSGSGSGSGYGSGEGYGQGGAHGGGYXSGGXGXGXGGQGGGGSGYGSGSGSGYGGGNDNGHY

SEQ ID NO: 16347 - protein, 219 aa, Zea mays subsp. mays
  peptide (1)..(219): Ceres Seq. ID no. 12382213
  misc_feature (125)..(125): Xaa is any aa, unknown or other
  misc_feature (128)..(128): Xaa is any aa, unknown or other
  misc_feature (132)..(132): Xaa is any aa, unknown or other
  misc_feature (166)..(166): Xaa is any aa, unknown or other
  misc_feature (170)..(170): Xaa is any aa, unknown or other
  misc_feature (172)..(172): Xaa is any aa, unknown or other
  misc_feature (174)..(174): Xaa is any aa, unknown or other
MAPGEEVAVVVAVEAVVTEDQAMGPDQGMVRAVAAEVLLEGMDMVAAAVAVVVRARELVALGTGPGKDLATELAAVLPVDMGVAEVVEVEVAVARVVVPDMAMEVVKDTALGLALVVVLLAAAVXMVXVVAXAKVGLAMALALALARDMDQVKDTDKVVLMEEAMXAVVXVXVXVVKVVVALAMGLDPAPVMEVATTTDITRLFFRARNMLYKYVTRHE

SEQ ID NO: 16348 - DNA, 1622 bp, Zea mays subsp. mays
  misc_feature (1)..(1622): Ceres Seq. ID no. 12381158
  misc_feature (1)..(1622): Ortholog of  Ceres SEQ ID NO 13597751 as cited in SEQ ID NO 60721
gcacgagaccattacctagaacatcctaatcgaaaaaaaacccaccaccacaaggaagggaagcgtatcagtatcaccagttcaccatcctcggatccttcgccttaatcgcccgcgtcagccatctcacgtaccggtcctccagtttcctcccatctttcacacacaccacgccacgacccggccccggggtataaaagcactagggcgaagccgcgcaacgactcgatcggctgcagccagggctcgcctcgggggaccgcgtgttgctagcgagctcggtgtcggtgctaccggctgccgccccagtgcgaggcgatggggaggaggctggacgtgctgctggggcggacgacgaagcagacggcgcggctcaagtcgctgctggggctggcggcgacgcgcctcggcgtggtgcggggccaccgccaggtgcggtgcgggcaggcgcgcggggacgtcgagcagctgctccgcctcggccacgcggaccgcgcgctggcccgcgccgagcacgtcgtgcgggagcagaacgcgctcgacgtcctcgccgagctcgaggcctgctgcaacctcatcgccgagcgggccgcgctcgtcgaccacgcgcacaggggggagtgccccgaggagctgcgggaggcggcggcggggctggtatacgccgcggccaggtgcggggaccttccggagctgcaagaggtccgggccatcctcgccgccaagttcggcagggagttcgtctccgccgcgtccaacctccgcagcgggtgcggggtcaaccccaagatcgtgcagaagctgtcgaccaagcagccgagcctggagagccgacagctggtgctacaggagatcgccgccgacaaagggatcgccgtgcgcatctacgagccgcctcctccctacgaggactcggggagctccaaccacagccataggaagacggagcacgatggcgagaggatcagtaggacgccaccagttgatggccgcgacgaagacatctccggccactcggcgcagaggtacaaggacgtggaagcggcagctcaggccgcgttcgagtcggccgcctcggcagccgccgccgcgaaggcggccatggagctctcgcgtggggagcccagggggcccggtgacaggaggagggcagggaggacgcaaatggatgatcctgagatcgagaaacaagatgaggtgcttcatggaaacaaacccgagaagattgggcatggccggaattacagttcagatgttgagatcacgccggaggacgacgaggcaaaccacggcaacgttgcagtggacgaaccgaaacagcgggagcctgccaggggaaagccggcatcggtcagaacaaagtggggattttagcggcatccagatcgcaacggaggagatggtttcttcgtcttgtcaatatattggcatggaagttgttttttttcactgtagtagtatgtaattaacgacggttaccaaaaaaacacatgagcgatttgatttattgccaacagtttgcacactagtacactatgcctgtactaatgctatgttctgttaatgtgtagcgttaattgtagtacatgttctttggaggaaaaatattgatgttgcaatcc

SEQ ID NO: 16349 - protein, 351 aa, Zea mays subsp. mays
  peptide (1)..(351): Ceres Seq. ID no. 12381159
MGRRLDVLLGRTTKQTARLKSLLGLAATRLGVVRGHRQVRCGQARGDVEQLLRLGHADRALARAEHVVREQNALDVLAELEACCNLIAERAALVDHAHRGECPEELREAAAGLVYAAARCGDLPELQEVRAILAAKFGREFVSAASNLRSGCGVNPKIVQKLSTKQPSLESRQLVLQEIAADKGIAVRIYEPPPPYEDSGSSNHSHRKTEHDGERISRTPPVDGRDEDISGHSAQRYKDVEAAAQAAFESAASAAAAAKAAMELSRGEPRGPGDRRRAGRTQMDDPEIEKQDEVLHGNKPEKIGHGRNYSSDVEITPEDDEANHGNVAVDEPKQREPARGKPASVRTKWGF

SEQ ID NO: 16350 - DNA, 1224 bp, Zea mays subsp. mays
  misc_feature (1)..(1224): Ceres Seq. ID no. 12406219
  misc_feature (1)..(1224): Ortholog of  Ceres SEQ ID NO 13664061 as cited in SEQ ID NO 67339
gttcgcgttgcccgcgactctctccgtcctcctactctcacacgcttggcgcgcgcgtgcttccacacgtccgtcgcctcgcctggctgattggtttgggacctggctccagcaatggcggtgcaggcgcattatcaccaccaccaccaccaccaccaccgcgagtcccctttcctcgtcagcggcggcgcgccggagggcagccggttggcggcggcgatggagctgcatcaggcgcagaaggaggctactacggcgcagcagcacgctccgcccgacttctcgcatggaggttgcggcggcgggaagaagcggcagcgcgaggcggaccccgtgtcccggcagctcttgtcgttgcagcagcagcaaccacaggcgcagggggcccaagttcatcaacctggcgcaactgcacaagcggccggcgaacgggcctccggctcgacttggacgagggctcggagcacgtgccgtgcacgtcctcggcctcggcgtcgtgtctcctcctctccgaagagctcgccgcgcagcgcgaccagcacaaggacgagatggaacggctgatccaggagcacgcggagaggctccggcgcgcgctggccgacacccggcggcggcactaccgttcgctcgtcggcgcggccgaggcggctgctgctcggcggataagggagaaggagtcggaggcctgggaggccgcgcggcgccgcgccgacctggaggatcgggtcgcgcggctgagggcggaggcggcggcgtggcaggcaaaggagctcgcggaccagtccacggccgcggcgctccacgcgcagctgcagcaggcgaggggcaaggccaccgacgccgaggaagggggcaacgcggcggacgacgccgggtcgtgcttcgtcgacccggacagggtggtggagatcgccccgccgccggccaggccgtgccgggcgtgcaggcggcggtcggcctccgtcgtgctgctcccttgccgccacctctgcgtctgcgccgagtgcgagcccgccgtccccgccgccccctttgccgccgcagctgtcgccgctgcctgccccgtgtgccgtggcgcggtcaccggcacggtgcaagtgttcgtctcgtagcgggagggaaaggttaaaaaaaatggtgctcctgccaaaaggaatggcaggtgaaaatggggaatgaacgatggcaaattgtgtagtggagtggagcgcattacttttt

SEQ ID NO: 16351 - protein, 376 aa, Zea mays subsp. mays
  peptide (1)..(376): Ceres Seq. ID no. 12406220
FALPATLSVLLLSHAWRARASTRPSPRLADWFGTWLQQWRCRRIITTTTTTTTASPLSSSAAARRRAAGWRRRWSCIRRRRRLLRRSSTLRPTSRMEVAAAGRSGSARRTPCPGSSCRCSSSNHRRRGPKFINLAQLHKRPANGPPARLGRGLGARAVHVLGLGVVSPPLRRARRAARPAQGRDGTADPGARGEAPARAGRHPAAALPFARRRGRGGCCSADKGEGVGGLGGRAAPRRPGGSGRAAEGGGGGVAGKGARGPVHGRGAPRAAAAGEGQGHRRRGRGQRGGRRRVVLRRPGQGGGDRPAAGQAVPGVQAAVGLRRAAPLPPPLRLRRVRARRPRRPLCRRSCRRCLPRVPWRGHRHGASVRLVAGGKG

SEQ ID NO: 16352 - protein, 370 aa, Zea mays subsp. mays
  peptide (1)..(370): Ceres Seq. ID no. 12406221
SRCPRLSPSSYSHTLGARVLPHVRRLAWLIGLGPGSSNGGAGALSPPPPPPPPRVPFPRQRRRAGGQPVGGGDGAASGAEGGYYGAAARSARLLAWRLRRREEAAARGGPRVPAALVVAAAATTGAGGPSSSTWRNCTSGRRTGLRLDLDEGSEHVPCTSSASASCLLLSEELAAQRDQHKDEMERLIQEHAERLRRALADTRRRHYRSLVGAAEAAAARRIREKESEAWEAARRRADLEDRVARLRAEAAAWQAKELADQSTAAALHAQLQQARGKATDAEEGGNAADDAGSCFVDPDRVVEIAPPPARPCRACRRRSASVVLLPCRHLCVCAECEPAVPAAPFAAAAVAAACPVCRGAVTGTVQVFVS

SEQ ID NO: 16353 - protein, 281 aa, Zea mays subsp. mays
  peptide (1)..(281): Ceres Seq. ID no. 12406222
MEVAAAGRSGSARRTPCPGSSCRCSSSNHRRRGPKFINLAQLHKRPANGPPARLGRGLGARAVHVLGLGVVSPPLRRARRAARPAQGRDGTADPGARGEAPARAGRHPAAALPFARRRGRGGCCSADKGEGVGGLGGRAAPRRPGGSGRAAEGGGGGVAGKGARGPVHGRGAPRAAAAGEGQGHRRRGRGQRGGRRRVVLRRPGQGGGDRPAAGQAVPGVQAAVGLRRAAPLPPPLRLRRVRARRPRRPLCRRSCRRCLPRVPWRGHRHGASVRLVAGGKG

SEQ ID NO: 16354 - DNA, 1242 bp, Zea mays subsp. mays
  misc_feature (1)..(1242): Ceres Seq. ID no. 12405303
  misc_feature (1)..(1242): Ortholog of  Ceres SEQ ID NO 12636774 as cited in SEQ ID NO 372
  misc_feature (1)..(1242): Ortholog of  Ceres SEQ ID NO 13582350 as cited in SEQ ID NO 56734
  misc_feature (1)..(1242): Ortholog of  Ceres SEQ ID NO 12476493 as cited in SEQ ID NO 58163
  misc_feature (1)..(1242): Ortholog of  Ceres SEQ ID NO 12582113 as cited in SEQ ID NO 58349
  misc_feature (1)..(1242): Ortholog of  Ceres SEQ ID NO 14310807 as cited in SEQ ID NO 58696
  misc_feature (1)..(1242): Ortholog of  Ceres SEQ ID NO 15175861 as cited in SEQ ID NO 59381
  misc_feature (1)..(1242): Ortholog of  Ceres SEQ ID NO 12615466 as cited in SEQ ID NO 62761
  misc_feature (1)..(1242): Ortholog of  Ceres SEQ ID NO 14314080 as cited in SEQ ID NO 63105
  misc_feature (1)..(1242): Ortholog of  Ceres SEQ ID NO 13597295 as cited in SEQ ID NO 63743
  misc_feature (1)..(1242): Ortholog of  Ceres SEQ ID NO 12617090 as cited in SEQ ID NO 64005
  misc_feature (1)..(1242): Ortholog of  Ceres SEQ ID NO 13597439 as cited in SEQ ID NO 64081
  misc_feature (1)..(1242): Ortholog of  Ceres SEQ ID NO 13597233 as cited in SEQ ID NO 64370
  misc_feature (1)..(1242): Ortholog of  Ceres SEQ ID NO 13598327 as cited in SEQ ID NO 68040
  misc_feature (1)..(1242): Ortholog of  Ceres SEQ ID NO 13599438 as cited in SEQ ID NO 0
aactcccatatggacgccaagccgcgcaacctgggcggctcgctgccggtgcccaacgtgcaggacctggccgcgcgccccggcgacgaactcacgccgcccgtgctaagccgctacctccgcgacgacgtcgacggcgcagacgccaacggcgacgcggcctcctcggtgccggtagttgacctcgcgaggctcctggacccgtcgtcgcacggagacgaggagtccgccaaactgaaggcggcctgcgaggagtggggcttcttccaggtgatcaaccacggggtgcccgacgcggtggtcgcggacgtgaagcagacctgcaggccttcttccgcctcccgctcgccgacaagcgcgcggtggcgcaggagcccggcgggatcgaggggtacgggcaggccttcgtggtctccgaggaccagaagctggactgggccgacatgcttttcctgtccacgcagccgcccgagtaccgggccccgcgcttcttgccggcgcgcccggccacgttcggggactcgctggcgcgctactctgccgaggtgcagcgcgtggccgcccgcctgctggcgtccatggccgcgaacctgggcgtggcggacgccgcgaggctggccagggtcgccgacgcgcaggccgtgcgcgtcaactactacccggcgtgcccgcacggcaggggcagggtgctgggcctgtcgccgcactcggacgccgccggcctcacgctgctgctccaggtcagcgccgtcccggggctgcagatcaggaggcncggcgcgtggatcagcgtcgaccccatccccggagcgctggtggccaacgtcggcgacgtcgtcgaggtgctcaccaacggcaggtacaagagcatcgagcaccgggcgctggttagccccacccaccaccgggtgtccgtcgcagccttccactccgccaggttcggcgacacttacgcgccgcttgaggagacgatggtcgatggtgatgagccagcgaggtacaggagcattggcgtcgaggactacgtccgcctggtgctgtctagtaagctccaaggaaagaacataatggacgccatgaagatcaatccggtcactgaatgaatgagtgaatcagaggatttgggaacaaaagttctgatttgtgtgtgtcgttttgaatcgtctttacatttacaataagagcagcgggcggattgctcttggtcaaacttgaagtaaaccatgaacatgttccgaattg

SEQ ID NO: 16355 - protein, 355 aa, Zea mays subsp. mays
  peptide (1)..(355): Ceres Seq. ID no. 12405304
  misc_feature (259)..(259): Xaa is any aa, unknown or other
NSHMDAKPRNLGGSLPVPNVQDLAARPGDELTPPVLSRYLRDDVDGADANGDAASSVPVVDLARLLDPSSHGDEESAKLKAACEEWGFFQVINHGVPDAVVADVKQTCRPSSASRSPTSARWRRSPAGSRGTGRPSWSPRTRSWTGPTCFSCPRSRPSTGPRASCRRARPRSGTRWRATLPRCSAWPPACWRPWPRTWAWRTPRGWPGSPTRRPCASTTTRRARTAGAGCWACRRTRTPPASRCCSRSAPSRGCRSGGXARGSASTPSPERWWPTSATSSRCSPTAGTRASSTGRWLAPPTTGCPSQPSTPPGSATLTRRLRRRWSMVMSQRGTGALASRTTSAWCCLVSSKERT

SEQ ID NO: 16356 - protein, 352 aa, Zea mays subsp. mays
  peptide (1)..(352): Ceres Seq. ID no. 12405305
  misc_feature (256)..(256): Xaa is any aa, unknown or other
MDAKPRNLGGSLPVPNVQDLAARPGDELTPPVLSRYLRDDVDGADANGDAASSVPVVDLARLLDPSSHGDEESAKLKAACEEWGFFQVINHGVPDAVVADVKQTCRPSSASRSPTSARWRRSPAGSRGTGRPSWSPRTRSWTGPTCFSCPRSRPSTGPRASCRRARPRSGTRWRATLPRCSAWPPACWRPWPRTWAWRTPRGWPGSPTRRPCASTTTRRARTAGAGCWACRRTRTPPASRCCSRSAPSRGCRSGGXARGSASTPSPERWWPTSATSSRCSPTAGTRASSTGRWLAPPTTGCPSQPSTPPGSATLTRRLRRRWSMVMSQRGTGALASRTTSAWCCLVSSKERT

SEQ ID NO: 16357 - protein, 219 aa, Zea mays subsp. mays
  peptide (1)..(219): Ceres Seq. ID no. 12405306
  misc_feature (111)..(111): Xaa is any aa, unknown or other
MLFLSTQPPEYRAPRFLPARPATFGDSLARYSAEVQRVAARLLASMAANLGVADAARLARVADAQAVRVNYYPACPHGRGRVLGLSPHSDAAGLTLLLQVSAVPGLQIRRXGAWISVDPIPGALVANVGDVVEVLTNGRYKSIEHRALVSPTHHRVSVAAFHSARFGDTYAPLEETMVDGDEPARYRSIGVEDYVRLVLSSKLQGKNIMDAMKINPVTE

SEQ ID NO: 16358 - DNA, 1228 bp, Zea mays subsp. mays
  misc_feature (1)..(1228): Ceres Seq. ID no. 12386860
  misc_feature (1)..(1228): Ortholog of  Ceres SEQ ID NO 14301430 as cited in SEQ ID NO 56553
  misc_feature (1)..(1228): Ortholog of  Ceres SEQ ID NO 13639124 as cited in SEQ ID NO 56718
  misc_feature (1)..(1228): Ortholog of  Ceres SEQ ID NO 15175700 as cited in SEQ ID NO 58584
  misc_feature (1)..(1228): Ortholog of  Ceres SEQ ID NO 13596474 as cited in SEQ ID NO 62169
  misc_feature (1)..(1228): Ortholog of  Ceres SEQ ID NO 13596969 as cited in SEQ ID NO 63375
  misc_feature (1)..(1228): Ortholog of  Ceres SEQ ID NO 13584480 as cited in SEQ ID NO 64751
  misc_feature (1)..(1228): Ortholog of  Ceres SEQ ID NO 13597519 as cited in SEQ ID NO 64759
  misc_feature (1)..(1228): Ortholog of  Ceres SEQ ID NO 13597870 as cited in SEQ ID NO 64982
  misc_feature (1)..(1228): Ortholog of  Ceres SEQ ID NO 13656123 as cited in SEQ ID NO 65212
  misc_feature (1)..(1228): Ortholog of  Ceres SEQ ID NO 13662323 as cited in SEQ ID NO 68305
aaatctccatcaccatcgccttcaactcaagcgactacagcaaacttgctgagactgcagctgatcatggggtcgacgacatggttggcggccgtgctggcggcactcgtggtcgccgcctcctcaacggtggcatcacacgcctcgctgccggggaaacttgaggtcggtttctacgagcactcgtgcccacaggcggaggacatcgtgcgcaacgccgtccgccgcggcatagcccgcgagcccggcgtcggcgcggggctcatccgcatgcacttccacgactgcttcgtccggggctgcgacggctccatcctcatcaactccacgccgggcaacaaggccgagaaggactccgtggccaacaaccccagcatgcgcggcttcgacgtcatcgacgacgccaaggccgtcctcgaggcgcactgcccgcgcaccgtctcctgcgctgatatcgtcgcgctcgcggcccgtgacagcacctacctcgccggcggcctggactacaaggtcccgtcgggccgccgtgacggccgcgtgtccaaagaggaggaggtgctcgacaacaatgtccccgccccgactgacgaggtcgacgagctcatcgagagcttcaagcgcaaggggctcaacgccgacgacatggtcacgctctctggcgcgcacaccatcggccgctcccactgctcctccttcacgcagcggctctacaacttcagcgggcagctggggcagacagacccgtccctcgaccccgcctacgccgggcacctcaaggcgcggtgcccttggccgtccagcgacgaccagatggatcccacggtggttccgcttgacccagtcacgccggcgaccttcgacaaccagtactacaagaacgtgctggcgcacaaggtcctgttcatctccgacaacacactgctcgacaacccatggacggccggaatggtccacttcaacgccgcagtcgagaaggcatggcaggtcaagttcgccaaggccatggttaagatgggcaaggtccaggtgctcaccggcgaggagggagagatcagggagaagtgcttcgccgtcaacccacactactagtcaagtttaattatctaattaccccgcgcgtgttatgtttgtttatacgttccatacatcaacattatgtagagtgtttttcgttctcttcaaggctgtgaaatcaaacaagtttatcaagtaaaatggtgttatttgc

SEQ ID NO: 16359 - protein, 362 aa, Zea mays subsp. mays
  peptide (1)..(362): Ceres Seq. ID no. 12386861
KSPSPSPSTQATTANLLRLQLIMGSTTWLAAVLAALVVAASSTVASHASLPGKLEVGFYEHSCPQAEDIVRNAVRRGIAREPGVGAGLIRMHFHDCFVRGCDGSILINSTPGNKAEKDSVANNPSMRGFDVIDDAKAVLEAHCPRTVSCADIVALAARDSTYLAGGLDYKVPSGRRDGRVSKEEEVLDNNVPAPTDEVDELIESFKRKGLNADDMVTLSGAHTIGRSHCSSFTQRLYNFSGQLGQTDPSLDPAYAGHLKARCPWPSSDDQMDPTVVPLDPVTPATFDNQYYKNVLAHKVLFISDNTLLDNPWTAGMVHFNAAVEKAWQVKFAKAMVKMGKVQVLTGEEGEIREKCFAVNPHY

SEQ ID NO: 16360 - protein, 340 aa, Zea mays subsp. mays
  peptide (1)..(340): Ceres Seq. ID no. 12386862
MGSTTWLAAVLAALVVAASSTVASHASLPGKLEVGFYEHSCPQAEDIVRNAVRRGIAREPGVGAGLIRMHFHDCFVRGCDGSILINSTPGNKAEKDSVANNPSMRGFDVIDDAKAVLEAHCPRTVSCADIVALAARDSTYLAGGLDYKVPSGRRDGRVSKEEEVLDNNVPAPTDEVDELIESFKRKGLNADDMVTLSGAHTIGRSHCSSFTQRLYNFSGQLGQTDPSLDPAYAGHLKARCPWPSSDDQMDPTVVPLDPVTPATFDNQYYKNVLAHKVLFISDNTLLDNPWTAGMVHFNAAVEKAWQVKFAKAMVKMGKVQVLTGEEGEIREKCFAVNPHY

SEQ ID NO: 16361 - protein, 272 aa, Zea mays subsp. mays
  peptide (1)..(272): Ceres Seq. ID no. 12386863
MHFHDCFVRGCDGSILINSTPGNKAEKDSVANNPSMRGFDVIDDAKAVLEAHCPRTVSCADIVALAARDSTYLAGGLDYKVPSGRRDGRVSKEEEVLDNNVPAPTDEVDELIESFKRKGLNADDMVTLSGAHTIGRSHCSSFTQRLYNFSGQLGQTDPSLDPAYAGHLKARCPWPSSDDQMDPTVVPLDPVTPATFDNQYYKNVLAHKVLFISDNTLLDNPWTAGMVHFNAAVEKAWQVKFAKAMVKMGKVQVLTGEEGEIREKCFAVNPHY

SEQ ID NO: 16362 - DNA, 1397 bp, Zea mays subsp. mays
  misc_feature (1)..(1397): Ceres Seq. ID no. 12366678
  misc_feature (1)..(1397): Ortholog of  Ceres SEQ ID NO 12583469 as cited in SEQ ID NO 51031
  misc_feature (1)..(1397): Ortholog of  Ceres SEQ ID NO 13597389 as cited in SEQ ID NO 63426
  misc_feature (1)..(1397): Ortholog of  Ceres SEQ ID NO 13595998 as cited in SEQ ID NO 68161
aactcactcatcgtcagtcagtcgtcacagtactcgatcgagcgcgatctgatctctttccgagcaatcatccgttctagcgtagtagagcgcatggacatggcctcgtcctctgcatcagcagctctcctcctggctgtctccctcgccgctctgcacttgtgctgccgccatgggcacggtgccggcgacgccgccggcaacggcatcactgccatctacagcctcggcgactccatcactgacaccgggaacctcgtcaaggaggcgcctccgggcatgttcgagaccatcaagcacctcccctacggcgtcacgttcgggtacccgaccgggcggtgctccgacggcctcctcatgatcgacttcctggctcaggacctgggtctcccgttcctgaacccgtacctgggcaagaacaagagcttcgaccacggcgtcaacttcgccgtcgccggagccaccgccgtggacccggccgaccagttcaacctccccgccgtccccgtgccgttcgcctccaagtccctcaaggtgcagctccggtggttcaaggacttcctcaagtacaccttcggcaccgatgaagagattcgcagacggcttcaagcttctctggttttggtcggggagatcggcgggaacgactacaactacgccttcttccaggccaagcctgtggccgaggtggagaagctcatcccaggggtcgtgaagaccatcgtcggcgccgccaaggaggtgctggacatgggcgccaccagggtcatcgtcccgggcaacttccccatcggctgcgtgccgggctacctggccatgaacgccgcctcgtcggagccggcggactacgactcggcggggtgcctccgggagctcaacgacttcgccgccaagcacaactcgcggctccggcgcgccgtcgccgacctgcaggcgtcgtacccgggcgccgccgtcgcctacgccgactacttcgactccttcctcaccctcctccacaacgcctcctcgttcggtttcgacgccgcgagcacgcgcaaggcctgctgcggcgccggtgccggcgagtacaacttcgactggcggcggatgtgcggcttcccggggacggcggcgtgcgctgacccgtccacgtacctgagctgggacggcatacacatgacgcaggcggcgtacagggccatgtccaggctcatctaccacggcaagtacctgcagccacagatactgagcttcccggagaaaaacgggcagacataaactcacgtcgtcatcatatatagaacttagttagaaaatatactcgaaacaccggctacaaataagctgtcagtagtcagctgtatcggtaagtacatgcgcgctgttcaactaatgctatcatcaagctgtgagcc

SEQ ID NO: 16363 - protein, 419 aa, Zea mays subsp. mays
  peptide (1)..(419): Ceres Seq. ID no. 12366679
NSLIVSQSSQYSIERDLISFRAIIRSSVVERMDMASSSASAALLLAVSLAALHLCCRHGHGAGDAAGNGITAIYSLGDSITDTGNLVKEAPPGMFETIKHLPYGVTFGYPTGRCSDGLLMIDFLAQDLGLPFLNPYLGKNKSFDHGVNFAVAGATAVDPADQFNLPAVPVPFASKSLKVQLRWFKDFLKYTFGTDEEIRRRLQASLVLVGEIGGNDYNYAFFQAKPVAEVEKLIPGVVKTIVGAAKEVLDMGATRVIVPGNFPIGCVPGYLAMNAASSEPADYDSAGCLRELNDFAAKHNSRLRRAVADLQASYPGAAVAYADYFDSFLTLLHNASSFGFDAASTRKACCGAGAGEYNFDWRRMCGFPGTAACADPSTYLSWDGIHMTQAAYRAMSRLIYHGKYLQPQILSFPEKNGQT

SEQ ID NO: 16364 - protein, 388 aa, Zea mays subsp. mays
  peptide (1)..(388): Ceres Seq. ID no. 12366680
MDMASSSASAALLLAVSLAALHLCCRHGHGAGDAAGNGITAIYSLGDSITDTGNLVKEAPPGMFETIKHLPYGVTFGYPTGRCSDGLLMIDFLAQDLGLPFLNPYLGKNKSFDHGVNFAVAGATAVDPADQFNLPAVPVPFASKSLKVQLRWFKDFLKYTFGTDEEIRRRLQASLVLVGEIGGNDYNYAFFQAKPVAEVEKLIPGVVKTIVGAAKEVLDMGATRVIVPGNFPIGCVPGYLAMNAASSEPADYDSAGCLRELNDFAAKHNSRLRRAVADLQASYPGAAVAYADYFDSFLTLLHNASSFGFDAASTRKACCGAGAGEYNFDWRRMCGFPGTAACADPSTYLSWDGIHMTQAAYRAMSRLIYHGKYLQPQILSFPEKNGQT

SEQ ID NO: 16365 - protein, 386 aa, Zea mays subsp. mays
  peptide (1)..(386): Ceres Seq. ID no. 12366681
MASSSASAALLLAVSLAALHLCCRHGHGAGDAAGNGITAIYSLGDSITDTGNLVKEAPPGMFETIKHLPYGVTFGYPTGRCSDGLLMIDFLAQDLGLPFLNPYLGKNKSFDHGVNFAVAGATAVDPADQFNLPAVPVPFASKSLKVQLRWFKDFLKYTFGTDEEIRRRLQASLVLVGEIGGNDYNYAFFQAKPVAEVEKLIPGVVKTIVGAAKEVLDMGATRVIVPGNFPIGCVPGYLAMNAASSEPADYDSAGCLRELNDFAAKHNSRLRRAVADLQASYPGAAVAYADYFDSFLTLLHNASSFGFDAASTRKACCGAGAGEYNFDWRRMCGFPGTAACADPSTYLSWDGIHMTQAAYRAMSRLIYHGKYLQPQILSFPEKNGQT

SEQ ID NO: 16366 - DNA, 1680 bp, Zea mays subsp. mays
  misc_feature (1)..(1680): Ceres Seq. ID no. 12366104
  misc_feature (1)..(1680): Ortholog of  Ceres SEQ ID NO 13661504 as cited in SEQ ID NO 61294
  misc_feature (1)..(1680): Ortholog of  Ceres SEQ ID NO 12615311 as cited in SEQ ID NO 62517
  misc_feature (1)..(1680): Ortholog of  Ceres SEQ ID NO 13596227 as cited in SEQ ID NO 68750
  misc_feature (1)..(1680): Ortholog of  Ceres SEQ ID NO 15179068 as cited in SEQ ID NO 0
atattagtattaatccgggttttttcccctcgaagaaacggaagctcgtttgtaggagtgacttgtaggtagtagcgctcactgcataaaattggattggattggattatgctcttctatactagtagacccagccagagcttatactagcactgtagcatgaacagggaccgggacagctggacagtggcagaggagaggagatgagccgatcctttgctaccttttcctcccttttcaatgaatctccatcttcctcctccctggtcttggctgtttggttcgttccagaggagggctgggacccggacctcttcatactcctctgatgatgatgatccattaatggtacagctcatgtgtggtgtggctgtgacttgtgatgagtgagcgtgccccttcttcctcctccagcctccagctccaggtgcggtgtgaggtcccgctcctgctcctgtcctaccagcgtactactccagtagtacagtggagtagccgagcgcatttaatagctggacaaggtgagaggaggaagctctagccacacacacacagcacagcacagcacagagggaccgcaacggagcagagaactgggccaccaaactgaaccaaccgcgggaaggagaaagggaacccgaacccttttcctccgcgtgcattaaaacccttcacatgggcatgggcatgtcagctgctgccccttcgtcctcgcccctgcttgctggctggctggtctgctctgtcccgtccgtcctactcctacgaggagtcgacggtggagacggaggtgcgcgcggcgcacaacgtgctggaggcgtgcgcgcagacggacgccatggagcgggtcgtcttcacctcctccgtcaccgccgtcgtctggagcggcgccggcgccggcgtcggcgcccacagggaggaggtcgccgacgagaggagctggagcgacctcgccttctgcaggaagttcaagctgtggcacgccctggccaagacgctgtcggagaagacggcgtgggcgctggccatggaccggggcgtcgacatggtggccatcaacgccggcctgctgctgtccgcccccgggcccgggctcgggctcaccgccgcgcacccctacctcaagggcgcccccgacatgtacgacggcggcgtcctcgccaccgtcgacgtcggcttcctggccgacgcgcacgtcgccgcctacgagtcccccaccgcctacggccgctacctctgcttcagcgacgccgtctgccgtcccgaggacgccgtcaagctcgcccagatgctctcgccggccgcgccacgctcgccgccgccaagcgacgaactgaaggtgataccacagaggatccagggcaagaaactgaacaagctcatgctggagttcgccagcggggtatacggggagctggactaggaaggaactgccaggccacagatgatgcgatgcgactagggctgttgtattcttttgtacgtagtactatttgtagttttcgcccccctcacaaaaaaaaggagggaaatctgtttggttggccaaaatgtgccatacgctcgctgtacatggccaaacacgccacgtgtgtagcccctgccagcagcaggggtgggtggggagagcatttcagtgatcggttgccaaagaaataccatatcgtatctaggttcgtg

SEQ ID NO: 16367 - protein, 335 aa, Zea mays subsp. mays
  peptide (1)..(335): Ceres Seq. ID no. 12366105
MGMGMSAAAPSSSPLLAGWLVCSVPSVLLLRGVDGGDGGARGAQRAGGVRADGRHGAGRLHLLRHRRRLERRRRRRRRPQGGGRRREELERPRLLQEVQAVARPGQDAVGEDGVGAGHGPGRRHGGHQRRPAAVRPRARARAHRRAPLPQGRPRHVRRRRPRHRRRRLPGRRARRRLRVPHRLRPLPLLQRRRLPSRGRRQARPDALAGRATLAAAKRRTEGDTTEDPGQETEQAHAGVRQRGIRGAGLGRNCQATDDAMRLGLLYSFVRSTICSFRPPHKKKEGNLFGWPKCAIRSLYMAKHATCVAPASSRGGWGEHFSDRLPKKYHIVSRFV

SEQ ID NO: 16368 - protein, 333 aa, Zea mays subsp. mays
  peptide (1)..(333): Ceres Seq. ID no. 12366106
MGMSAAAPSSSPLLAGWLVCSVPSVLLLRGVDGGDGGARGAQRAGGVRADGRHGAGRLHLLRHRRRLERRRRRRRRPQGGGRRREELERPRLLQEVQAVARPGQDAVGEDGVGAGHGPGRRHGGHQRRPAAVRPRARARAHRRAPLPQGRPRHVRRRRPRHRRRRLPGRRARRRLRVPHRLRPLPLLQRRRLPSRGRRQARPDALAGRATLAAAKRRTEGDTTEDPGQETEQAHAGVRQRGIRGAGLGRNCQATDDAMRLGLLYSFVRSTICSFRPPHKKKEGNLFGWPKCAIRSLYMAKHATCVAPASSRGGWGEHFSDRLPKKYHIVSRFV

SEQ ID NO: 16369 - protein, 331 aa, Zea mays subsp. mays
  peptide (1)..(331): Ceres Seq. ID no. 12366107
MSAAAPSSSPLLAGWLVCSVPSVLLLRGVDGGDGGARGAQRAGGVRADGRHGAGRLHLLRHRRRLERRRRRRRRPQGGGRRREELERPRLLQEVQAVARPGQDAVGEDGVGAGHGPGRRHGGHQRRPAAVRPRARARAHRRAPLPQGRPRHVRRRRPRHRRRRLPGRRARRRLRVPHRLRPLPLLQRRRLPSRGRRQARPDALAGRATLAAAKRRTEGDTTEDPGQETEQAHAGVRQRGIRGAGLGRNCQATDDAMRLGLLYSFVRSTICSFRPPHKKKEGNLFGWPKCAIRSLYMAKHATCVAPASSRGGWGEHFSDRLPKKYHIVSRFV

SEQ ID NO: 16370 - DNA, 1351 bp, Zea mays subsp. mays
  misc_feature (1)..(1351): Ceres Seq. ID no. 12382032
  misc_feature (1)..(1351): Ortholog of  Ceres SEQ ID NO 13638441 as cited in SEQ ID NO 58066
aagccacggcccaatcgccggccgacactcacaagaacctgcctccctctggatcgctatctcttttctagtgcccagggaaagctagctagctcacagctgagctgagggaagaaagcaaggagagggagccagggaggaaggggaaaaacacgcggagagggtgagcaagaaagaaccgaggcggatcgccttctgttcctcctgccggctccgcgagaggaggcactgctcagtcccgtgattcctacaggggggaagaaagaggtggaacaacgccccggggcagagcagagatgatgcgggagacgtacatggacgtgctgccgccggtggaccacatagccgcacggagcaactggttcccggcggcggcgcgtctgtggacggcggcggagaacaagcagttcgagcgggcgctcgccgggctcgacctctgccgcccggactgggaggaggtggcgcgggccatcccccggccggacggtgcgcgaggtcgtcagccacttcaagcacctcgaggtcgacgtccagcagatcgagagcgggcaggtgcccttgccggcctacggcggcggggccagctcgttcaccctgcagtgggacggctacggccccggtccgggggacttcaggcacgggtaccgcttcgccggaggctgcgggaggcggcaccacggccgcacgccggagcaggagcggaagaagggcgtgccatggacggaggaggagcacaggttgttcctcctaggcctgaagaaatacggcaagggtgactggaggaacatttcgcgcaacttcgtccagaccaggacgcccacccaggtggccagccacgcgcagaagtacttcatcaggctcaactccggcggcaaggacaagaggaggtccagcatccacgacatcaccacggtcaacctgacggacgaccagccgccctcgccgtcccagtcctccctaatcaccagccaatcgaacgcaccagctccagctccggccgcggggatatgccaggtcccattggcggccgacgccaagcgacacggtgccggaactctgcccttcagctcaccgaaccggacctctgcggcgccggcctacaggatggagtttcatgaccaacaaggcctgcagtgtggccctctgcatgatcagttgctcgccagccagagcgtcctgttctaggcgcggtggcagcccaccctgcggcatggatcgaccaggtgcctagtgtataatacttgtggtatcgctctagcttcagcgcctgtattgaagggattagccttttgggagcataacagaaaggaggtcttcatttcatggtggtccataatttgttggagaatgc

SEQ ID NO: 16371 - protein, 159 aa, Zea mays subsp. mays
  peptide (1)..(159): Ceres Seq. ID no. 12382033
MMRETYMDVLPPVDHIAARSNWFPAAARLWTAAENKQFERALAGLDLCRPDWEEVARAIPRPDGARGRQPLQAPRGRRPADRERAGALAGLRRRGQLVHPAVGRLRPRSGGLQARVPLRRRLREAAPRPHAGAGAEEGRAMDGGGAQVVPPRPEEIRQG

SEQ ID NO: 16372 - protein, 158 aa, Zea mays subsp. mays
  peptide (1)..(158): Ceres Seq. ID no. 12382034
MRETYMDVLPPVDHIAARSNWFPAAARLWTAAENKQFERALAGLDLCRPDWEEVARAIPRPDGARGRQPLQAPRGRRPADRERAGALAGLRRRGQLVHPAVGRLRPRSGGLQARVPLRRRLREAAPRPHAGAGAEEGRAMDGGGAQVVPPRPEEIRQG

SEQ ID NO: 16373 - protein, 153 aa, Zea mays subsp. mays
  peptide (1)..(153): Ceres Seq. ID no. 12382035
MDVLPPVDHIAARSNWFPAAARLWTAAENKQFERALAGLDLCRPDWEEVARAIPRPDGARGRQPLQAPRGRRPADRERAGALAGLRRRGQLVHPAVGRLRPRSGGLQARVPLRRRLREAAPRPHAGAGAEEGRAMDGGGAQVVPPRPEEIRQG

SEQ ID NO: 16374 - DNA, 1312 bp, Zea mays subsp. mays
  misc_feature (1)..(1312): Ceres Seq. ID no. 12372672
  misc_feature (1)..(1312): Ortholog of  Ceres SEQ ID NO 14305750 as cited in SEQ ID NO 52458
  misc_feature (1)..(1312): Ortholog of  Ceres SEQ ID NO 14314252 as cited in SEQ ID NO 57492
  misc_feature (1)..(1312): Ortholog of  Ceres SEQ ID NO 12608276 as cited in SEQ ID NO 57871
  misc_feature (1)..(1312): Ortholog of  Ceres SEQ ID NO 13598492 as cited in SEQ ID NO 63882
  misc_feature (1)..(1312): Ortholog of  Ceres SEQ ID NO 13657914 as cited in SEQ ID NO 66230
  misc_feature (1)..(1312): Ortholog of  Ceres SEQ ID NO 13622667 as cited in SEQ ID NO 0
aagcagagccaagcctactcttccaatccctgtcagggtggttagtctttgagctggtgggatcatggttgccaagacgaggacgaggcgacagctcgccaagctcgcgctgcttctactcgccctgctgctcctgctcgccgccatcctgctgtgcgtcttcttgatcccgcgccaccacaggaggccgctgccccccgcctcgccgccgggggcggggaacgcctcgaatcccgacgacagcatcgtggcgttcgacttctccccgtacctcatcatgtacaagagcggccgcgtgcaccggctggacggcaccgcccggtgctcggccggcgtggacgaggccacgggggtgacctccaaggacgtcgtgatcgacagcgggaccaggctcgcggcacggatgtacctgccgccggcgccccgcgggacgcaaagcaagggcctcggcaggcggcacccggtgctggtgttctaccacggcggcgcgttcgtcatcgagtcggcgttcacgccgctgtaccacgcctacctgaacggcgtggcggcgaaggcgcgcgtggtggcggtgtccgtggagtaccgcctggcgccggagcaccggctgccgacggcgtacgacgactcgtggcaggcgctcaactgggtggccaggaacgccggatccgggccggagccgtggctgcgggaccggggcaacctgtcccggctgttcgtcgccggggacagcgccggcgccaacatcgcgcacgacatggccatgcgcgcgggcacggggggcgggctggacggcggcgcggccatcgcgggcctcctgctcctggacccctacttctgggggaagaagccggtggccggggagacgacggacccggccaggcggcgccagtacgaggcgacgtggtcgttcatctgcggcgggcggtacggcatcgacgacccgctggtggacccgctgtcgatgccggcgtccgagtggcggaagctggcgtgcctcgcgcgtggcggtgacgtcgtcgggcctcgacgacttccggccgcgcgggctggcgtacgtggcggcgctccgcgacagcgggtgggacggggagacggagcagtacgagacgcccggcgagcggcacgtctacttcttggataggcccaaggaccccaattccgtcaaggagctggccttcgtcaccggattcctgagccgggagtaggtaggtagccatcacggcgagggcgtacagtttaggtgcaatcgtgaggattgcttgctgatcgaggcacgtgaatacgtgattgattaatagagactattatttct

SEQ ID NO: 16375 - protein, 358 aa, Zea mays subsp. mays
  peptide (1)..(358): Ceres Seq. ID no. 12372673
MVAKTRTRRQLAKLALLLLALLLLLAAILLCVFLIPRHHRRPLPPASPPGAGNASNPDDSIVAFDFSPYLIMYKSGRVHRLDGTARCSAGVDEATGVTSKDVVIDSGTRLAARMYLPPAPRGTQSKGLGRRHPVLVFYHGGAFVIESAFTPLYHAYLNGVAAKARVVAVSVEYRLAPEHRLPTAYDDSWQALNWVARNAGSGPEPWLRDRGNLSRLFVAGDSAGANIAHDMAMRAGTGGGLDGGAAIAGLLLLDPYFWGKKPVAGETTDPARRRQYEATWSFICGGRYGIDDPLVDPLSMPASEWRKLACLARGGDVVGPRRLPAARAGVRGGAPRQRVGRGDGAVRDARRAARLLLG

SEQ ID NO: 16376 - protein, 287 aa, Zea mays subsp. mays
  peptide (1)..(287): Ceres Seq. ID no. 12372674
MYKSGRVHRLDGTARCSAGVDEATGVTSKDVVIDSGTRLAARMYLPPAPRGTQSKGLGRRHPVLVFYHGGAFVIESAFTPLYHAYLNGVAAKARVVAVSVEYRLAPEHRLPTAYDDSWQALNWVARNAGSGPEPWLRDRGNLSRLFVAGDSAGANIAHDMAMRAGTGGGLDGGAAIAGLLLLDPYFWGKKPVAGETTDPARRRQYEATWSFICGGRYGIDDPLVDPLSMPASEWRKLACLARGGDVVGPRRLPAARAGVRGGAPRQRVGRGDGAVRDARRAARLLLG

SEQ ID NO: 16377 - protein, 245 aa, Zea mays subsp. mays
  peptide (1)..(245): Ceres Seq. ID no. 12372675
MYLPPAPRGTQSKGLGRRHPVLVFYHGGAFVIESAFTPLYHAYLNGVAAKARVVAVSVEYRLAPEHRLPTAYDDSWQALNWVARNAGSGPEPWLRDRGNLSRLFVAGDSAGANIAHDMAMRAGTGGGLDGGAAIAGLLLLDPYFWGKKPVAGETTDPARRRQYEATWSFICGGRYGIDDPLVDPLSMPASEWRKLACLARGGDVVGPRRLPAARAGVRGGAPRQRVGRGDGAVRDARRAARLLLG

SEQ ID NO: 16378 - DNA, 1667 bp, Zea mays subsp. mays
  misc_feature (1)..(1667): Ceres Seq. ID no. 12363303
  misc_feature (1)..(1667): Ortholog of  Ceres SEQ ID NO 12610323 as cited in SEQ ID NO 56055
acgggagcggacggagaaaattttgaaacgcgggcgaggccgccaccaccgcgccaaatcgagccatccagattccattcgacggccggaagtcagatccgtgcatctataatacttccaggaattctctcctctcccaagacccgcaccgcaccacgcgaaatcaagtcctgcaaaagcctcgcggctacctcacgtggatcggcgacggcgatgacggcgtccttctcttccgtcgccgaggtagcggttcccgctgctgcggcggtgatggcatcagctttgccgcaggagcagcagcaggcgcggccgcggccgcggccgatgcacgctggtggtggtggtggtggcggcggcggcgccaatggccgccaccacgcgtacagccgcaaggacaagtcactcggcctcctctgctccaacttcgtggttctctacaaccgcgacgacgtggagtccatcgggctggacgaagcggccaaatgcctcggcgtggagaggcgccggatctacgacattgtcaacgtgctcgagagcgttggaattcttgtgaggaaagccaagaatcgctacacctggataggtttcggcggagtctcaatatccttgcgagaactcaaggaaagggcgttaagggagaagtctggcttggctcctctgcaaaccgagcagcaatctgctgccacaatttctgaagacgaagatgatgatacattggccaatccgggtgcttatatcgagactgagagattgagtcaaactgtggacaaaccttctggcaaaccgggcgcatccggttgccgccttagatctgatcataggaaggaaaagtcacttgggctgctcacacagaatttcgtgaagctcttcctcaccatggaggttgacacgatctcactcgatgaagctgcaaaactgctccttggagaaggccacgaggagaccaatatgagaactaaagttcggaggttatatgacattgccaatgtcctgtcttcactgaatctaattgagaagatacatcaaggggactcgagaaagcctgcgtttcgttggttgggtagggcaacgctgaacacagaaaatggtgtcacagttgctgtgcccccaccagggaagatcgcatcaaagaaaagagcgtttggaacagaactcactaacattgacatgcatagaagtaatctagattcaaaaaataagaagaaagcaaaacttgtacagagtagtggtgatgtcttgacgaattgcaaattagctgtgcgtagtcggctggggcagggtaaacaaagtggctttgtttatggtcctttccacccttctggcgcaaggaaacatggacttgatggcggcaataagcctgggcaaagggagagggctgaggactgggagagcctttctgcttcatttcgaccacagtaccagaaccaagcactcagtgatctatttgtccattatgtcgacgcgtggaagacatggtattctgaatttgctcaaggcagcagcatcatgcaacaacactttggtcatcctgttaaccattttttgtaggcaaattttagggccaagcattgcagttcttagtgcatgcttgtgtattttacctgtacaatctgttaaaacggaggaaacaaagacatgattgagcctagggttcattgtatttaccc

SEQ ID NO: 16379 - protein, 515 aa, Zea mays subsp. mays
  peptide (1)..(515): Ceres Seq. ID no. 12363304
TGADGENFETRARPPPPRQIEPSRFHSTAGSQIRASIILPGILSSPKTRTAPREIKSCKSLAATSRGSATAMTASFSSVAEVAVPAAAAVMASALPQEQQQARPRPRPMHAGGGGGGGGGANGRHHAYSRKDKSLGLLCSNFVVLYNRDDVESIGLDEAAKCLGVERRRIYDIVNVLESVGILVRKAKNRYTWIGFGGVSISLRELKERALREKSGLAPLQTEQQSAATISEDEDDDTLANPGAYIETERLSQTVDKPSGKPGASGCRLRSDHRKEKSLGLLTQNFVKLFLTMEVDTISLDEAAKLLLGEGHEETNMRTKVRRLYDIANVLSSLNLIEKIHQGDSRKPAFRWLGRATLNTENGVTVAVPPPGKIASKKRAFGTELTNIDMHRSNLDSKNKKKAKLVQSSGDVLTNCKLAVRSRLGQGKQSGFVYGPFHPSGARKHGLDGGNKPGQRERAEDWESLSASFRPQYQNQALSDLFVHYVDAWKTWYSEFAQGSSIMQQHFGHPVNHFL

SEQ ID NO: 16380 - protein, 444 aa, Zea mays subsp. mays
  peptide (1)..(444): Ceres Seq. ID no. 12363305
MTASFSSVAEVAVPAAAAVMASALPQEQQQARPRPRPMHAGGGGGGGGGANGRHHAYSRKDKSLGLLCSNFVVLYNRDDVESIGLDEAAKCLGVERRRIYDIVNVLESVGILVRKAKNRYTWIGFGGVSISLRELKERALREKSGLAPLQTEQQSAATISEDEDDDTLANPGAYIETERLSQTVDKPSGKPGASGCRLRSDHRKEKSLGLLTQNFVKLFLTMEVDTISLDEAAKLLLGEGHEETNMRTKVRRLYDIANVLSSLNLIEKIHQGDSRKPAFRWLGRATLNTENGVTVAVPPPGKIASKKRAFGTELTNIDMHRSNLDSKNKKKAKLVQSSGDVLTNCKLAVRSRLGQGKQSGFVYGPFHPSGARKHGLDGGNKPGQRERAEDWESLSASFRPQYQNQALSDLFVHYVDAWKTWYSEFAQGSSIMQQHFGHPVNHFL

SEQ ID NO: 16381 - protein, 425 aa, Zea mays subsp. mays
  peptide (1)..(425): Ceres Seq. ID no. 12363306
MASALPQEQQQARPRPRPMHAGGGGGGGGGANGRHHAYSRKDKSLGLLCSNFVVLYNRDDVESIGLDEAAKCLGVERRRIYDIVNVLESVGILVRKAKNRYTWIGFGGVSISLRELKERALREKSGLAPLQTEQQSAATISEDEDDDTLANPGAYIETERLSQTVDKPSGKPGASGCRLRSDHRKEKSLGLLTQNFVKLFLTMEVDTISLDEAAKLLLGEGHEETNMRTKVRRLYDIANVLSSLNLIEKIHQGDSRKPAFRWLGRATLNTENGVTVAVPPPGKIASKKRAFGTELTNIDMHRSNLDSKNKKKAKLVQSSGDVLTNCKLAVRSRLGQGKQSGFVYGPFHPSGARKHGLDGGNKPGQRERAEDWESLSASFRPQYQNQALSDLFVHYVDAWKTWYSEFAQGSSIMQQHFGHPVNHFL

SEQ ID NO: 16382 - DNA, 1485 bp, Zea mays subsp. mays
  misc_feature (1)..(1485): Ceres Seq. ID no. 15180769
  misc_feature (1)..(1485): Ortholog of  Ceres SEQ ID NO 15170811 as cited in SEQ ID NO 52649
  misc_feature (1)..(1485): Ortholog of  Ceres SEQ ID NO 13638331 as cited in SEQ ID NO 58047
  misc_feature (1)..(1485): Ortholog of  Ceres SEQ ID NO 15225845 as cited in SEQ ID NO 65125
  misc_feature (1)..(1485): Ortholog of  Ceres SEQ ID NO 15170135 as cited in SEQ ID NO 67647
atctcggttttattcaaatgctcaacacgcttgtttcccgcaggagcgtggtcagatcctccacaggttcgcggacctgatcgacgagcacgtggaggagctggcggcgctggacacggtggacgccggcaagctgttcgccgtgggcaaggcgcgggacatcccgggcgccgcgcacctgctgcgctactacgccggcgccgccgacaaggtgcacggcgcgacgctcaagatggcgcagcggatgcacgggtacacgctcaaggagcccgtgggcgtggtgggccacatcgtgccctggaactaccccaccaccatgttcttcttcaaggtagggcccgcgctcgccgcaggctgcgccgtcgtcgtcaagcccgccgagcagacgccgctgtccgcgctcttctacgcgcacctcgccagggaggccggcgtccccgccggcgtgctcaacgtcgtgccgggattcgggcccacggccggggccgccgtcgccgcccacatggacgtcgacaaggtcagcttcaccgggtccacggaggtcggccgcctcgtcatgagggccgcggccgagagcaacctcaagcccgtgtcgctcgagctgggcggcaagtctcccgtcatcgtcttcgatgacgccgacctcgacatggccgtcaacctcgtcaacttcgccacctacaccaacaagggcgagatctgtgtggccggcacgcgcatctacgtgcaggaagggatctacgacgagttcgtgaagaaggccgccgagctcgccagcaagtccgtggtcggagacccgttcaacccgagtgtcagccaaggcccccaggttgacaaggaccagtacgagaaggtcctcaggtacattgacatcggaaagcgcgaaggcgccacgctggtcaccggagggaagccctgcggcgacaataagggctactacatcgagcccaccatcttcacggacgtcaaggacgacatgacgatcgcacaggatgaaatctttgggccggtgatggctctcatgaaattcaagaccgtggaggaggtgatccagaaagcgaacaacacccggtacggcctggccgccggcatcgtgaccaagaacatcgacgtcgccaacaccgtgtcgcggtccatccgcgccggcgccatctggatcaactgctacttcgcgttcgacccggacgcgccgttcggcgggtacaagatgagcgggttcggcaaggacatgggcatggacgcgctcgacaagtacctgcagaccaagaccgtggtcactccgctgtacaacactccatggctctgaccgaccgacctcatccctgtccgatgaacagttcaacatcacaaaacaagaagaaacatgtcttgtaagatactccaaaggatcggttgcctgcagtagctgtactcttacacctgcatggattgatgatgtcgtagtgcaatgtaacattcagaacaataaagacatgtttcggactg

SEQ ID NO: 16383 - protein, 434 aa, Zea mays subsp. mays
  peptide (1)..(434): Ceres Seq. ID no. 15180770
SRFYSNAQHACFPQERGQILHRFADLIDEHVEELAALDTVDAGKLFAVGKARDIPGAAHLLRYYAGAADKVHGATLKMAQRMHGYTLKEPVGVVGHIVPWNYPTTMFFFKVGPALAAGCAVVVKPAEQTPLSALFYAHLAREAGVPAGVLNVVPGFGPTAGAAVAAHMDVDKVSFTGSTEVGRLVMRAAAESNLKPVSLELGGKSPVIVFDDADLDMAVNLVNFATYTNKGEICVAGTRIYVQEGIYDEFVKKAAELASKSVVGDPFNPSVSQGPQVDKDQYEKVLRYIDIGKREGATLVTGGKPCGDNKGYYIEPTIFTDVKDDMTIAQDEIFGPVMALMKFKTVEEVIQKANNTRYGLAAGIVTKNIDVANTVSRSIRAGAIWINCYFAFDPDAPFGGYKMSGFGKDMGMDALDKYLQTKTVVTPLYNTPWL

SEQ ID NO: 16384 - protein, 357 aa, Zea mays subsp. mays
  peptide (1)..(357): Ceres Seq. ID no. 15180771
MAQRMHGYTLKEPVGVVGHIVPWNYPTTMFFFKVGPALAAGCAVVVKPAEQTPLSALFYAHLAREAGVPAGVLNVVPGFGPTAGAAVAAHMDVDKVSFTGSTEVGRLVMRAAAESNLKPVSLELGGKSPVIVFDDADLDMAVNLVNFATYTNKGEICVAGTRIYVQEGIYDEFVKKAAELASKSVVGDPFNPSVSQGPQVDKDQYEKVLRYIDIGKREGATLVTGGKPCGDNKGYYIEPTIFTDVKDDMTIAQDEIFGPVMALMKFKTVEEVIQKANNTRYGLAAGIVTKNIDVANTVSRSIRAGAIWINCYFAFDPDAPFGGYKMSGFGKDMGMDALDKYLQTKTVVTPLYNTPWL

SEQ ID NO: 16385 - protein, 353 aa, Zea mays subsp. mays
  peptide (1)..(353): Ceres Seq. ID no. 15180772
MHGYTLKEPVGVVGHIVPWNYPTTMFFFKVGPALAAGCAVVVKPAEQTPLSALFYAHLAREAGVPAGVLNVVPGFGPTAGAAVAAHMDVDKVSFTGSTEVGRLVMRAAAESNLKPVSLELGGKSPVIVFDDADLDMAVNLVNFATYTNKGEICVAGTRIYVQEGIYDEFVKKAAELASKSVVGDPFNPSVSQGPQVDKDQYEKVLRYIDIGKREGATLVTGGKPCGDNKGYYIEPTIFTDVKDDMTIAQDEIFGPVMALMKFKTVEEVIQKANNTRYGLAAGIVTKNIDVANTVSRSIRAGAIWINCYFAFDPDAPFGGYKMSGFGKDMGMDALDKYLQTKTVVTPLYNTPWL

SEQ ID NO: 16386 - DNA, 1499 bp, Zea mays subsp. mays
  misc_feature (1)..(1499): Ceres Seq. ID no. 12407470
  misc_feature (1)..(1499): Ortholog of  Ceres SEQ ID NO 15169300 as cited in SEQ ID NO 59572
  misc_feature (1)..(1499): Ortholog of  Ceres SEQ ID NO 15176407 as cited in SEQ ID NO 59620
  misc_feature (1)..(1499): Ortholog of  Ceres SEQ ID NO 13596876 as cited in SEQ ID NO 62696
  misc_feature (1)..(1499): Ortholog of  Ceres SEQ ID NO 13655442 as cited in SEQ ID NO 64359
  misc_feature (1)..(1499): Ortholog of  Ceres SEQ ID NO 14303652 as cited in SEQ ID NO 67569
aaatccgcggcacggacggagagacggctgcaccgccccacacccacccttttccgcgcccgcgaagaaaacgaaggcagtggaacccgaagcggaggggccagaaagcgacccgaccgtctctccgctccctccctcccccacaccacccacctgtgatctcccgcgcgggagatccgcccgccccatggcgccgtcgcgcccgctcatgcgggggatccgcccgccgcgcgtcttcccgacccgcggcggccgcgcctcgccgtacgctgtcgccctcacggccctgctcctcgtctccgccgccctcctcgcgctcatcgccttcggcgtcttctcgctccccgtgtcagcgccgaacgccgccgccaccaccacagccggaggggagaccgaatccgccgacacccgccccgcgcgcccccgcgcccgccgggacctgggggaggggctgggagagcgcggcgcgcagtggaccgaggtcatctcgtgggagccaagggcattcgtctaccacaacttcctgtctaaggaagagtgtgaatacctaattggattggccaagcctcacatggtaaaatcaacagttgtcgacagcactactggtaaaagcaaggacagcagggtccggacaagttcgggcatgtttcttcaaagaggaagggacaaggttattcgagtaattgaaaagaggattgcagactataccttcatacctgtagatcatggagagggactccaagtactgcattatgaagtcgggcagaagtatgagcctcactttgattattttcttgatgagtttaacaccaagaatggtggtcagaggatggctactcttctgatgtatctatcagatgttgaagaagggggcgagactattttccctgatgcaaatgtgaacgtcagttctttaccatggtacaatgagctttcagagtgtgccaagagaggcctttctgtcaaaccaaagatgggagatgcacttcttttctggagcatgaaaccagatgccaccctggacccattaagtttgcatgggggttgtcctgtgattagaggaaataaatggtcgtcaaccaagtggatgcatatccacgagtacaaagcttgagccttcaagactcgagagtcgagcgtaccaaagatggatctctatgcatgtgacttggggctgtctactgggttgacacccatgtatgctttacagacccactgaagctgtattctttgctcctttgttggaggggggagaattgcagataataggggccaataagcaggggccttgctcatccctgcagtatttttgggtctgatccttgctgacttggcttttgtcttttcttttctttttcttaccttgccgtaccccagctatagaggaatggtgtagtgtctgggggcatagagtttgagattttgttttgtgccacacctgtgttactagtataagctttggtactaatgaataacgaggcctaagctcacatctactg

SEQ ID NO: 16387 - protein, 370 aa, Zea mays subsp. mays
  peptide (1)..(370): Ceres Seq. ID no. 12407471
NPRHGRRDGCTAPHPPFSAPAKKTKAVEPEAEGPESDPTVSPLPPSPTPPTCDLPRGRSARPMAPSRPLMRGIRPPRVFPTRGGRASPYAVALTALLLVSAALLALIAFGVFSLPVSAPNAAATTTAGGETESADTRPARPRARRDLGEGLGERGAQWTEVISWEPRAFVYHNFLSKEECEYLIGLAKPHMVKSTVVDSTTGKSKDSRVRTSSGMFLQRGRDKVIRVIEKRIADYTFIPVDHGEGLQVLHYEVGQKYEPHFDYFLDEFNTKNGGQRMATLLMYLSDVEEGGETIFPDANVNVSSLPWYNELSECAKRGLSVKPKMGDALLFWSMKPDATLDPLSLHGGCPVIRGNKWSSTKWMHIHEYKA

SEQ ID NO: 16388 - protein, 308 aa, Zea mays subsp. mays; identical to SEQ ID NO: 5872
  peptide (1)..(308): Ceres Seq. ID no. 12407472

SEQ ID NO: 16389 - protein, 301 aa, Zea mays subsp. mays; identical to SEQ ID NO: 5873
  peptide (1)..(301): Ceres Seq. ID no. 12407473

SEQ ID NO: 16390 - DNA, 2136 bp, Zea mays subsp. mays
  misc_feature (1)..(2136): Ceres Seq. ID no. 12353121
  misc_feature (1)..(2136): Ortholog of  Ceres SEQ ID NO 15176911 as cited in SEQ ID NO 54868
  misc_feature (1)..(2136): Ortholog of  Ceres SEQ ID NO 13596433 as cited in SEQ ID NO 68721
  misc_feature (1)..(2136): Ortholog of  Ceres SEQ ID NO 13599169 as cited in SEQ ID NO 0
gcattcgattcggcagctgcggggccgccggccgaagccgaatcgcctccgcagtccgcaccacacgtgccaccccctcgcgcctccctctcctcttcactccgccaccactcttctccccctccggcgagagcgtgcgcccacgcggccacgcccaccccgccatgaagcagctgcaccggcagtccagcatgagcaagcagcaccgcccgcaccaccaccgtacatccctctcccgcaccctcgcttcctacctcctccgcgagcagcgcctcctcttcgtcctcctcggcttcctcctagcctcgtccttcttcttcctctacccgcattccgccgccggatcctcctcggccaccaatatcaccgccgccttcgccagaaagaacccccgcagcagcggcgcctcctcctccgcgcgccgcctccccgtcggtgtccggaagccctccctgcgcatcgtcgtcaccggcggcgcgggttttgttggcagccacctcgtcgacaagctcctcgcccgcggggatagcgtcatcgtcgtcgacaacttcttcacgggccgcaaggacaacgtcgcgcaccacctcggcaacccgcgattcgagctcatccgccacgacgtcgtcgaacccattctcctagaggtcgaccagatctaccacctcgcctgccccgcatcccccgtgcactacaagttcaatcccatcaaaaccatcatatcctccccgctccgctgcccgcgcataattcgtccacatcctcacagaaattggattcgttatatttgtctttattggtttatttatggacacggatacggcttctgtaatgcacatttcacatgggggtgaaggtgcgcgtggggggtgcatttgtagttttgtgcttgcgtggggaatagcctgtatttacatctgtttattttgtctgttttttttcttcaattgtttctttaaccaactatgtacaagacaaatgtcatggggaccttgaatatgcttggactggctaagagggttggggcccggttcttgttgactagtaccagtgaagtgtatggtgatcctcttgagcatccacagaaggagagctactggggacatgtcaatcccataggtgttaggagctgttatgatgagggaaagagaacagctgaaactcttaccatggattaccaccgcggtgctggtgttgaggtgagaattgcacgcatatttaacacatatggccctcgaatgtgtttagatgatggccgagttgttagcaactttgttgcacaggctttgcggaaacaaccaatgacagtttatggcgatggaaaacagactagaagttttcagtatgtttcagatttggttgatgggttggtaactctaatggaaagcgaccatattggaccattcaacttggggaatcctggagaatttacaatgctggagcttgcacaggtggtaaaagaaactatcgacccaggtgcatctgtcgagttcaaacccaatactgcggatgatccacacatgagaaaacctgacatttcgaaggccaaatctcttctcaattgggagccccaagtttcactaaaacaaggtctgccgcgtatggtgtcggacttccagaaacgcatcatggatgagaaatgatgaggagcagaggtttgtttcgaaaaggaaatgaggagcagacgccaccagtctcagaacactgtatcctactgacagatctcttttggtgccatgaaggctgaaggccttgacaaaggtcagatgaacgactaattgccaaaaaattcttcctcgctccagggcaatttttttttgtgacaggacatctgttctttggttctggtttcttcgatacataaacttcgccatagaattccataattgcctttaagcgaacagtgagaggtcaacataaatttagtccctctttctctctttctgatgttattgaaacccatccacgtccattttacgtaggatgataccatattctcatgctacacatgtcctctatttcgtgtctgaatttttaggtgattttattactcttgtacaacaaacaaatagttattttatggttccttaaattgttacttttataatttgtgattttatgatttgtgatttgtttttg

SEQ ID NO: 16391 - protein, 282 aa, Zea mays subsp. mays
  peptide (1)..(282): Ceres Seq. ID no. 12353122
IRFGSCGAAGRSRIASAVRTTRATPSRLPLLFTPPPLFSPSGESVRPRGHAHPAMKQLHRQSSMSKQHRPHHHRTSLSRTLASYLLREQRLLFVLLGFLLASSFFFLYPHSAAGSSSATNITAAFARKNPRSSGASSSARRLPVGVRKPSLRIVVTGGAGFVGSHLVDKLLARGDSVIVVDNFFTGRKDNVAHHLGNPRFELIRHDVVEPILLEVDQIYHLACPASPVHYKFNPIKTIISSPLRCPRIIRPHPHRNWIRYICLYWFIYGHGYGFCNAHFTWG

SEQ ID NO: 16392 - protein, 228 aa, Zea mays subsp. mays
  peptide (1)..(228): Ceres Seq. ID no. 12353123
MKQLHRQSSMSKQHRPHHHRTSLSRTLASYLLREQRLLFVLLGFLLASSFFFLYPHSAAGSSSATNITAAFARKNPRSSGASSSARRLPVGVRKPSLRIVVTGGAGFVGSHLVDKLLARGDSVIVVDNFFTGRKDNVAHHLGNPRFELIRHDVVEPILLEVDQIYHLACPASPVHYKFNPIKTIISSPLRCPRIIRPHPHRNWIRYICLYWFIYGHGYGFCNAHFTWG

SEQ ID NO: 16393 - protein, 225 aa, Zea mays subsp. mays
  peptide (1)..(225): Ceres Seq. ID no. 12353124
MYKTNVMGTLNMLGLAKRVGARFLLTSTSEVYGDPLEHPQKESYWGHVNPIGVRSCYDEGKRTAETLTMDYHRGAGVEVRIARIFNTYGPRMCLDDGRVVSNFVAQALRKQPMTVYGDGKQTRSFQYVSDLVDGLVTLMESDHIGPFNLGNPGEFTMLELAQVVKETIDPGASVEFKPNTADDPHMRKPDISKAKSLLNWEPQVSLKQGLPRMVSDFQKRIMDEK

SEQ ID NO: 16394 - DNA, 1409 bp, Zea mays subsp. mays
  misc_feature (1)..(1409): Ceres Seq. ID no. 12369478
  misc_feature (1)..(1409): Ortholog of  Ceres SEQ ID NO 15176333 as cited in SEQ ID NO 52787
  misc_feature (1)..(1409): Ortholog of  Ceres SEQ ID NO 15170403 as cited in SEQ ID NO 53457
  misc_feature (1)..(1409): Ortholog of  Ceres SEQ ID NO 14303479 as cited in SEQ ID NO 54254
  misc_feature (1)..(1409): Ortholog of  Ceres SEQ ID NO 14312047 as cited in SEQ ID NO 55656
  misc_feature (1)..(1409): Ortholog of  Ceres SEQ ID NO 12611392 as cited in SEQ ID NO 56826
  misc_feature (1)..(1409): Ortholog of  Ceres SEQ ID NO 14314632 as cited in SEQ ID NO 59923
  misc_feature (1)..(1409): Ortholog of  Ceres SEQ ID NO 13660872 as cited in SEQ ID NO 60830
  misc_feature (1)..(1409): Ortholog of  Ceres SEQ ID NO 15226831 as cited in SEQ ID NO 62916
  misc_feature (1)..(1409): Ortholog of  Ceres SEQ ID NO 12616221 as cited in SEQ ID NO 63291
  misc_feature (1)..(1409): Ortholog of  Ceres SEQ ID NO 14302355 as cited in SEQ ID NO 65830
atgcctttcgcgagagaaaggggtcgaatcggcggctgatttgacccggctcgctattagagctgcgaaagtgatccgagcagtcacggtttcggaagcggcgcgtcggccggaggagaaacgcaaccagctgtcgaggagctatgagcagcggtggcggaggcagagtgccggcggcggcggcggcgcagtcgcaggagctgcagctaccgccggggttccggttccacccgacggatgaggagctggtggtgcactacctctgccggcgctgcgccgggctgcccatctccgtgcccatcatcgccgaggtcgacctatacaagcacgatccctggcagctcccaaggatggcgctgtacggcgagaaggagtggtacttcttctccccgcgggaccgcaagtacccgaacgggtcgcggccgaaccgcgccgccggcgccgggtactggaaggccactggcgcagacaagccggtgggcacgccgaagccggtggccatcaagaaggctctcgtcttctacgccggcaaggcacccaagggcgacaagaccaactggatcatgcatgagtaccgcctcgccgacgtcgaccgcaccgcccgcaagaagaacaacagcctcaggttggatgattgggtgctgtgccgaatctacaacaagaaaggcgcgctggagaagccgaccggagccggcggcagggccgaggccagcagccagggcgcgctggggtccatgtccatgggctcgccgccggagcagaaaccgtccgtgctgccgtctgccacggcaacggccgcggccgcggccgggacggggtacgcgccgctgccgttctcggagctggcggcgtactacgaggtccggccgtccgactcgatgccccgggcgcacggcgcggactcgagctgctcgggccacgcgctggccgccacgtcgtcgtgcggcggnggcggctggcgagcggcctgaggtacagagccagcccaagatctccgagtgggagcgcactttcgccgccggcgccggcccgggaatcaacccggccggctcgatgctggggcttggcgggcatcagctcggcccctcggcggtgggggtagggctgcccgcgggcgacccgctgctccaggacatcctcacatactggggcaagccgtactgagaaagatgactggtccgagccgccggcgatgaggccatgtcggcttgtgaatgatcatggagctggactacaggattattgctgctacgagttgaattaaactgtttatatgcgattgatttggtactgggatttttgtatacttgaattagtactctctctatatagagagacatacacatactcgagtatatatgttttgcttatatagagtatggagtaataatatttatatctgctggtcc

SEQ ID NO: 16395 - protein, 308 aa, Zea mays subsp. mays
  peptide (1)..(308): Ceres Seq. ID no. 12369479
  misc_feature (238)..(238): Xaa is any aa, unknown or other
MRSWWCTTSAGAAPGCPSPCPSSPRSTYTSTIPGSSQGWRCTARRSGTSSPRGTASTRTGRGRTAPPAPGTGRPLAQTSRWARRSRWPSRRLSSSTPARHPRATRPTGSCMSTASPTSTAPPARRTTASGWMIGCCAESTTRKARWRSRPEPAAGPRPAARARWGPCPWARRRSRNRPCCRLPRQRPRPRPGRGTRRCRSRSWRRTTRSGRPTRCPGRTARTRAARATRWPPRRRAAXAAGERPEVQSQPKISEWERTFAAGAGPGINPAGSMLGLGGHQLGPSAVGVGLPAGDPLLQDILTYWGKPY

SEQ ID NO: 16396 - protein, 275 aa, Zea mays subsp. mays
  peptide (1)..(275): Ceres Seq. ID no. 12369480
  misc_feature (269)..(269): Xaa is any aa, unknown or other
MSSGGGGRVPAAAAAQSQELQLPPGFRFHPTDEELVVHYLCRRCAGLPISVPIIAEVDLYKHDPWQLPRMALYGEKEWYFFSPRDRKYPNGSRPNRAAGAGYWKATGADKPVGTPKPVAIKKALVFYAGKAPKGDKTNWIMHEYRLADVDRTARKKNNSLRLDDWVLCRIYNKKGALEKPTGAGGRAEASSQGALGSMSMGSPPEQKPSVLPSATATAAAAAGTGYAPLPFSELAAYYEVRPSDSMPRAHGADSSCSGHALAATSSCGXGGWRAA

SEQ ID NO: 16397 - protein, 206 aa, Zea mays subsp. mays
  peptide (1)..(206): Ceres Seq. ID no. 12369481
  misc_feature (200)..(200): Xaa is any aa, unknown or other
MALYGEKEWYFFSPRDRKYPNGSRPNRAAGAGYWKATGADKPVGTPKPVAIKKALVFYAGKAPKGDKTNWIMHEYRLADVDRTARKKNNSLRLDDWVLCRIYNKKGALEKPTGAGGRAEASSQGALGSMSMGSPPEQKPSVLPSATATAAAAAGTGYAPLPFSELAAYYEVRPSDSMPRAHGADSSCSGHALAATSSCGXGGWRAA

SEQ ID NO: 16398 - DNA, 1363 bp, Zea mays subsp. mays
  misc_feature (1)..(1363): Ceres Seq. ID no. 12406464
  misc_feature (1)..(1363): Ortholog of  Ceres SEQ ID NO 13585286 as cited in SEQ ID NO 62478
  misc_feature (1)..(1363): Ortholog of  Ceres SEQ ID NO 13503500 as cited in SEQ ID NO 68001
  misc_feature (1)..(1363): Ortholog of  Ceres SEQ ID NO 15174327 as cited in SEQ ID NO 0
atccaagctcacggagtcgcagtgccaccgaggcttccaagcaagaaccacccccgcctgcctgcggagctcggccgtcccctgcgctgcggagcgggagcgggagcggcggcgacaatgtcctccaacggcaagcccaccccacagcccgcggcggccagcgccggcgccggcgccggcgggccgccgaagatgtaccagcgacccatctaccggccgcagcaggcgccggcgaagcggcggcgcggggggcggtcgtgcccgttcagctgctgctgctgcttctgctggacgctcctcgtcgtcgtcctcctcgccgtcctggccgccgtggccgggggcgccttctacctgctgtaccggccgcaccggccggccttcacgctgaccgcggcgcgcgtgacgaggctgagcctgtcgtcgtccgccaccgcgcccgcgctgagcgacgccatcgacgtgacgctgaccgccaggaaccccaacaagaagctggtgtacgtctacgacgacttcgccgtgacggccgccacggccgccaacgccgtgccgctgggcgcggccaccgcgcccgggttcgcgcacgacgccggcaacgtcaccgtcatccgggccaccgtctccgcgtccgcgctcgcggtcgaccccgccgcggccggctccgacgtcaagaggtccggcgagttccccatcgtcctggacctggagaccagggccggcgtccgggttggcgcgctcaggaccaaagaagatcggcatcctggtgcactgcgacggcgtcaaggtggccgcgcccgcgcccgcgccggccaagaagacgaagaagctggcgaaggccgcggccgacaccccagcccccgccgccgcggccgttgaagacgcgccggcgccgcccgccgcgtcggccacggccaccgtcgctcgcgcgtgccaggtcagggtccgcgtcaagatctggaagtggaccttctanccacgtcgtcgtcgccagcctccgaggggccgcattgcaaaatttttcgggtgaaagggaaaaaggttgctttgctttgctttgctttgcaacaccgggtgaagtttctccagtcagtccagtaggagggaaagcaagggaaacagaattcgaatcaaatgccggccgctgtaaatttttttccgtgtttaattgaattttaccaaattcggcggggagggaaggagaaggagaggtcggaggagcggcaaggcaggaagtgacgtgccgtgtgcattctgttctgcagtgtgaggcttgaacgatttgatttctctctctctctctttctctttatcgctttgtgtagtgccatttttttaaattttttcacgcatcttcttgttggtg

SEQ ID NO: 16399 - protein, 388 aa, Zea mays subsp. mays
  peptide (1)..(388): Ceres Seq. ID no. 12406465
  misc_feature (324)..(324): Xaa is any aa, unknown or other
PSSRSRSATEASKQEPPPPACGARPSPALRSGSGSGGDNVLQRQAHPTARGGQRRRRRRRAAEDVPATHLPAAAGAGEAAARGAVVPVQLLLLLLLDAPRRRPPRRPGRRGRGRLLPAVPAAPAGLHADRGARDEAEPVVVRHRARAERRHRRDADRQEPQQEAGVRLRRLRRDGRHGRQRRAAGRGHRARVRARRRQRHRHPGHRLRVRARGRPRRGRLRRQEVRRVPHRPGPGDQGRRPGWRAQDQRRSASWCTATASRWPRPRPRRPRRRRSWRRPRPTPQPPPPRPLKTRRRRPPRRPRPPSLARARSGSASRSGSGPSXHVVVASLRGAALQNFSGEREKGCFALLCFATPGEVSPVSPVGGKARETEFESNAGRCKFFSVFN

SEQ ID NO: 16400 - protein, 291 aa, Zea mays subsp. mays
  peptide (1)..(291): Ceres Seq. ID no. 12406466
IQAHGVAVPPRLPSKNHPRLPAELGRPLRCGAGAGAAATMSSNGKPTPQPAAASAGAGAGGPPKMYQRPIYRPQQAPAKRRRGGRSCPFSCCCCFCWTLLVVVLLAVLAAVAGGAFYLLYRPHRPAFTLTAARVTRLSLSSSATAPALSDAIDVTLTARNPNKKLVYVYDDFAVTAATAANAVPLGAATAPGFAHDAGNVTVIRATVSASALAVDPAAAGSDVKRSGEFPIVLDLETRAGVRVGALRTKEDRHPGALRRRQGGRARARAGQEDEEAGEGRGRHPSPRRRGR

SEQ ID NO: 16401 - protein, 252 aa, Zea mays subsp. mays
  peptide (1)..(252): Ceres Seq. ID no. 12406467
MSSNGKPTPQPAAASAGAGAGGPPKMYQRPIYRPQQAPAKRRRGGRSCPFSCCCCFCWTLLVVVLLAVLAAVAGGAFYLLYRPHRPAFTLTAARVTRLSLSSSATAPALSDAIDVTLTARNPNKKLVYVYDDFAVTAATAANAVPLGAATAPGFAHDAGNVTVIRATVSASALAVDPAAAGSDVKRSGEFPIVLDLETRAGVRVGALRTKEDRHPGALRRRQGGRARARAGQEDEEAGEGRGRHPSPRRRGR

SEQ ID NO: 16402 - DNA, 1566 bp, Zea mays subsp. mays
  misc_feature (1)..(1566): Ceres Seq. ID no. 12359525
  misc_feature (1)..(1566): Ortholog of  Ceres SEQ ID NO 15168429 as cited in SEQ ID NO 57818
ctctccctcgttgtccatggccctcgagtcatggctcaccaaggtccgctcggccatgtcctctgcctctggaggttcgggggcgccatcgaggccccggaagcagagcaccgtcggcatcctcgccttcgaggtcgccagcctcatgtccaagcttctccagctgtggcgagccgtgggtgacgctgccgtcgcacgcctccgccacgagaccatgaacctccacggcgtccgcaagatggtctccgacgacgacgacttccttgtcggcctcgcccgcgccgagctcgtggacacgctcagggccgcatccgactccgtggccgcgctcgccgcgcggtgcgcggaccccagcctccgcgacttcagggacgccttcctggagctggccgacaccggccgcgaccggcaccgctggacggcgcccagctggaaggagatggacgcgagggcgagcaggatggggaagcaggtggccaccaccgccgcgctccggagggccatggaggagctggccgaggccgagcacggcctccggaagcttgtcgtcctccagtgcgccgccagcagcctttcggcgagcaagatctcggcggcgtcggagcagcagcaggtggtcttctccaagaggcaggaggtgaagcacctgaagcagacgtccctctggggctccaccttcgacgctgccgtcgcgtcgctggcacgggcggcgttcaccaccctcgcgcgcatcaaggccgtcttcggcgccggccgggagcagcgccacccgccgctgtaccgcagcctgacactctcctcggcggtgcacccgtcaggcgacgcgcggtccccgccatcgcgcaagtccatgtcaatggaggaggtgctgctgttcgacgtggacgaccagccgtcgttcgctccgaaacggcaggtgcggggcggcgggttcctggaggacagctcggcggcactgacgcccccggcggggacgctgggcgcggcggcgctggcgccgcgctacgccgggctggtgatctcgatcgagcggatggcgcggtcgccgctgctggtgggccccgaggagcgggacgagctgtacgggatgctgacggcgagcgtgcgcgcgcagctccgggcgcggctgcgcggcgcggtgcccgcggcggacccggggctcgcagggcagtggtgcgcggcgctcgctgggatcctggagtggctggcgccgatggcgcacgcgacggtgcggtggcaggcggagcgcagcctggagcagcggggcgggagcggcaacggcagcgtgctgctgctgcagacactgcagttcgcggagcgcgacaaggtggacgcggcggtggtggagctcctggtggggctcaactacgtgtggcggttcgagaaggagatgagctgccgcgctatgctcgcctcgcccgcccgcccgcccgtccgatgacgatgcatccatggattatggatggtggtggtgatacgaatgatgcaagcacatctgcatctgcatctgtttgttgctcattctggatggatctgttgacgacgaataaatctctactacttatt

SEQ ID NO: 16403 - protein, 479 aa, Zea mays subsp. mays
  peptide (1)..(479): Ceres Seq. ID no. 12359526
SPSLSMALESWLTKVRSAMSSASGGSGAPSRPRKQSTVGILAFEVASLMSKLLQLWRAVGDAAVARLRHETMNLHGVRKMVSDDDDFLVGLARAELVDTLRAASDSVAALAARCADPSLRDFRDAFLELADTGRDRHRWTAPSWKEMDARASRMGKQVATTAALRRAMEELAEAEHGLRKLVVLQCAASSLSASKISAASEQQQVVFSKRQEVKHLKQTSLWGSTFDAAVASLARAAFTTLARIKAVFGAGREQRHPPLYRSLTLSSAVHPSGDARSPPSRKSMSMEEVLLFDVDDQPSFAPKRQVRGGGFLEDSSAALTPPAGTLGAAALAPRYAGLVISIERMARSPLLVGPEERDELYGMLTASVRAQLRARLRGAVPAADPGLAGQWCAALAGILEWLAPMAHATVRWQAERSLEQRGGSGNGSVLLLQTLQFAERDKVDAAVVELLVGLNYVWRFEKEMSCRAMLASPARPPVR

SEQ ID NO: 16404 - protein, 474 aa, Zea mays subsp. mays
  peptide (1)..(474): Ceres Seq. ID no. 12359527
MALESWLTKVRSAMSSASGGSGAPSRPRKQSTVGILAFEVASLMSKLLQLWRAVGDAAVARLRHETMNLHGVRKMVSDDDDFLVGLARAELVDTLRAASDSVAALAARCADPSLRDFRDAFLELADTGRDRHRWTAPSWKEMDARASRMGKQVATTAALRRAMEELAEAEHGLRKLVVLQCAASSLSASKISAASEQQQVVFSKRQEVKHLKQTSLWGSTFDAAVASLARAAFTTLARIKAVFGAGREQRHPPLYRSLTLSSAVHPSGDARSPPSRKSMSMEEVLLFDVDDQPSFAPKRQVRGGGFLEDSSAALTPPAGTLGAAALAPRYAGLVISIERMARSPLLVGPEERDELYGMLTASVRAQLRARLRGAVPAADPGLAGQWCAALAGILEWLAPMAHATVRWQAERSLEQRGGSGNGSVLLLQTLQFAERDKVDAAVVELLVGLNYVWRFEKEMSCRAMLASPARPPVR

SEQ ID NO: 16405 - protein, 461 aa, Zea mays subsp. mays
  peptide (1)..(461): Ceres Seq. ID no. 12359528
MSSASGGSGAPSRPRKQSTVGILAFEVASLMSKLLQLWRAVGDAAVARLRHETMNLHGVRKMVSDDDDFLVGLARAELVDTLRAASDSVAALAARCADPSLRDFRDAFLELADTGRDRHRWTAPSWKEMDARASRMGKQVATTAALRRAMEELAEAEHGLRKLVVLQCAASSLSASKISAASEQQQVVFSKRQEVKHLKQTSLWGSTFDAAVASLARAAFTTLARIKAVFGAGREQRHPPLYRSLTLSSAVHPSGDARSPPSRKSMSMEEVLLFDVDDQPSFAPKRQVRGGGFLEDSSAALTPPAGTLGAAALAPRYAGLVISIERMARSPLLVGPEERDELYGMLTASVRAQLRARLRGAVPAADPGLAGQWCAALAGILEWLAPMAHATVRWQAERSLEQRGGSGNGSVLLLQTLQFAERDKVDAAVVELLVGLNYVWRFEKEMSCRAMLASPARPPVR

SEQ ID NO: 16406 - DNA, 911 bp, Zea mays subsp. mays
  misc_feature (1)..(911): Ceres Seq. ID no. 12367785
  misc_feature (1)..(911): Ortholog of  Ceres SEQ ID NO 15225138 as cited in SEQ ID NO 65710
  misc_feature (1)..(911): Ortholog of  Ceres SEQ ID NO 15176713 as cited in SEQ ID NO 0
accaccacccaatcactcccgtctcgctctgcaccactcaaacctcttcttcctttccggaaaccacaccagcagtccccgcaggctgcagcttccccggccgccgcgcccaagccccagctgcctcgatcgctcgagagccacaaccaccactccaccagcagggcaaagctggaggatggccgcagtcgcagcgatgaaggctctcgcggtcgccgcctcgccggtgtcggcacggcagccccgtcggtacgtcgcaggtggcgctagccggcggctgcagtcgccgttccacggcgtgtcggtgcagtgccctgggcgaccgcggcgggcgacgccccggcgggggcggcaggtggcggtggtggcggcggcggtccggccggcgatccagttcatccagggcacggacgagcagacgatcccggacgtgcggctgaccaagtcccgggacggcacgaacggcgtggccatcttcacgttcgagcagccgtcggtgttcgactcgtcggcggagctcggggacatcacgggcttctacatgatcgacgacgagggcgtgctgcagtccgtggacgtgagcgccaagttcgtcaacggcaagccggcgcggatcgaggccaagtacgtcatgcgcacgccccgggactgggaccgcttcatgcgcttcatggagcggtactctcaggccaacggcctccagttcgtcaagaactgacgagccggctttgagatcgattgcctgcctgctgcgctacgttctgcttgcttgctagtgttctttttttttttctttcctttctcccctgtgctgcgcccctggtgttgtgattgtgacctgctgtgtgcttgtgagtgatttttttttttgtagagaaaagaaagaaatatgggagatttgttttgctctg

SEQ ID NO: 16407 - protein, 238 aa, Zea mays subsp. mays
  peptide (1)..(238): Ceres Seq. ID no. 12367786
PPPNHSRLALHHSNLFFLSGNHTSSPRRLQLPRPPRPSPSCLDRSRATTTTPPAGQSWRMAAVAAMKALAVAASPVSARQPRRYVAGGASRRLQSPFHGVSVQCPGRPRRATPRRGRQVAVVAAAVRPAIQFIQGTDEQTIPDVRLTKSRDGTNGVAIFTFEQPSVFDSSAELGDITGFYMIDDEGVLQSVDVSAKFVNGKPARIEAKYVMRTPRDWDRFMRFMERYSQANGLQFVKN

SEQ ID NO: 16408 - protein, 179 aa, Zea mays subsp. mays
  peptide (1)..(179): Ceres Seq. ID no. 12367787
MAAVAAMKALAVAASPVSARQPRRYVAGGASRRLQSPFHGVSVQCPGRPRRATPRRGRQVAVVAAAVRPAIQFIQGTDEQTIPDVRLTKSRDGTNGVAIFTFEQPSVFDSSAELGDITGFYMIDDEGVLQSVDVSAKFVNGKPARIEAKYVMRTPRDWDRFMRFMERYSQANGLQFVKN

SEQ ID NO: 16409 - protein, 173 aa, Zea mays subsp. mays
  peptide (1)..(173): Ceres Seq. ID no. 12367788
MKALAVAASPVSARQPRRYVAGGASRRLQSPFHGVSVQCPGRPRRATPRRGRQVAVVAAAVRPAIQFIQGTDEQTIPDVRLTKSRDGTNGVAIFTFEQPSVFDSSAELGDITGFYMIDDEGVLQSVDVSAKFVNGKPARIEAKYVMRTPRDWDRFMRFMERYSQANGLQFVKN

SEQ ID NO: 16410 - DNA, 1562 bp, Zea mays subsp. mays
  misc_feature (1)..(1562): Ceres Seq. ID no. 12357066
  misc_feature (1)..(1562): Ortholog of  Ceres SEQ ID NO 13596108 as cited in SEQ ID NO 68591
acggcccaaccccatccactcctttcctcccacccgccagccgtcacccgcgcgtgcagccagcttccctgctacccccgcgcgccgccagccgagcggacgccggccctgccccgcacgccggcacgcggcacgcgcagccagctgccccacacgacgccggccgccctcgcactccccaccgcgctacccggcagccccgcgctacccggtcctcgctcggcgtccttgattcccaccgcacggcggcccttcttctgccaccgcacaccgcgcaggagcactgcccttcgccccttgtttagctgcagcaggagcgccgcccagccggccaccaccaccgcagcttgagagttgagacctgcagttgacgaccagaggccagagggcgttgctgcgctgcttcctcccctttttctgctgcgacgacggctggtcgagcgccgccacacttcgcagcttcgctggctcttcgcaggtgacgagcacccaccagacatggggcaaggtggacaagagaagtcgttcaatttccttcaagttttgctcgagggcagcatagctggaggaactgctggtgttgtggtggaaacagcactttacccgattgatactataaaaaccaggcttcaggctgctcgaggtggaagccggattgaatggaaaggcttgtattctggattagctggaaatctcactggcgtccttccggcctctgcgatatttgtcggggtgtatgagccaactaaaagaaaattactggaaacacttcctgaaaatctgagtgcagttgcccattttactgcaggggccattggaggtattgctgcttccctcgtccgtgtccctacagaggtggtcaaacaaaggatgcaaactggtcagttcaagtctgcacctgatgctgttcgtctcattgttgctaaagaaggatttaaaggactgtacgctggttatggttcctttctacttcgagatctaccatttgatgccatccagttctgcatttatgagcaacttcgaattggctacaaacttgtggcgaaaagggagttgaatgatccagagaatgcacttatcggtgcttttgctggcgccatcactggagctataacaaccccccttgatgtcatgaagacaagattgatggttcagggacaagggaaccaatacactggaattgtaagctgtgctcagacaatcctcagagaggaaggccctaaggcattcttgaagggcattgagccgcgagtgctgtggatcggcatcggtgggtccatcttctttggcgtgctggagaaaaccaagtcgatgctagccgagaggaggaaccgcgagcttcgggccgtcaaggacgaatgagtggagatcagctcttttttggcgttgagtccttaccctgaaacaaaatacacaattttacttgccgggggaggcagggggacaacctcgccggcccgtacctgtactccacggcgttcacgttatcacgtacgtagaaatcatgagcatgactgacggtttctacagattgaaaaccaaaacgtcttacatgcgctggc

SEQ ID NO: 16411 - protein, 287 aa, Zea mays subsp. mays
  peptide (1)..(287): Ceres Seq. ID no. 12357067
MGQGGQEKSFNFLQVLLEGSIAGGTAGVVVETALYPIDTIKTRLQAARGGSRIEWKGLYSGLAGNLTGVLPASAIFVGVYEPTKRKLLETLPENLSAVAHFTAGAIGGIAASLVRVPTEVVKQRMQTGQFKSAPDAVRLIVAKEGFKGLYAGYGSFLLRDLPFDAIQFCIYEQLRIGYKLVAKRELNDPENALIGAFAGAITGAITTPLDVMKTRLMVQGQGNQYTGIVSCAQTILREEGPKAFLKGIEPRVLWIGIGGSIFFGVLEKTKSMLAERRNRELRAVKDE

SEQ ID NO: 16412 - protein, 163 aa, Zea mays subsp. mays
  peptide (1)..(163): Ceres Seq. ID no. 12357068
MQTGQFKSAPDAVRLIVAKEGFKGLYAGYGSFLLRDLPFDAIQFCIYEQLRIGYKLVAKRELNDPENALIGAFAGAITGAITTPLDVMKTRLMVQGQGNQYTGIVSCAQTILREEGPKAFLKGIEPRVLWIGIGGSIFFGVLEKTKSMLAERRNRELRAVKDE

SEQ ID NO: 16413 - DNA, 769 bp, Zea mays subsp. mays
  misc_feature (1)..(769): Ceres Seq. ID no. 12545911
  misc_feature (1)..(769): Ortholog of  Ceres SEQ ID NO 15176145 as cited in SEQ ID NO 0
acacatcattgagcgcaacgcggtcgtgattgcgagtgaatccgtggcgtccaactcccaagcccctaccggcaaccctagcgaggcgatggggaaggcggaggcgaggtcaagggggcgcggcggcggcggcggcggcggcggaggaggaggaggcggaggcgccagcggcaatccggggaagatcttcgtcggagggctcccgcgggacaccacggatgctacatttgtgaggcattttggacagtatggagaaatagttgattcggtgataatgaaggataggcacacatctcagccacggggttttggcttcattacatactccgaccctgctgttgttgataaagtgatagaggacaatcatgttatcaatggaaagcaagttgaaattaagagaaccataccaaaaggttcggtgcaatctagctctaaggatttcaagactaaaaagatatttgttggtgggcttccgtcaacactaacagaagacgaattcaagagtttctttgcaanatatgggactgtggtggaccaccagattatgtttgatcatgaaaccaaacgttcccgaggctttggatttatagtttttgcttctgagcaagttgtagatgatttgttagcaaatggaaatatggttgaccttgctggttcaaaggtgagtctgaagttcattatagaaatgacaccaatggttgtctcctccattgtggatctatggtgtaaaatatgtaaagtagtgttttgcattcttctattccaagtc

SEQ ID NO: 16414 - protein, 256 aa, Zea mays subsp. mays
  peptide (1)..(256): Ceres Seq. ID no. 12545912
  misc_feature (172)..(172): Xaa is any aa, unknown or other
HIIERNAVVIASESVASNSQAPTGNPSEAMGKAEARSRGRGGGGGGGGGGGGGGASGNPGKIFVGGLPRDTTDATFVRHFGQYGEIVDSVIMKDRHTSQPRGFGFITYSDPAVVDKVIEDNHVINGKQVEIKRTIPKGSVQSSSKDFKTKKIFVGGLPSTLTEDEFKSFFAXYGTVVDHQIMFDHETKRSRGFGFIVFASEQVVDDLLANGNMVDLAGSKVSLKFIIEMTPMVVSSIVDLWCKICKVVFCILLFQV

SEQ ID NO: 16415 - protein, 227 aa, Zea mays subsp. mays
  peptide (1)..(227): Ceres Seq. ID no. 12545913
  misc_feature (143)..(143): Xaa is any aa, unknown or other
MGKAEARSRGRGGGGGGGGGGGGGGASGNPGKIFVGGLPRDTTDATFVRHFGQYGEIVDSVIMKDRHTSQPRGFGFITYSDPAVVDKVIEDNHVINGKQVEIKRTIPKGSVQSSSKDFKTKKIFVGGLPSTLTEDEFKSFFAXYGTVVDHQIMFDHETKRSRGFGFIVFASEQVVDDLLANGNMVDLAGSKVSLKFIIEMTPMVVSSIVDLWCKICKVVFCILLFQV

SEQ ID NO: 16416 - protein, 165 aa, Zea mays subsp. mays
  peptide (1)..(165): Ceres Seq. ID no. 12545914
  misc_feature (81)..(81): Xaa is any aa, unknown or other
MKDRHTSQPRGFGFITYSDPAVVDKVIEDNHVINGKQVEIKRTIPKGSVQSSSKDFKTKKIFVGGLPSTLTEDEFKSFFAXYGTVVDHQIMFDHETKRSRGFGFIVFASEQVVDDLLANGNMVDLAGSKVSLKFIIEMTPMVVSSIVDLWCKICKVVFCILLFQV

SEQ ID NO: 16417 - DNA, 1644 bp, Zea mays subsp. mays
  misc_feature (1)..(1644): Ceres Seq. ID no. 12407466
  misc_feature (1)..(1644): Ortholog of  Ceres SEQ ID NO 12563809 as cited in SEQ ID NO 53287
actcttcaccaccgccattcccccccccactcttcaccaccgcagcgccgccgcgtacaaggcgattaggcgaagctgcaccggaaggagaaggagagaagcgagagtctccccagccagagcaagccgaatccgaagctagcggagaggagagagggctgagtgaggatgccgacggttacctgcaacgcgtgcaacgcggggttcgacgacgaggagcagcagcggcttcactaccgctctgaatggcaccgttacaacctcaagcgcaaggtggctggagttcctggtgtcacagaggctctgtttctggctaggcaagctgctttggcggaggggagcaagcctgctagcaccccaatgctttacagctgtgctctttgtggaaaggagtacagaagctcgaaagctcacgagcagcatcttaactcgcgatcacatcttttgaaagcctctcaggagcccaatgcctctattgctggtatcacgatagtcaagccacttcctgaacgagtctcacgaagagctccatctgcagtagaggaggatcaagacgacgatgaggaagaagagtgggttgaagttgacccaagtgagatggagttggctgatgagtctacttcaaacatgcaagaagatgagcactcctcaaaatcagatgatgacatggatgaccttgaagagttggatatctcgtcgtgtttcatgtgtgacctcaagcatgacaccatagaagactgcatggtccatatgcataagaagcatgggtttttcatacctgacagtgaatacttgaaggatcccagtggtcttcttacttatgttggactgaaggtgaagcgtgattttatctgcctctactgcaatgacagatgccagtccttcttcagtctagaggctgtcaggaagcacatggatgcaaaggggcattgcaagttgcggtatggagatggtggagatgatgaagatgctgacctcgaggaattctatgattacagcagcagttatgttgattcagaaggcaagcagttgattgctgttgatgacttgaacaacaacattgagctgggaatcggtgggtctgagctagtaataacaaacaagagcgagaaaggcactcgggtcagaacccttggctctagggaatttatgcgctactatcgccagaaaccacggccttctgttgcaccagaccgtgcgcttgcactttcactagcttccagctacaagagcatgggtttggtgacagtgcagtctaaggagcagatggtgaggctgaaagttctccgtgctatgaacaggaccggggtcgagactatgcggaacaagatcggaatgaagagcaatgtgatccggaacctccctaagaattgcccgcactagacaacactgccttctcctgcaccctatctggagcttctcctggcatttatatggtgtcttatggtttcttgtctgtcgctgacaacgttggcgcttaagatatttggaataggactacaccttccatagtttttgttgaactctgtggtgcggaagcagctgttgccattatggcggaaattgctgacgcctcattgaacatgtttagtttttattttgttaaaaaattgggcaaaaaagtttgatgctcatattcatcgc

SEQ ID NO: 16418 - protein, 404 aa, Zea mays subsp. mays
  peptide (1)..(404): Ceres Seq. ID no. 12407467
MPTVTCNACNAGFDDEEQQRLHYRSEWHRYNLKRKVAGVPGVTEALFLARQAALAEGSKPASTPMLYSCALCGKEYRSSKAHEQHLNSRSHLLKASQEPNASIAGITIVKPLPERVSRRAPSAVEEDQDDDEEEEWVEVDPSEMELADESTSNMQEDEHSSKSDDDMDDLEELDISSCFMCDLKHDTIEDCMVHMHKKHGFFIPDSEYLKDPSGLLTYVGLKVKRDFICLYCNDRCQSFFSLEAVRKHMDAKGHCKLRYGDGGDDEDADLEEFYDYSSSYVDSEGKQLIAVDDLNNNIELGIGGSELVITNKSEKGTRVRTLGSREFMRYYRQKPRPSVAPDRALALSLASSYKSMGLVTVQSKEQMVRLKVLRAMNRTGVETMRNKIGMKSNVIRNLPKNCPH

SEQ ID NO: 16419 - protein, 340 aa, Zea mays subsp. mays
  peptide (1)..(340): Ceres Seq. ID no. 12407468
MLYSCALCGKEYRSSKAHEQHLNSRSHLLKASQEPNASIAGITIVKPLPERVSRRAPSAVEEDQDDDEEEEWVEVDPSEMELADESTSNMQEDEHSSKSDDDMDDLEELDISSCFMCDLKHDTIEDCMVHMHKKHGFFIPDSEYLKDPSGLLTYVGLKVKRDFICLYCNDRCQSFFSLEAVRKHMDAKGHCKLRYGDGGDDEDADLEEFYDYSSSYVDSEGKQLIAVDDLNNNIELGIGGSELVITNKSEKGTRVRTLGSREFMRYYRQKPRPSVAPDRALALSLASSYKSMGLVTVQSKEQMVRLKVLRAMNRTGVETMRNKIGMKSNVIRNLPKNCPH

SEQ ID NO: 16420 - protein, 261 aa, Zea mays subsp. mays
  peptide (1)..(261): Ceres Seq. ID no. 12407469
MELADESTSNMQEDEHSSKSDDDMDDLEELDISSCFMCDLKHDTIEDCMVHMHKKHGFFIPDSEYLKDPSGLLTYVGLKVKRDFICLYCNDRCQSFFSLEAVRKHMDAKGHCKLRYGDGGDDEDADLEEFYDYSSSYVDSEGKQLIAVDDLNNNIELGIGGSELVITNKSEKGTRVRTLGSREFMRYYRQKPRPSVAPDRALALSLASSYKSMGLVTVQSKEQMVRLKVLRAMNRTGVETMRNKIGMKSNVIRNLPKNCPH

SEQ ID NO: 16421 - DNA, 2112 bp, Zea mays subsp. mays
  misc_feature (1)..(2112): Ceres Seq. ID no. 12405293
  misc_feature (1)..(2112): Ortholog of  Ceres SEQ ID NO 15172875 as cited in SEQ ID NO 60423
  misc_feature (1)..(2112): Ortholog of  Ceres SEQ ID NO 13596509 as cited in SEQ ID NO 62004
  misc_feature (1)..(2112): Ortholog of  Ceres SEQ ID NO 14307904 as cited in SEQ ID NO 66440
  misc_feature (1)..(2112): Ortholog of  Ceres SEQ ID NO 13659971 as cited in SEQ ID NO 67565
  misc_feature (1)..(2112): Ortholog of  Ceres SEQ ID NO 13500385 as cited in SEQ ID NO 67583
atcaccaccagccagcaccacccctcctgcccctctgcgctggcgggccgagcgccgcgagcgagctgggccgcgggcggaggaggagtcgaggctgaccgaccccgcggccggcggcgacgagcggacgcagattcggcagccgtgcgcggaatgcccgtggaaggaggggagagagggagggcgcaggcgcagctgagctgagctgagcccgcgaggttcgcggtctgcggtgcggcggcagaggtctcgccagcgcgatggccagcggcggctcctccaggtacagctcgtacaaggcgccggggctgcgcggcgcgctgctggaggcggcgcacgtgtcgtgcctcgaggaccggtacgcgctgggcccgcagctggggtggggccagttcggcgtgatccggtcctgctccgacctggtcaccggcgaggcgctggcctgcaagtccatcgccaagggccggctcgtgtcccccgacgacgtgcgcggggtcaggctggagatcgacgtcatggcgcgcctggcgggccaccccaacgtcgtggggctcaaggccgtgtacgaggaccgcgactcggtgcacctcgtcatggagctctgcgccggcggcgagctcttccaccgcctccacgagcgcggctgcttccccgagcgcgaggccgccgcgctcttccgccacctcatggaggtcgtcgcgcactgccacgccaaggggatcgtgcaccgcgacctcaagcccgagaacatcctcctcgtcagcaggtcgccccagtcgccgatcaaactcgcggactttggactcgccacctacacccagcctggccgaagcttgagcggcatggtaggcagcccgttctacattgcgccggaggtgctctccggcgggtacaacgaggccgccgacgtctggagcgcgggggtcatactctacatcctcctcagcggcatcccacctttttggggcaagaccaagtccaagatcttcgactgcatcaggtccatggagctgcggttcccttctgacccatgggacagggtttctgattccgccaaggagctcgtcaccgggatgctgcggcgcgaccctaggctgcggctcacggccaagcaggttctagagcatccgtggatgcaggaacacgcggacccacaagactcgtgcgggcagtgccacgagaccggcctccaacgggagggcgccggctcgtgctccttctccacgccgttggcgtcgcggagcagggacgtgagctttgacacgcgtggccccatcgcgtggaggggtgggggcgaggacgaggcgacctgctgctcgcccacgttcgccgccgtctgcaggtcgtcgttctcggcgttcatcaccgacccggccccgccgccctgctcggcctcctccgccttgggtggctctggcttctcgttcggtgagccctgcgaaccacttgacggaggaggaggaggagggttcccgatgcccatggcttccatgccgagcttctcgttcttctgcgcgcgggacagcagcgagccagctgagccacagccggtcgctgcctcctcgactccgaggacggcgaggggatccacgccacggggcgtcaacggcaggcggaaccacacgatcggcggcggcgggcgggagcacctggacgtggcggtggagtctgtcatccgctgggcgtcgtgcaccaacttctccacggcgccctcacttcgggcctccctcgtatgctagcactagcaacgtcgttccgcgcgccggcgccgccaacgccgggctgagggtgaggaggagaattccgacgagacgagcggtagagagtgtgcagtagcctcgaattgtataatatatatacagacacagtgctgttatagtggtgatgatagattagagagtgaaggtgaagttgctacggagggatggatgcatggagatggagagcgagtggcagagctggaactgatgtgttttattcttcgctgtcacgctgctggtcagataagatttgggaacgctgctggtcagataagatttgggaacacacctggcgacggagagagaaggcgtctgataatttgatatgaacaagaagcaacaatgttcaggt

SEQ ID NO: 16422 - protein, 492 aa, Zea mays subsp. mays
  peptide (1)..(492): Ceres Seq. ID no. 12405294
MASGGSSRYSSYKAPGLRGALLEAAHVSCLEDRYALGPQLGWGQFGVIRSCSDLVTGEALACKSIAKGRLVSPDDVRGVRLEIDVMARLAGHPNVVGLKAVYEDRDSVHLVMELCAGGELFHRLHERGCFPEREAAALFRHLMEVVAHCHAKGIVHRDLKPENILLVSRSPQSPIKLADFGLATYTQPGRSLSGMVGSPFYIAPEVLSGGYNEAADVWSAGVILYILLSGIPPFWGKTKSKIFDCIRSMELRFPSDPWDRVSDSAKELVTGMLRRDPRLRLTAKQVLEHPWMQEHADPQDSCGQCHETGLQREGAGSCSFSTPLASRSRDVSFDTRGPIAWRGGGEDEATCCSPTFAAVCRSSFSAFITDPAPPPCSASSALGGSGFSFGEPCEPLDGGGGGGFPMPMASMPSFSFFCARDSSEPAEPQPVAASSTPRTARGSTPRGVNGRRNHTIGGGGREHLDVAVESVIRWASCTNFSTAPSLRASLVC

SEQ ID NO: 16423 - protein, 407 aa, Zea mays subsp. mays
  peptide (1)..(407): Ceres Seq. ID no. 12405295
MARLAGHPNVVGLKAVYEDRDSVHLVMELCAGGELFHRLHERGCFPEREAAALFRHLMEVVAHCHAKGIVHRDLKPENILLVSRSPQSPIKLADFGLATYTQPGRSLSGMVGSPFYIAPEVLSGGYNEAADVWSAGVILYILLSGIPPFWGKTKSKIFDCIRSMELRFPSDPWDRVSDSAKELVTGMLRRDPRLRLTAKQVLEHPWMQEHADPQDSCGQCHETGLQREGAGSCSFSTPLASRSRDVSFDTRGPIAWRGGGEDEATCCSPTFAAVCRSSFSAFITDPAPPPCSASSALGGSGFSFGEPCEPLDGGGGGGFPMPMASMPSFSFFCARDSSEPAEPQPVAASSTPRTARGSTPRGVNGRRNHTIGGGGREHLDVAVESVIRWASCTNFSTAPSLRASLVC

SEQ ID NO: 16424 - protein, 381 aa, Zea mays subsp. mays
  peptide (1)..(381): Ceres Seq. ID no. 12405296
MELCAGGELFHRLHERGCFPEREAAALFRHLMEVVAHCHAKGIVHRDLKPENILLVSRSPQSPIKLADFGLATYTQPGRSLSGMVGSPFYIAPEVLSGGYNEAADVWSAGVILYILLSGIPPFWGKTKSKIFDCIRSMELRFPSDPWDRVSDSAKELVTGMLRRDPRLRLTAKQVLEHPWMQEHADPQDSCGQCHETGLQREGAGSCSFSTPLASRSRDVSFDTRGPIAWRGGGEDEATCCSPTFAAVCRSSFSAFITDPAPPPCSASSALGGSGFSFGEPCEPLDGGGGGGFPMPMASMPSFSFFCARDSSEPAEPQPVAASSTPRTARGSTPRGVNGRRNHTIGGGGREHLDVAVESVIRWASCTNFSTAPSLRASLVC

SEQ ID NO: 16425 - DNA, 975 bp, Zea mays subsp. mays
  misc_feature (1)..(975): Ceres Seq. ID no. 12373004
  misc_feature (1)..(975): Ortholog of  Ceres SEQ ID NO 12587306 as cited in SEQ ID NO 62035
agatcactggcagtcgcaagtagcaacccgcatcacgagttcacccacgctccccgcacagctcactagcgaccagggagttcaaacaagaggcaacaagaacgaacgccaccaccgcgctccggtcgctttgcttggttcgggccactgcaccgccattgttgatctgttctccttctccttggaggagaaagaagagggggagaggaatgatggggcggacgagcgtggcggcggcggcggccctgctggtgctggcggcgtgcgcggctctgccggcgagaacggcggcgaacaagatcagcatcaactggaagcccaacgtgaactacaccgactggctgaagcagcacagccccttctacaaggacgactggctggtgttctactacacggcggggcaggcggacgtggtgcaggtggacgaggtgggctacaacaagtgcgactccaccaacgccatctacaactacagcaaggggcgcagcttcgccttccagctcaacgagaccaagacctactacttcatctgcagctacggctactgcttcggcgggatgcgcctcgccatcaaggccgagaagttgccgccgccgtcgccgccgccgtccgccagcgaccgctccgccgccgccatcgccgccttcgccaggtcccacgcgcccgtcatctacgccgccgtcgccgtgctcgccgcgctgctcaggatggtctagctgggaagaatctacccgccggcccctttgttggttcgaattgggactccttttttttgttcgttcagcctctccatcttttccgtagtgtgcttgggctctcgagaggagcagtagctggtgctggagtgctgcgttgggttcattaattaattagcggtgtggatttgccgaagcgattgattgagctgagattgatttttcaagtgtgaagaactctagctgccttgctgaattaaagtaactccagccttttcgt

SEQ ID NO: 16426 - protein, 287 aa, Zea mays subsp. mays
  peptide (1)..(287): Ceres Seq. ID no. 12373005
DHWQSQVATRITSSPTLPAQLTSDQGVQTRGNKNERHHRAPVALLGSGHCTAIVDLFSFSLEEKEEGERNDGADERGGGGGPAGAGGVRGSAGENGGEQDQHQLEAQRELHRLAEAAQPLLQGRLAGVLLHGGAGGRGAGGRGGLQQVRLHQRHLQLQQGAQLRLPAQRDQDLLLHLQLRLLLRRDAPRHQGREVAAAVAAAVRQRPLRRRHRRLRQVPRARHLRRRRRARRAAQDGLAGKNLPAGPFVGSNWDSFFLFVQPLHLFRSVLGLSRGAVAGAGVLRWVH

SEQ ID NO: 16427 - protein, 168 aa, Zea mays subsp. mays
  peptide (1)..(168): Ceres Seq. ID no. 12373006
MMGRTSVAAAAALLVLAACAALPARTAANKISINWKPNVNYTDWLKQHSPFYKDDWLVFYYTAGQADVVQVDEVGYNKCDSTNAIYNYSKGRSFAFQLNETKTYYFICSYGYCFGGMRLAIKAEKLPPPSPPPSASDRSAAAIAAFARSHAPVIYAAVAVLAALLRMV

SEQ ID NO: 16428 - protein, 167 aa, Zea mays subsp. mays
  peptide (1)..(167): Ceres Seq. ID no. 12373007
MGRTSVAAAAALLVLAACAALPARTAANKISINWKPNVNYTDWLKQHSPFYKDDWLVFYYTAGQADVVQVDEVGYNKCDSTNAIYNYSKGRSFAFQLNETKTYYFICSYGYCFGGMRLAIKAEKLPPPSPPPSASDRSAAAIAAFARSHAPVIYAAVAVLAALLRMV

SEQ ID NO: 16429 - DNA, 1685 bp, Zea mays subsp. mays
  misc_feature (1)..(1685): Ceres Seq. ID no. 12350656
  misc_feature (1)..(1685): Ortholog of  Ceres SEQ ID NO 13600220 as cited in SEQ ID NO 0
atagtcattttagcttgtgcacgctttgctgctctaaggtttaccgggcaaacactggacgacaggtgaacggggatgcacagttaggagattgagggagcgagaagggagggaggcaaaggagacagcatatgggatgtatttacagatgacaaagaacatgtcttagacagaagcaatggagaaattgcagttgatcactaccatcgatacaaggaagacattgagctcatggcaagtctaggttttagcgcatacagattttctatatcttgggcgcgtatatttcctgatggcttggggggaaaggtcaatgatcaaggagtcgccttctataatgacctcatcaactttatgatttcgaaaggtattgagccttacgcaactctatatcattgggatcttccaaacaatcttcagaagactctggggggctggatttctgacaagattgtggagtactttgcattgtatgcagaagcttgctttgcaaattttggagacagagtaaagcattggataacaatcaatgaacctctccaaactgcaatcaatggttatgggattggaatttttgcacctggaggatgccaaggtgaaactgctagatgttacttggctgcccatcaccaaatcttggctcatgctgctgctgttgatgtttatagaagaaaattcaaggctgcacaaggtggtgaagtagggttggttgttgattgtgaatgggcagagccattttctgaaaatgtggaagaccaaattgctgcacagcggaggcttgactttcaacttggatggtacttagatccaatatattttggtgattacccagaaagcatgcgtcaacgactgggcagtgatcttccaaccttctcagagaaagataaagagttcatgaggaacaaaattgattttgttggagtaaatcattatacttcaagactcattgctcatctccaaaatccaaacgatgtttatttctaccaagtgcaacaaatggagcgaatagaaaaatggaatagtggtgaaaaaattggtgaaagggctgcatctgaatggcttttcatagttccttggggccttcataagtcacttaattatatagcgaagaagtacaataatccagcaatttatgttactgagaatggcatggatgaagaggacgatcaatccgcaacgcttgaccaggtcctaaacgacacgacgagggtcggttacttcaaagggtacctcaattcagttgcgcaagcgatcaaggacggagctgatgtccgcgggtactttgcgtggtcgttcctggacaacttcgagtgggcaatgggctacaccaagaggttcggcatagtctacgtggactacaagaaggggctgtccaggcacccgaaagcatcggcgctgtggttctcgcgcttgctcaagggcgaggctggcactggcacaagctgagcgaactgcacgcagcatgcaagcacagaacgtcgtcgttattacaatataaatattccacacaactagacgttttctcctgttgttgtatcgtactactgtacagtaagcgccaataagctagcctcagatgtgtgctgcctgcctatacctctagtggctgccattgatccagcactagctgaaatgtacccggcctccaagaatcagcaccagaatatatgctttgaattgaactc

SEQ ID NO: 16430 - protein, 404 aa, Zea mays subsp. mays
  peptide (1)..(404): Ceres Seq. ID no. 12350657
MASLGFSAYRFSISWARIFPDGLGGKVNDQGVAFYNDLINFMISKGIEPYATLYHWDLPNNLQKTLGGWISDKIVEYFALYAEACFANFGDRVKHWITINEPLQTAINGYGIGIFAPGGCQGETARCYLAAHHQILAHAAAVDVYRRKFKAAQGGEVGLVVDCEWAEPFSENVEDQIAAQRRLDFQLGWYLDPIYFGDYPESMRQRLGSDLPTFSEKDKEFMRNKIDFVGVNHYTSRLIAHLQNPNDVYFYQVQQMERIEKWNSGEKIGERAASEWLFIVPWGLHKSLNYIAKKYNNPAIYVTENGMDEEDDQSATLDQVLNDTTRVGYFKGYLNSVAQAIKDGADVRGYFAWSFLDNFEWAMGYTKRFGIVYVDYKKGLSRHPKASALWFSRLLKGEAGTGTS

SEQ ID NO: 16431 - protein, 363 aa, Zea mays subsp. mays
  peptide (1)..(363): Ceres Seq. ID no. 12350658
MISKGIEPYATLYHWDLPNNLQKTLGGWISDKIVEYFALYAEACFANFGDRVKHWITINEPLQTAINGYGIGIFAPGGCQGETARCYLAAHHQILAHAAAVDVYRRKFKAAQGGEVGLVVDCEWAEPFSENVEDQIAAQRRLDFQLGWYLDPIYFGDYPESMRQRLGSDLPTFSEKDKEFMRNKIDFVGVNHYTSRLIAHLQNPNDVYFYQVQQMERIEKWNSGEKIGERAASEWLFIVPWGLHKSLNYIAKKYNNPAIYVTENGMDEEDDQSATLDQVLNDTTRVGYFKGYLNSVAQAIKDGADVRGYFAWSFLDNFEWAMGYTKRFGIVYVDYKKGLSRHPKASALWFSRLLKGEAGTGTS

SEQ ID NO: 16432 - protein, 202 aa, Zea mays subsp. mays
  peptide (1)..(202): Ceres Seq. ID no. 12350659
MRQRLGSDLPTFSEKDKEFMRNKIDFVGVNHYTSRLIAHLQNPNDVYFYQVQQMERIEKWNSGEKIGERAASEWLFIVPWGLHKSLNYIAKKYNNPAIYVTENGMDEEDDQSATLDQVLNDTTRVGYFKGYLNSVAQAIKDGADVRGYFAWSFLDNFEWAMGYTKRFGIVYVDYKKGLSRHPKASALWFSRLLKGEAGTGTS

SEQ ID NO: 16433 - DNA, 1253 bp, Zea mays subsp. mays
  misc_feature (1)..(1253): Ceres Seq. ID no. 12354559
  misc_feature (1)..(1253): Ortholog of  Ceres SEQ ID NO 14313014 as cited in SEQ ID NO 54841
  misc_feature (1)..(1253): Ortholog of  Ceres SEQ ID NO 14316091 as cited in SEQ ID NO 57622
  misc_feature (1)..(1253): Ortholog of  Ceres SEQ ID NO 13639317 as cited in SEQ ID NO 59781
  misc_feature (1)..(1253): Ortholog of  Ceres SEQ ID NO 13654578 as cited in SEQ ID NO 68583
atgaaggcgccgcgccggcgtgggggcatcgatagccgcgccggtgatacggcgcaccgccctgctcgcccagcggattcggtgcggcagacgtacgcggacagccggacccggacgcgatgcgaagtgcgaacccccaaaatattccacttgtcttcccccctcgtcgacccacggaaccttcgactcctcgccactggagtggctggctacctccaattcagcacgtaaagaaagcaaaccgcccgcagttccgttccgcaagaccagatcgcccgcttttctcctccggtcctctcctccctccccttgagccctgatcgaatcgatccacggtgccggcggacgcctcgcccccttcagttccatccaatccacgagtgaacagatggcgtcgcagtgggctgctccgccgccgggctactcggccgggcacgggcaggcgtacggcgaccagcagctggccacgccgccgcctcaggcagcgacggccgtggccgtgacggcggcgagcaacggcgtgggcaacccctacgtcgtcgtcacccccgcgtctgccgcaccgtccacctgccagaccgtcaggaaggcgctgggccgctacggcaagctgctcgaggacggaacccgcaaggccgccgacgccaccggcaacatctggcaccacctccggacggcgccgaacatggcggacgcggcggtggcgcggctgacgcaggggaccaaggtgtacgcggagggcggccacgacagggtgttctacccagacgttcggcgccatgcccggggagcagctccgcaaggcctacgcctgctacctctccacctcctcgggccccgtcatcggcacgctctacctctccacggcgcgcctcgccttctgcagcgacagcccgctctgctaccagggccctgccggccagccgcacgagtgcatgtactacaaggtggtgcttcctctgagccaggtgacatccgtgaacccttcttccagcatgcgcaaccgggcagaaaggtacattcagatcaggaccatggataaccacgagttctggttcatggggttcgtgaactacgacaaggccctcaagaatctcaacgaggccctgcagcaccgcgatgtcagcggccaccagcgctgctgatgctgatcaggcttcggttaggcactacagtcctactgctacttatttagttcatgatgaactgtgatacctttatcttatttgatgttcttgatgaataagagaacc

SEQ ID NO: 16434 - protein, 217 aa, Zea mays subsp. mays
  peptide (1)..(217): Ceres Seq. ID no. 12354560
MASQWAAPPPGYSAGHGQAYGDQQLATPPPQAATAVAVTAASNGVGNPYVVVTPASAAPSTCQTVRKALGRYGKLLEDGTRKAADATGNIWHHLRTAPNMADAAVARLTQGTKVYAEGGHDRVFYPDVRRHARGAAPQGLRLLPLHLLGPRHRHALPLHGAPRLLQRQPALLPGPCRPAARVHVLQGGASSEPGDIREPFFQHAQPGRKVHSDQDHG

SEQ ID NO: 16435 - protein, 121 aa, Zea mays subsp. mays
  peptide (1)..(121): Ceres Seq. ID no. 12354561
MPGEQLRKAYACYLSTSSGPVIGTLYLSTARLAFCSDSPLCYQGPAGQPHECMYYKVVLPLSQVTSVNPSSSMRNRAERYIQIRTMDNHEFWFMGFVNYDKALKNLNEALQHRDVSGHQRC

SEQ ID NO: 16436 - protein, 118 aa, Zea mays subsp. mays
  peptide (1)..(118): Ceres Seq. ID no. 12354562
MADAAVARLTQGTKVYAEGGHDRVFYPDVRRHARGAAPQGLRLLPLHLLGPRHRHALPLHGAPRLLQRQPALLPGPCRPAARVHVLQGGASSEPGDIREPFFQHAQPGRKVHSDQDHG

SEQ ID NO: 16437 - DNA, 1208 bp, Zea mays subsp. mays
  misc_feature (1)..(1208): Ceres Seq. ID no. 12351544
  misc_feature (1)..(1208): Ortholog of  Ceres SEQ ID NO 14310764 as cited in SEQ ID NO 55235
gcagcagcccaggaagcaacacccagccgcctaatcccgcaacaactcgccctcttctacccccatcggctcctctgcatccgcataccggtggcctacaggtttgctggagtgcagtgcacgggcggtggagcagcaaatctgcaactgattcaggatggatcaggaggcgaaggactctaggccctcaaggtctcccagcgagccaaacctcttcccaatggggtagccgtaagaggctgcgatgtgtcaagacgcgtgatgacggctcaccatcgccgtcgccgtctcaaggtcttaggcgtgccataccccgttctactcggcccctccttggagcagacattgcagcatttcgttcaccgcggcgccctagcacccttaaccgcaggaaatccgatttgctggtgaatgagtacaagcacacgatggcgctatcgccagagaaggacaagtattacacaacgaggggttcaccatttccctttgaaggaaatgggtttgactttggtaccataacagaggataagggaaccacatcgttgccgagattcttcattgcattgtcaaacaaggagaaggaggaggacttcatggcgatgaagggctccaagctgccacagaggccaaagaagaggcccaagctgatgcagaagtgcttgcttatggtgagcccaggagcttggttatcagatctatctcatgagagatatgaagttagagagaagaagagttctaaaaagagggctagaggcttgaaggctttgagcatggcgagtgattcagaatagagtttgaggcgaatggatttttggacttgactttagctggtggcaagaatctgtagttaggtggcactgccttctgcctgtcagacaaacctctgcatctaatttggtgctatgagtgctctgatcaaggtctattgatgtcaacagcaaagatgatattagattcctgatctagtgaggtgcagctccatctttctgggtagtgggcgcctttgtgggagagaaaatggagggtgggatacaatagatggtttctcaaaaccacaggaggaagtaatgttcaactgttgggaaacattgaaagctggatgttgggctgagaaccaatgaatcatgatgtttaatcgtcataaacttgtagctgtaagacttatggtgaccattctgtccattcaatcaagactgaccaaaattttc

SEQ ID NO: 16438 - protein, 262 aa, Zea mays subsp. mays
  peptide (1)..(262): Ceres Seq. ID no. 12351545
SSPGSNTQPPNPATTRPLLPPSAPLHPHTGGLQVCWSAVHGRWSSKSATDSGWIRRRRTLGPQGLPASQTSSQWGSRKRLRCVKTRDDGSPSPSPSQGLRRAIPRSTRPLLGADIAAFRSPRRPSTLNRRKSDLLVNEYKHTMALSPEKDKYYTTRGSPFPFEGNGFDFGTITEDKGTTSLPRFFIALSNKEKEEDFMAMKGSKLPQRPKKRPKLMQKCLLMVSPGAWLSDLSHERYEVREKKSSKKRARGLKALSMASDSE

SEQ ID NO: 16439 - DNA, 1252 bp, Zea mays subsp. mays
  misc_feature (1)..(1252): Ceres Seq. ID no. 12434879
  misc_feature (1)..(1252): Ortholog of  Ceres SEQ ID NO 12598859 as cited in SEQ ID NO 62872
  misc_feature (1)..(1252): Ortholog of  Ceres SEQ ID NO 13598749 as cited in SEQ ID NO 64341
  misc_feature (1)..(1252): Ortholog of  Ceres SEQ ID NO 15179157 as cited in SEQ ID NO 0
aagaatccagcctccactacccccagccgggccagcccccccaagccaagcagaatcctcgccccgcaatgcagcacctggccgccgtgctcctcgtcctggcggctaccaccgcgctgccgcccggcgcggcggcgtggcgcccgtggccgccgcgcgacaacgcgacggctgcggcgggccttggcgcgtccaagaggctggagggctcgtcggagttcgtgaagctggagtaccacatgggcccggtcctggcgtcggccatcacggtgcacccgatctggtacgggccctggccggcggcgcaggaagcgcacgatccgcgcgttcctccgctccctgtcgccttctgccgccatcccttcgccgtccgtgtcggcgtggtggcgcacggtgcggctgtaccgcggaccagacctcggccaacgtgtcggcgtcggtgtcgctgggcgcggagaagtcggacgcgcgcatgtcccgcggcgcgcggctgtcgcgcatggacatccaggcagtggtccgcgacgccgtgacggcgcgcacccggcccctgcccgtggacgccagcggcggcgtgtacctggtgctcacgtccccggacgtcgccgtggacgacttctgcgggcaggtgtgcggcttccactacttcaccttcgcgtcggtggtcgggtccacgctgccgtacgcgtgggtgggcaactcggcgcgcaggtgccccgaggtgtgcgcgtacccgttcgcggtcccggcgtacgtgcgcgggcgcaggcccgagtcccccgcccaacggcgacgtcggggtggacggcatggtcagcgtcatcgcgcacgagctcgcggagatggcgtccaacccgctcgccaacgcctggtacgccggcggcgacccgtcgttccccacggagatcgcagacctctgcgagggcatctacggcaccggcgggggaggggcgtacacggggcagctgctcacggacgcgcgctccggcgcggcctacaacgtgaacggcgtcggcgggcgcaggttcctcgtgcagtgggtgtggaaccccgtgctcagctactgctccggccccaacgcgctcgaccagtagctgtttgatttcggtttcgtttcatttcgtttcatctacgtaccaatgaatcgaatcctctagcgcatttggattttcctctcctctccccggggaaatccatgggatgcttctgtatagagttgttattatcaattaattaatgccactttcggtgg

SEQ ID NO: 16440 - protein, 366 aa, Zea mays subsp. mays
  peptide (1)..(366): Ceres Seq. ID no. 12434880
RIQPPLPPAGPAPPSQAESSPRNAAPGRRAPRPGGYHRAAARRGGVAPVAAARQRDGCGGPWRVQEAGGLVGVREAGVPHGPGPGVGHHGAPDLVRALAGGAGSARSARSSAPCRLLPPSLRRPCRRGGARCGCTADQTSANVSASVSLGAEKSDARMSRGARLSRMDIQAVVRDAVTARTRPLPVDASGGVYLVLTSPDVAVDDFCGQVCGFHYFTFASVVGSTLPYAWVGNSARRCPEVCAYPFAVPAYVRGRRPESPAQRRRRGGRHGQRHRARARGDGVQPARQRLVRRRRPVVPHGDRRPLRGHLRHRRGRGVHGAAAHGRALRRGLQRERRRRAQVPRAVGVEPRAQLLLRPQRARPVAV

SEQ ID NO: 16441 - protein, 209 aa, Zea mays subsp. mays
  peptide (1)..(209): Ceres Seq. ID no. 12434881
MSRGARLSRMDIQAVVRDAVTARTRPLPVDASGGVYLVLTSPDVAVDDFCGQVCGFHYFTFASVVGSTLPYAWVGNSARRCPEVCAYPFAVPAYVRGRRPESPAQRRRRGGRHGQRHRARARGDGVQPARQRLVRRRRPVVPHGDRRPLRGHLRHRRGRGVHGAAAHGRALRRGLQRERRRRAQVPRAVGVEPRAQLLLRPQRARPVAV

SEQ ID NO: 16442 - protein, 200 aa, Zea mays subsp. mays
  peptide (1)..(200): Ceres Seq. ID no. 12434882
MDIQAVVRDAVTARTRPLPVDASGGVYLVLTSPDVAVDDFCGQVCGFHYFTFASVVGSTLPYAWVGNSARRCPEVCAYPFAVPAYVRGRRPESPAQRRRRGGRHGQRHRARARGDGVQPARQRLVRRRRPVVPHGDRRPLRGHLRHRRGRGVHGAAAHGRALRRGLQRERRRRAQVPRAVGVEPRAQLLLRPQRARPVAV

SEQ ID NO: 16443 - DNA, 2024 bp, Zea mays subsp. mays
  misc_feature (1)..(2024): Ceres Seq. ID no. 12362351
  misc_feature (1)..(2024): Ortholog of  Ceres SEQ ID NO 14304867 as cited in SEQ ID NO 54375
attttgggggctctaaaatagcctcgccctcctcgtgccttatcttcatctcacctcctctttctcctccgtgctgatcggcagtctctaagctttgcaacaactgatagccgaattccgcgcgccggtccctaaaaaaatgcaagtactaggtagtagataagatgcatttcccagtaatttttcgttattatatatacgcagcacgggaaggaggggagacactctgttcaaccaccagccgagttcgcagcggcactccaggtccagcagtctcttcggctcttcgttggtggtgcgtggacaccggaaattacctcggggattgcgttcctgatctaagcccggcatgaagtgctgctcagagcgtttgctgctcctgctcctgctgctgctggcatcgtcgtcgttactgtccgtcgtggttgccgcgcagcagacttgccctgccgacctcgacagcaaatgcgacggtggtgcgcctgatgactgggagggggaattcttccccggcgtcccgaaaatcaagtatgagggtccaacaagcaagaaccctcttgcttataagtggtataacaaggaggaagtcattctcggaaagaagatgaaggactggatgcgcttcagtgttgcgttctggcacacgttccgtggtactggcgccgatccttttggtgcgcctacaaaggtttggccttgggaggacggcacaaattcgttggccatggctaagagaagaatgagagctcactttgagttcatggagaagctgggggttgacaaatggtgcttccatgatagggatattgcccctgatgggaaaactctcgaagaaacaaatgctaacttggatgagatagttgagctggcaaagcagctccagggtgagaccaatataaagccattgtggggtactgcacagctctttatgcatcctcgttacatgcacggagctgctactagcccagaggttaaagtatatgcatatgcggctgcacaagttaagaaagctttggaggtcactcactacctaggtggtgaaaactatgtgttttggggtggaagagagggttaccaaactcttctgaacactgatcttaagagagaacttgaccatttggctaactttcttcaagctgctgttgactacaagaagaagattggattcaacggaacactgttgatagagcctaaaccacaggaacctacaaaacaccagtatgactgggatgttgcaactacgtttgcttttctacagaagtatggtcttaccggagagttcaagattaatgttgagtgcaaccatgctactctatctggacatagctgccatcatgaactggagactgcacgcattaatgggctgcttgggaacattgatgcaaacactggtgatcctcaagttggctgggacacggatcagttcatgacagacattgcagaggctactttggttatgtcaactgtggttaagaatggtggacttgcacctggtggcttcaactttgacgccaaattgcggagggaaagcactgatgttgaggacttgtttcttgctcatatctccggaatggacaccctggcccgtggcctccgcaacgccgccaagctgatcgaggatggttccctagatgctctcgtccgcaagcggtaccggagctttgatagtgagatgggtgccttgatcgaggctgggaaaggagactttgaggcgctggagaagaaggtccttgagtggggtgagcccactgttccgtccggcaagcaggaactggcggagattctgttccactctgctctatagatggcgccatgtccgtagcggtagctcctggaataagcaagcactgagcctgcgcccctcctaacgcgcgcggtcgtcctcaccaccacgggaatgtttctggttgcgcgcgatgaaccatgtacaatacaccgtggaactgaaatagctagtcagaatttttagaagtgttgcgtcttttgtttggaacggaataaaactgaactttgtggttagtttg

SEQ ID NO: 16444 - protein, 484 aa, Zea mays subsp. mays
  peptide (1)..(484): Ceres Seq. ID no. 12362352
MKCCSERLLLLLLLLLASSSLLSVVVAAQQTCPADLDSKCDGGAPDDWEGEFFPGVPKIKYEGPTSKNPLAYKWYNKEEVILGKKMKDWMRFSVAFWHTFRGTGADPFGAPTKVWPWEDGTNSLAMAKRRMRAHFEFMEKLGVDKWCFHDRDIAPDGKTLEETNANLDEIVELAKQLQGETNIKPLWGTAQLFMHPRYMHGAATSPEVKVYAYAAAQVKKALEVTHYLGGENYVFWGGREGYQTLLNTDLKRELDHLANFLQAAVDYKKKIGFNGTLLIEPKPQEPTKHQYDWDVATTFAFLQKYGLTGEFKINVECNHATLSGHSCHHELETARINGLLGNIDANTGDPQVGWDTDQFMTDIAEATLVMSTVVKNGGLAPGGFNFDAKLRRESTDVEDLFLAHISGMDTLARGLRNAAKLIEDGSLDALVRKRYRSFDSEMGALIEAGKGDFEALEKKVLEWGEPTVPSGKQELAEILFHSAL

SEQ ID NO: 16445 - protein, 399 aa, Zea mays subsp. mays
  peptide (1)..(399): Ceres Seq. ID no. 12362353
MKDWMRFSVAFWHTFRGTGADPFGAPTKVWPWEDGTNSLAMAKRRMRAHFEFMEKLGVDKWCFHDRDIAPDGKTLEETNANLDEIVELAKQLQGETNIKPLWGTAQLFMHPRYMHGAATSPEVKVYAYAAAQVKKALEVTHYLGGENYVFWGGREGYQTLLNTDLKRELDHLANFLQAAVDYKKKIGFNGTLLIEPKPQEPTKHQYDWDVATTFAFLQKYGLTGEFKINVECNHATLSGHSCHHELETARINGLLGNIDANTGDPQVGWDTDQFMTDIAEATLVMSTVVKNGGLAPGGFNFDAKLRRESTDVEDLFLAHISGMDTLARGLRNAAKLIEDGSLDALVRKRYRSFDSEMGALIEAGKGDFEALEKKVLEWGEPTVPSGKQELAEILFHSAL

SEQ ID NO: 16446 - protein, 395 aa, Zea mays subsp. mays
  peptide (1)..(395): Ceres Seq. ID no. 12362354
MRFSVAFWHTFRGTGADPFGAPTKVWPWEDGTNSLAMAKRRMRAHFEFMEKLGVDKWCFHDRDIAPDGKTLEETNANLDEIVELAKQLQGETNIKPLWGTAQLFMHPRYMHGAATSPEVKVYAYAAAQVKKALEVTHYLGGENYVFWGGREGYQTLLNTDLKRELDHLANFLQAAVDYKKKIGFNGTLLIEPKPQEPTKHQYDWDVATTFAFLQKYGLTGEFKINVECNHATLSGHSCHHELETARINGLLGNIDANTGDPQVGWDTDQFMTDIAEATLVMSTVVKNGGLAPGGFNFDAKLRRESTDVEDLFLAHISGMDTLARGLRNAAKLIEDGSLDALVRKRYRSFDSEMGALIEAGKGDFEALEKKVLEWGEPTVPSGKQELAEILFHSAL

SEQ ID NO: 16447 - DNA, 1368 bp, Zea mays subsp. mays
  misc_feature (1)..(1368): Ceres Seq. ID no. 12357062
  misc_feature (1)..(1368): Ortholog of  Ceres SEQ ID NO 13598313 as cited in SEQ ID NO 68293
aaaaaagaaaaaaaccacaaagagattcctctcaccaccaccaaccctagacgatcctcctccgccatgatgcgggacggcgtgcctccgtcggtggccggctccggcggcgcggcgggcggcgacgggcccaggcgatgctcgcagtgcgggcaccacgggcacaacgcgcgaacctgcacggcgcggcccgtcaagctcttcggcgtgcgcatcggggacaagcccatccggaagagcgccagcatggggaacatcgcgcacctcgccgcggagggcagcggcggcagggaggaagggtacggctccgacggggagcgcccgcacaagaagcgaggtgaggcatggactgaagaggagcacaagaagtttctgcttgggttgaataagctagggaaaggcgattggcgtggtatatcccgtaaatatgttgtttcaaggacacctactcaagtggctagccatgcgcaaaagtatttcaatcgccaaacaaatgtgcatagaagaaagagaagatcaagcctattcgatatggtgattgatgacccgtctgatcaacttccgctctcgcgttcatcttcacaagaaatggagcagcaacatttagatgatccacagcctgttgcagccctgcctgcacctgtggtctctccagctactgtggtacctcctgtgcctgtggaagtgtctgcttcagttccatcgccagttcaggtcccagttccagtttcagccccagtgatgacatctcagcctatggaacaggactcagataccacaagttcaattgctggagaggcaggaacggtgatgccaggagccatgcccccctatctttatccaatgatgattcctcctccatactaccatactgcttttgtaccaatgccctgctacggttatgttcctttttactgtgagccacaaggtgctgcacaggctccgcatgaggttgtcaagccagtggctgttcattcaacgcctccactgaatgccaaagacctttacaacatgtctgaattgagcctgaagggcgactcgaatgcaaacggtggtgtgcctgcttcccccttgcctccgaagccgatcggtagaccagagaggcaatctgctttccatggcaaaggacctacacctaccggtggctcgtcaggtggactgattcctgcagtcaagtgaattcgattatgctcctaaacatgccttcatgtgtatgtaatactagaaatagccaaatcgtaatagccgcctgtgctgctaaaatggtggtgtgttttctagcaaaatatctatactgctcattttagccttcaccagtttggaagtcatgatccgagggtaaatatattgttagcttgttgtttttgt

SEQ ID NO: 16448 - protein, 392 aa, Zea mays subsp. mays
  peptide (1)..(392): Ceres Seq. ID no. 12357063
KKEKNHKEIPLTTTNPRRSSSAMMRDGVPPSVAGSGGAAGGDGPRRCSQCGHHGHNARTCTARPVKLFGVRIGDKPIRKSASMGNIAHLAAEGSGGREEGYGSDGERPHKKRGEAWTEEEHKKFLLGLNKLGKGDWRGISRKYVVSRTPTQVASHAQKYFNRQTNVHRRKRRSSLFDMVIDDPSDQLPLSRSSSQEMEQQHLDDPQPVAALPAPVVSPATVVPPVPVEVSASVPSPVQVPVPVSAPVMTSQPMEQDSDTTSSIAGEAGTVMPGAMPPYLYPMMIPPPYYHTAFVPMPCYGYVPFYCEPQGAAQAPHEVVKPVAVHSTPPLNAKDLYNMSELSLKGDSNANGGVPASPLPPKPIGRPERQSAFHGKGPTPTGGSSGGLIPAVK

SEQ ID NO: 16449 - protein, 370 aa, Zea mays subsp. mays
  peptide (1)..(370): Ceres Seq. ID no. 12357064
MMRDGVPPSVAGSGGAAGGDGPRRCSQCGHHGHNARTCTARPVKLFGVRIGDKPIRKSASMGNIAHLAAEGSGGREEGYGSDGERPHKKRGEAWTEEEHKKFLLGLNKLGKGDWRGISRKYVVSRTPTQVASHAQKYFNRQTNVHRRKRRSSLFDMVIDDPSDQLPLSRSSSQEMEQQHLDDPQPVAALPAPVVSPATVVPPVPVEVSASVPSPVQVPVPVSAPVMTSQPMEQDSDTTSSIAGEAGTVMPGAMPPYLYPMMIPPPYYHTAFVPMPCYGYVPFYCEPQGAAQAPHEVVKPVAVHSTPPLNAKDLYNMSELSLKGDSNANGGVPASPLPPKPIGRPERQSAFHGKGPTPTGGSSGGLIPAVK

SEQ ID NO: 16450 - protein, 369 aa, Zea mays subsp. mays
  peptide (1)..(369): Ceres Seq. ID no. 12357065
MRDGVPPSVAGSGGAAGGDGPRRCSQCGHHGHNARTCTARPVKLFGVRIGDKPIRKSASMGNIAHLAAEGSGGREEGYGSDGERPHKKRGEAWTEEEHKKFLLGLNKLGKGDWRGISRKYVVSRTPTQVASHAQKYFNRQTNVHRRKRRSSLFDMVIDDPSDQLPLSRSSSQEMEQQHLDDPQPVAALPAPVVSPATVVPPVPVEVSASVPSPVQVPVPVSAPVMTSQPMEQDSDTTSSIAGEAGTVMPGAMPPYLYPMMIPPPYYHTAFVPMPCYGYVPFYCEPQGAAQAPHEVVKPVAVHSTPPLNAKDLYNMSELSLKGDSNANGGVPASPLPPKPIGRPERQSAFHGKGPTPTGGSSGGLIPAVK

SEQ ID NO: 16451 - DNA, 1564 bp, Zea mays subsp. mays
  misc_feature (1)..(1564): Ceres Seq. ID no. 12369286
  misc_feature (1)..(1564): Ortholog of  Ceres SEQ ID NO 15170595 as cited in SEQ ID NO 57510
  misc_feature (1)..(1564): Ortholog of  Ceres SEQ ID NO 13655218 as cited in SEQ ID NO 68872
cgcccactaccctctccggctctccgctaacaaaatctagaaccctctgaaccctccacattcctccagatcgaataataacctagctctgcacaccgcccagccaccagtggcagcaggagcaggggtcggaacaagatggtggtgacggcggccggcagcgcggaggaggctgtgcggcggtgggtggacgccgccggaggacgcctcgtcctcgacggcgggctggccacggagctcgaggccaacggcgccgacctcaacgacccgctctggagcgctaagtgcctcctctcctccccgcacctcatccgcaaggtccacatggactatctggaagctggcgcaaacattataatcacagcatcgtatcaggccactattcaagggtttgaatcaaagggtttttcaaaagaacagagtgaaaacttactaacaaagagtgtcgagattgcactggaagctcgtgagatgttcttgaaggaacatctggagaagtccactcctatacagcacccggttctggtcgcagcgtctttagggagttatggagcttatcttgccgatggctccgagtacagtggggattatggtgaagctggtacgaaagagttcctgaaagatttccatcggcggaggctccaggttcttgcggaagcaggccccgatttgattgctttcgaaacgattcccaacaaactggaagctgaggcgtatgtcgaacttctcgaggagtgcaacatcaatatccctgcatggttttccttcaactcaaaagatggagtgcatattgtgagcggtgactcgttaatcgaatgcactactattgctgacaagtgtgcaaaggttggtgcggtcgggataaactgcacacctccaagatttatccatggactgatactctccattcgaaaggtcacggacaagcccattctgatatatcccaacagtggcgaaagatacgatggtgaaaaaaaggagtgggtggaatccactggtgtgtcagatggtgattttgtttcttatgtgaacgagtggtgcaaagacggggctgtgcttatcggtggctgctgcaggacaactccaaacactatcagggccatacacagaactctgaacaaaagccccaacaagcagcagttacctgctgtagaataagagctgtgctctactctgatgcgcccgccttcctcctagcagtacctcgaggctataactccatgattccgtaaccgtacgtgttcgttctcttgcaaacgagatgtttgtaaataacgctgtatttctgggttctgagatatgcaacttggatggaggtacaaccggtgaaggggggtgaggaagcagcaacaatggtaagagttctactactgagtgggggaaaaacaacttgcggctgggttagtgaagcttagtagctaccactattcaagagttaaagggagttcgtatgacagttcctctggagatgttatcttcaaagtcttatatcactgctacttgtgagctgtgttaaaacctatatatataagttttgtttgacgtgactgcattaaagatagtg

SEQ ID NO: 16452 - protein, 339 aa, Zea mays subsp. mays
  peptide (1)..(339): Ceres Seq. ID no. 12369287
MVVTAAGSAEEAVRRWVDAAGGRLVLDGGLATELEANGADLNDPLWSAKCLLSSPHLIRKVHMDYLEAGANIIITASYQATIQGFESKGFSKEQSENLLTKSVEIALEAREMFLKEHLEKSTPIQHPVLVAASLGSYGAYLADGSEYSGDYGEAGTKEFLKDFHRRRLQVLAEAGPDLIAFETIPNKLEAEAYVELLEECNINIPAWFSFNSKDGVHIVSGDSLIECTTIADKCAKVGAVGINCTPPRFIHGLILSIRKVTDKPILIYPNSGERYDGEKKEWVESTGVSDGDFVSYVNEWCKDGAVLIGGCCRTTPNTIRAIHRTLNKSPNKQQLPAVE

SEQ ID NO: 16453 - protein, 277 aa, Zea mays subsp. mays
  peptide (1)..(277): Ceres Seq. ID no. 12369288
MDYLEAGANIIITASYQATIQGFESKGFSKEQSENLLTKSVEIALEAREMFLKEHLEKSTPIQHPVLVAASLGSYGAYLADGSEYSGDYGEAGTKEFLKDFHRRRLQVLAEAGPDLIAFETIPNKLEAEAYVELLEECNINIPAWFSFNSKDGVHIVSGDSLIECTTIADKCAKVGAVGINCTPPRFIHGLILSIRKVTDKPILIYPNSGERYDGEKKEWVESTGVSDGDFVSYVNEWCKDGAVLIGGCCRTTPNTIRAIHRTLNKSPNKQQLPAVE

SEQ ID NO: 16454 - protein, 228 aa, Zea mays subsp. mays
  peptide (1)..(228): Ceres Seq. ID no. 12369289
MFLKEHLEKSTPIQHPVLVAASLGSYGAYLADGSEYSGDYGEAGTKEFLKDFHRRRLQVLAEAGPDLIAFETIPNKLEAEAYVELLEECNINIPAWFSFNSKDGVHIVSGDSLIECTTIADKCAKVGAVGINCTPPRFIHGLILSIRKVTDKPILIYPNSGERYDGEKKEWVESTGVSDGDFVSYVNEWCKDGAVLIGGCCRTTPNTIRAIHRTLNKSPNKQQLPAVE

SEQ ID NO: 16455 - DNA, 1460 bp, Zea mays subsp. mays
  misc_feature (1)..(1460): Ceres Seq. ID no. 12350660
  misc_feature (1)..(1460): Ortholog of  Ceres SEQ ID NO 13597710 as cited in SEQ ID NO 64509
gactagctattagggttttgtttgcaaaccccaattcgattcccaaccacatcagccgccgccgtcccgtcaccaccaccaaccttggtagcagccgccgtccggtcatcaccaccaccttggtagccgccgccgaagcgcgccgcgggcgcgggcgctcgcgatggctaaccgcacggaccccctcgcgaagagcatccatgggacgaacccacaaaacctggtggagaagatcgtgcgctccaagatctatcagagcacctactggaaggagcaatgcttcggcctcaccgcagagacgctagtcgacaaggccatggagctcgaccacaccggcggaacctacggcggcaaccgcaagcccacccctttcctctgcctcgcgctcaagatgctgcagatccaaccagacaaggacatcgtagtcgagttcatcaagaacgaggattacaagtatgttcgtgttctcggggccttctacctgcgtctcactggcacaattgctgacgtctaccagtatcttgagccgctctacaacgactaccgcaagatcaggcacaagctcagcgatggacagttcacacttacccatgttgatgagttcattgatgagttgctgaccaaggattactcctgtgatacagccatgcctcgcatccagaaaagatgggttcttgaagcgtctggaactctggaaccgagaagaagtgcacttgaggacgattttgaggaagaagaggaagacaaggaggaacagcctatggaaattgatgaaccgaatggtcgtgaaaatgataatcatcgtggaaggagccttgccagggaacgggatagggactgggaccatgacaggaaacatgaaaggcataacagggacaaagattatgatagagatcgggattatgatagggactatgggagagggcgggaaagacaccgagatagagatcgtgaaagagacagaaaccgggatagggatagagaccgtcaccgcctgcgagatgatgattacaatcgcaacagggatagggacagggagagggatggtagggaaagggagcgccgagacagagaccgtggcaggcacaggagccgctcaaggagcagagatcgacgggacagagaccgtgaagatggagagtaccgcaggaggcgtggtcgtggcagtgtaagtcctcgaggacgtggtgaagacggtggcccaagagaggaacctaagaggaagaaggaaaagaaagagaagggtgaaggaaatgctccggacccgaatgaccctgagatcatagaaatgaacaagctacgggcctcactggggttgaaaccactaaagtagtttacacgagtaatgttcaacttgacctgcatccaaccttttttgtgctggactttttcagcttgatgtaactaaacttttgtattgatgtggttatatattcatcagggcttccatttctgtctgc

SEQ ID NO: 16456 - protein, 389 aa, Zea mays subsp. mays
  peptide (1)..(389): Ceres Seq. ID no. 12350661
MANRTDPLAKSIHGTNPQNLVEKIVRSKIYQSTYWKEQCFGLTAETLVDKAMELDHTGGTYGGNRKPTPFLCLALKMLQIQPDKDIVVEFIKNEDYKYVRVLGAFYLRLTGTIADVYQYLEPLYNDYRKIRHKLSDGQFTLTHVDEFIDELLTKDYSCDTAMPRIQKRWVLEASGTLEPRRSALEDDFEEEEEDKEEQPMEIDEPNGRENDNHRGRSLARERDRDWDHDRKHERHNRDKDYDRDRDYDRDYGRGRERHRDRDRERDRNRDRDRDRHRLRDDDYNRNRDRDRERDGRERERRDRDRGRHRSRSRSRDRRDRDREDGEYRRRRGRGSVSPRGRGEDGGPREEPKRKKEKKEKGEGNAPDPNDPEIIEMNKLRASLGLKPLK

SEQ ID NO: 16457 - protein, 338 aa, Zea mays subsp. mays
  peptide (1)..(338): Ceres Seq. ID no. 12350662
MELDHTGGTYGGNRKPTPFLCLALKMLQIQPDKDIVVEFIKNEDYKYVRVLGAFYLRLTGTIADVYQYLEPLYNDYRKIRHKLSDGQFTLTHVDEFIDELLTKDYSCDTAMPRIQKRWVLEASGTLEPRRSALEDDFEEEEEDKEEQPMEIDEPNGRENDNHRGRSLARERDRDWDHDRKHERHNRDKDYDRDRDYDRDYGRGRERHRDRDRERDRNRDRDRDRHRLRDDDYNRNRDRDRERDGRERERRDRDRGRHRSRSRSRDRRDRDREDGEYRRRRGRGSVSPRGRGEDGGPREEPKRKKEKKEKGEGNAPDPNDPEIIEMNKLRASLGLKPLK

SEQ ID NO: 16458 - protein, 313 aa, Zea mays subsp. mays
  peptide (1)..(313): Ceres Seq. ID no. 12350663
MLQIQPDKDIVVEFIKNEDYKYVRVLGAFYLRLTGTIADVYQYLEPLYNDYRKIRHKLSDGQFTLTHVDEFIDELLTKDYSCDTAMPRIQKRWVLEASGTLEPRRSALEDDFEEEEEDKEEQPMEIDEPNGRENDNHRGRSLARERDRDWDHDRKHERHNRDKDYDRDRDYDRDYGRGRERHRDRDRERDRNRDRDRDRHRLRDDDYNRNRDRDRERDGRERERRDRDRGRHRSRSRSRDRRDRDREDGEYRRRRGRGSVSPRGRGEDGGPREEPKRKKEKKEKGEGNAPDPNDPEIIEMNKLRASLGLKPLK

SEQ ID NO: 16459 - DNA, 1692 bp, Zea mays subsp. mays
  misc_feature (1)..(1692): Ceres Seq. ID no. 12367838
  misc_feature (1)..(1692): Ortholog of  Ceres SEQ ID NO 12583469 as cited in SEQ ID NO 51031
  misc_feature (1)..(1692): Ortholog of  Ceres SEQ ID NO 13597389 as cited in SEQ ID NO 63426
  misc_feature (1)..(1692): Ortholog of  Ceres SEQ ID NO 13595998 as cited in SEQ ID NO 68161
  misc_feature (1)..(1692): Ortholog of  Ceres SEQ ID NO 15180463 as cited in SEQ ID NO 0
agcactcactcacgcccggccctgcactgcacgcgcgcggcgggagatcgagaagagactttgctcggttttggtaggcatccgcgcggagcgtgaccagacggtgtagagactacatagatcggaagggggtcggaaggggatctagacatagagactagagagcgaggaggatgaccggcgttgttgcaggcgccggagggggcaacaaggcggcgcccgccacgctgcggctgcaccactaccttgtgatggccggggtggcggcggcggtcgtcctcgcctgcctccggtacgcgccggaccccgcggggtacggcttcctggccgtggcgccgcggccggtggaggccgatgctggtgcccggcgggacaccactcctccaccgcgcccgtcgtcgtcgtcggtggtcatcttcaacttcggtgactccaactccgacacgggcggcatggcggcggtcaacgggatgaacattaacctgcccgagggacgcaccttcttccgccgccccaccggaaggctctccgacggccgcctcgtcatcgacttcatctgtgagagcctgcacacgcctttcctgagcccatacctcaaggcgctgggcgcggatttcagcaacggcgtgaacttcgccatcggcgggtccacggcgacgccggggggctctcccttctcgctggacgtgcagctccatcagtggctctacttcagggccaggtccatggagatgatcaacctaggacagaggcctcccatcgatcgcgaaggattccgaaaggccatctacaccatcgacatcgggcaaaacgacgtgtctgcttacatgcacctgccctacgaccaagtgcttgccaagatccccggatttgttgctcagatcaagtacaccatcgagacgctgtactcgcacggggcccgcaagttctggatccacggcacgggcgcgctgggctgcctgccgcagaagctggccatcccgcgggacgccgacgacggcgaccagctggacgcccacggctgcctcaagacctacaacaacgccgccaagcgcttcaacgcgctgctcggcgacgcctgcgcccagctccggcgccggatggtggacgcggcgctcgtcttcgtcgacatgtacgccgtcaagtacgacctggtggccaaccacacgacgcacgggatcgagaaacctctcatggcgtgctgcggctacggcgggccgccgtacaactacaaccacttcaaggcgtgcatgtcggcggagatgcagctgtgcgacgtgggcacgcgcttcatcagctgggacggcgtgcacttcaccgaggccgccaacgccatcgtcgccgccaaggtgctcaccggcgactactccacgcccagggtcaccatcgccaaactcgtcaactccacgctgcccaacgacgactagctggctggccgatcgatcgatcgtcgcgtcgtcattctgataaacatactgcaggcaggcttcatcgatccatatccaattgtccgtagaaatctacgactagctcattgtagatccgtaatgtgggctaagagatgcatcatgcatggcgatcgactagctgcccaactcgtcaagagctggttcaccgctctcgtcatgatcgagctagtttggacgagcaaattccatggcaccgagtaacacaattgatatcctcattggc

SEQ ID NO: 16460 - protein, 417 aa, Zea mays subsp. mays
  peptide (1)..(417): Ceres Seq. ID no. 12367839
MTGVVAGAGGGNKAAPATLRLHHYLVMAGVAAAVVLACLRYAPDPAGYGFLAVAPRPVEADAGARRDTTPPPRPSSSSVVIFNFGDSNSDTGGMAAVNGMNINLPEGRTFFRRPTGRLSDGRLVIDFICESLHTPFLSPYLKALGADFSNGVNFAIGGSTATPGGSPFSLDVQLHQWLYFRARSMEMINLGQRPPIDREGFRKAIYTIDIGQNDVSAYMHLPYDQVLAKIPGFVAQIKYTIETLYSHGARKFWIHGTGALGCLPQKLAIPRDADDGDQLDAHGCLKTYNNAAKRFNALLGDACAQLRRRMVDAALVFVDMYAVKYDLVANHTTHGIEKPLMACCGYGGPPYNYNHFKACMSAEMQLCDVGTRFISWDGVHFTEAANAIVAAKVLTGDYSTPRVTIAKLVNSTLPNDD

SEQ ID NO: 16461 - protein, 391 aa, Zea mays subsp. mays
  peptide (1)..(391): Ceres Seq. ID no. 12367840
MAGVAAAVVLACLRYAPDPAGYGFLAVAPRPVEADAGARRDTTPPPRPSSSSVVIFNFGDSNSDTGGMAAVNGMNINLPEGRTFFRRPTGRLSDGRLVIDFICESLHTPFLSPYLKALGADFSNGVNFAIGGSTATPGGSPFSLDVQLHQWLYFRARSMEMINLGQRPPIDREGFRKAIYTIDIGQNDVSAYMHLPYDQVLAKIPGFVAQIKYTIETLYSHGARKFWIHGTGALGCLPQKLAIPRDADDGDQLDAHGCLKTYNNAAKRFNALLGDACAQLRRRMVDAALVFVDMYAVKYDLVANHTTHGIEKPLMACCGYGGPPYNYNHFKACMSAEMQLCDVGTRFISWDGVHFTEAANAIVAAKVLTGDYSTPRVTIAKLVNSTLPNDD

SEQ ID NO: 16462 - protein, 324 aa, Zea mays subsp. mays
  peptide (1)..(324): Ceres Seq. ID no. 12367841
MAAVNGMNINLPEGRTFFRRPTGRLSDGRLVIDFICESLHTPFLSPYLKALGADFSNGVNFAIGGSTATPGGSPFSLDVQLHQWLYFRARSMEMINLGQRPPIDREGFRKAIYTIDIGQNDVSAYMHLPYDQVLAKIPGFVAQIKYTIETLYSHGARKFWIHGTGALGCLPQKLAIPRDADDGDQLDAHGCLKTYNNAAKRFNALLGDACAQLRRRMVDAALVFVDMYAVKYDLVANHTTHGIEKPLMACCGYGGPPYNYNHFKACMSAEMQLCDVGTRFISWDGVHFTEAANAIVAAKVLTGDYSTPRVTIAKLVNSTLPNDD

SEQ ID NO: 16463 - DNA, 1073 bp, Zea mays subsp. mays
  misc_feature (1)..(1073): Ceres Seq. ID no. 12405278
  misc_feature (1)..(1073): Ortholog of  Ceres SEQ ID NO 14301944 as cited in SEQ ID NO 0
aatccccacccgcaacaaaccaaacccaaccgcaactgcaacacagaggcatctctctccgcctccacgccgccgcccccagaccctcctcgatccaggcggtgattcgccgggctcccggcccggccatggatttgctggcgtccttggccgccgaggagcggtggctgttcccggcgttcctcgccatgtacgccgccatctactgcgccggccagctcgtcgtgttccggcggtgggcgccgcggcagaggctcgacggcgccagctgcctcatctcgctattccacggcacccccgccgcgctggccgccgcgggggccatcctcgcgcttcccgcggagtcccgctccttcgccgcgcccaacgcgcgcctccaggaccacgtcctcgactacagcgtcgcctacttcaccatggacctgctccactacctcgcctttctgccgggcgacgtcctcttcatcgcgcaccacctcgccacgctcttcgtcttcctgacctgccgctacctcgtccgccacggcgcctacgcgctcctcgtcctcctcgtcctcgccgaggtcaccagcctgctgcagaacgtctggacgctcgccgggatctggcgggaccagtcccccgccgccgcccgcgtcctacggcgccctctcgccgcccttctacgcgctctacacgctcgtcaggggcgtcgccggcccgctcttcctcctcaagatggccgccttctacctgtccggccaggccgtcgacgtcattccgtggtgggtgcggatctcctggatcctggaggaactgagcggtggggcccgcgcggccaagttatcctgttcgctaccgtgatgtttaccctagtccagagggtttatcttcgttcgtgtcgtgtttgttgttgcccatctgtgtttttgattgcaaggtcgctctgtgtcagttgttagtgctgtgttcatcctcggtttcagcagacccatgcatcaaacagcatggactgcggatcgatggatgctgttacccccgtcaggctttatttctaagttaatcttaaggnaaaaatggtgcttcttggtgct

SEQ ID NO: 16464 - protein, 312 aa, Zea mays subsp. mays
  peptide (1)..(312): Ceres Seq. ID no. 12405279
SPPATNQTQPQLQHRGISLRLHAAAPRPSSIQAVIRRAPGPAMDLLASLAAEERWLFPAFLAMYAAIYCAGQLVVFRRWAPRQRLDGASCLISLFHGTPAALAAAGAILALPAESRSFAAPNARLQDHVLDYSVAYFTMDLLHYLAFLPGDVLFIAHHLATLFVFLTCRYLVRHGAYALLVLLVLAEVTSLLQNVWTLAGIWRDQSPAAARVLRRPLAALLRALHARQGRRRPALPPQDGRLLPVRPGRRRHSVVGADLLDPGGTERWGPRGQVILFATVMFTLVQRVYLRSCRVCCCPSVFLIARSLCVSC

SEQ ID NO: 16465 - protein, 270 aa, Zea mays subsp. mays
  peptide (1)..(270): Ceres Seq. ID no. 12405280
MDLLASLAAEERWLFPAFLAMYAAIYCAGQLVVFRRWAPRQRLDGASCLISLFHGTPAALAAAGAILALPAESRSFAAPNARLQDHVLDYSVAYFTMDLLHYLAFLPGDVLFIAHHLATLFVFLTCRYLVRHGAYALLVLLVLAEVTSLLQNVWTLAGIWRDQSPAAARVLRRPLAALLRALHARQGRRRPALPPQDGRLLPVRPGRRRHSVVGADLLDPGGTERWGPRGQVILFATVMFTLVQRVYLRSCRVCCCPSVFLIARSLCVSC

SEQ ID NO: 16466 - protein, 265 aa, Zea mays subsp. mays
  peptide (1)..(265): Ceres Seq. ID no. 12405281
IPTRNKPNPTATATQRHLSPPPRRRPQTLLDPGGDSPGSRPGHGFAGVLGRRGAVAVPGVPRHVRRHLLRRPARRVPAVGAAAEARRRQLPHLAIPRHPRRAGRRGGHPRASRGVPLLRRAQRAPPGPRPRLQRRLLHHGPAPLPRLSAGRRPLHRAPPRHALRLPDLPLPRPPRRLRAPRPPRPRRGHQPAAERLDARRDLAGPVPRRRPRPTAPSRRPSTRSTRSSGASPARSSSSRWPPSTCPARPSTSFRGGCGSPGSWRN

SEQ ID NO: 16467 - DNA, 1891 bp, Zea mays subsp. mays
  misc_feature (1)..(1891): Ceres Seq. ID no. 12366083
  misc_feature (1)..(1891): Ortholog of  Ceres SEQ ID NO 14303197 as cited in SEQ ID NO 66883
atatattaaccgcgcaccttttgtcctctccttgttcccaaacctctgctagcttcgcttccaaccccatcgatacttcccagcaagctacactacaagctcatccgcctagtcctttcatggccgatcaccagcctcaggtcgaggtcctgaccgagtcagtgcgggtcaacggcaccaaggcggaggccacgctcgtgggaggcgagctggcgtggcgccccgccgccggcggcaacggagaggggcaggagcggcggctggagctggagtcggaggtgctcgggttccagatggacgggaggcagctcaaattcgcgacctttgccgcgagcggcggcggtaatgggaaagggggaggaggggatgggaatcggaggagaggggaggtggagatggagatggagaacgaggccaccgcggtgcggtggggggacgtaatcagtgatcgcctagcctcgctcggccggccaaagaaattgttcattatagtgaacccttatggtggaaagagaagcggaccgagtattttccagaatgaagtcctccccctcattgaagcttctggcgtgctttatacgatgcaagaaaccaagcatcgccttcatgctcaagagattgcacattcacttgatcttaggaagtatgacggcatcatttgtgtcagtggagatggtgtgatggtagaggttgtcaatggtctcctgcaaagggaggactgggaagcagcaataaaagtgccccttgggatcattccagcaggtactggaaatggaatggcacgatctctactgcatgctgctggtgaaccattctctatatctaatgctgtgttcgcaatcatcagaggtcataaacgtgcccttgatgttacttctgttgtgcagggaaaggcgaggttctttagtgtcctgatgcttacatggggtctggtggctgatgttgatattgaatcagagaagtataggtggatgggaagtgctcgccttgatttttatcttctactccgcattctgaacctgcgacggtacaatgggcgtatcctttttgttccagcaccaggatacgaagaagttggtgatcctgtggaccaagctaccggttacgaaacaaacgggtttagcacgggatttcaagacgacggaagaaccggcagtaatggtgagacgtgtggctatgtgggcccatcgtcgatcaaagaagctggtcttagatggagatcactggatgggccattcgtttcagtctggctcggcaatgttcctttcgctagcgaagatgccatggcagcaccaaaagctgagtttgcggatggctacttggatgctgctataatcaaggattgtcctcggtgggatgtcctcgggctcgtgttccagatgaaggacggcagctacgtgaactcgccatgcgtggagtacttcaaggtgaaggcgatccggatcgagccgggcctgcgcgtgggcagcagcaccgagggcggtatcatcgactcggacggggaggtgatcgcgaggggcgacgagtccgattcccgcgccggcgacgacgagccggggcacctgatggcgtacggcccgcccatccagctgacggtggaccaggggctggccaccatcttctccccgagatgacgatccttctctcagttctcctccaccgcctgcgagtaatttgcttcgtctagccctgcctgccattctctcgcgtaggatcatgtgcttctgtatgtaaatattgctcacagcccaccccagttggatgagcgatgagccaagagggacggatactggctggatctccgtctatagattgttttatttccctgcccacatggctgccgcttttagtgctagcttgagaaatgagagctgggcagttcataagcttc

SEQ ID NO: 16468 - protein, 543 aa, Zea mays subsp. mays
  peptide (1)..(543): Ceres Seq. ID no. 12366084
ILTAHLLSSPCSQTSASFASNPIDTSQQATLQAHPPSPFMADHQPQVEVLTESVRVNGTKAEATLVGGELAWRPAAGGNGEGQERRLELESEVLGFQMDGRQLKFATFAASGGGNGKGGGGDGNRRRGEVEMEMENEATAVRWGDVISDRLASLGRPKKLFIIVNPYGGKRSGPSIFQNEVLPLIEASGVLYTMQETKHRLHAQEIAHSLDLRKYDGIICVSGDGVMVEVVNGLLQREDWEAAIKVPLGIIPAGTGNGMARSLLHAAGEPFSISNAVFAIIRGHKRALDVTSVVQGKARFFSVLMLTWGLVADVDIESEKYRWMGSARLDFYLLLRILNLRRYNGRILFVPAPGYEEVGDPVDQATGYETNGFSTGFQDDGRTGSNGETCGYVGPSSIKEAGLRWRSLDGPFVSVWLGNVPFASEDAMAAPKAEFADGYLDAAIIKDCPRWDVLGLVFQMKDGSYVNSPCVEYFKVKAIRIEPGLRVGSSTEGGIIDSDGEVIARGDESDSRAGDDEPGHLMAYGPPIQLTVDQGLATIFSPR

SEQ ID NO: 16469 - protein, 504 aa, Zea mays subsp. mays
  peptide (1)..(504): Ceres Seq. ID no. 12366085
MADHQPQVEVLTESVRVNGTKAEATLVGGELAWRPAAGGNGEGQERRLELESEVLGFQMDGRQLKFATFAASGGGNGKGGGGDGNRRRGEVEMEMENEATAVRWGDVISDRLASLGRPKKLFIIVNPYGGKRSGPSIFQNEVLPLIEASGVLYTMQETKHRLHAQEIAHSLDLRKYDGIICVSGDGVMVEVVNGLLQREDWEAAIKVPLGIIPAGTGNGMARSLLHAAGEPFSISNAVFAIIRGHKRALDVTSVVQGKARFFSVLMLTWGLVADVDIESEKYRWMGSARLDFYLLLRILNLRRYNGRILFVPAPGYEEVGDPVDQATGYETNGFSTGFQDDGRTGSNGETCGYVGPSSIKEAGLRWRSLDGPFVSVWLGNVPFASEDAMAAPKAEFADGYLDAAIIKDCPRWDVLGLVFQMKDGSYVNSPCVEYFKVKAIRIEPGLRVGSSTEGGIIDSDGEVIARGDESDSRAGDDEPGHLMAYGPPIQLTVDQGLATIFSPR

SEQ ID NO: 16470 - protein, 446 aa, Zea mays subsp. mays
  peptide (1)..(446): Ceres Seq. ID no. 12366086
MDGRQLKFATFAASGGGNGKGGGGDGNRRRGEVEMEMENEATAVRWGDVISDRLASLGRPKKLFIIVNPYGGKRSGPSIFQNEVLPLIEASGVLYTMQETKHRLHAQEIAHSLDLRKYDGIICVSGDGVMVEVVNGLLQREDWEAAIKVPLGIIPAGTGNGMARSLLHAAGEPFSISNAVFAIIRGHKRALDVTSVVQGKARFFSVLMLTWGLVADVDIESEKYRWMGSARLDFYLLLRILNLRRYNGRILFVPAPGYEEVGDPVDQATGYETNGFSTGFQDDGRTGSNGETCGYVGPSSIKEAGLRWRSLDGPFVSVWLGNVPFASEDAMAAPKAEFADGYLDAAIIKDCPRWDVLGLVFQMKDGSYVNSPCVEYFKVKAIRIEPGLRVGSSTEGGIIDSDGEVIARGDESDSRAGDDEPGHLMAYGPPIQLTVDQGLATIFSPR

SEQ ID NO: 16471 - DNA, 1598 bp, Zea mays subsp. mays
  misc_feature (1)..(1598): Ceres Seq. ID no. 12407458
  misc_feature (1)..(1598): Ortholog of  Ceres SEQ ID NO 15225703 as cited in SEQ ID NO 59527
  misc_feature (1)..(1598): Ortholog of  Ceres SEQ ID NO 12615972 as cited in SEQ ID NO 62455
  misc_feature (1)..(1598): Ortholog of  Ceres SEQ ID NO 13596229 as cited in SEQ ID NO 68800
  misc_feature (1)..(1598): Ortholog of  Ceres SEQ ID NO 15179393 as cited in SEQ ID NO 0
gcacgagaccattacctagaacatcctaatcaaaaattcttctttctccgtcctttccatcccaggtcgccaccgcgtctccgcccttccctcctccccaccatcttcagcacgaggcagcacgcgcggacgtccctcccgacacggagaaccccgctccgcgcgctcgcattcatcgcgccgccacccaggtcccagccggccgcgcgcccgcgcccccccgccgccggccgtgccatgccgcggcggggcgagacggcggtggtccccattgacgtggcgtccgccggcggcgggcgaggcgatgagcggcccaagagagagcgccaccggagccacggccccggccgccacggtccgcaccggagtcgcccgccgcccccgcccccgccggcgttccggccgttccggcggtggttcccgttccttgtgccgctattcatcgtcgctaacatcgtcctcttcgtgctcaccatgtacgtcaacgactgccccgcgcacgcgcgggccaccggcgccgcgataggcggatcggtcggcgagagcgccaccgcgcagggctgctggctcgcgcccgagctcgggaggttcgcgttccagtcgttcaaggagaacccgctcatcggcccttcctccgccacgctgttggaaatgggggcactggaaaccagtaaagttaccaaagatcacgaagggtggcgcctcattacatgcatttggttgcatgctggagtcgtccacatactcgccaacatgttgagcctcttaatgatcggaatcaggctcgagaaggaatttggtttcataaggattggtacactgtatgtgatctctggtgttggtggcagcttgctgtcttctctatttatggtgtcaaatatatcagtcggtgcttcaggtgcattatttggactattgggctcaatgctgtcagagctcataacgaattggacgatatatgagaacaagtttgcagcactcttgactctagttatgatcattctcatcaacttagctgttgggatccttccacatgttgacaacttcgctcaccttggaggatttatgtcagggttctgtcttggttttgtgctgctaatgcgaccacagtttggatatattaaccaaaagaactctcctcttggatttcccatgggcgtaactaaacggaagttcaagacatatcaagtcatacttttggttatttctacaatgatactagtttctgggttcaccattggattggtgttgctatttcaagggttcaatgctagtgagcactgttcttggtgccattatatgagctgtgtgcctacttcaaagtggagttgcaacgcaccaaataactactgcatgtcttcacagctcggaaaccaactaaatctgacatgtgaaagcactggaaagaccgcatcatatgttctcagcgatccaaacaactcggaggcgattaaaaatctttgtgtcggtctttgcagttaatagtaatgtctgcattttctaacaggaaattaatgctagcatatctatggattatatgactagaagcctatgcttacattatgattctctggtaatgctattgcggcttctatggc

SEQ ID NO: 16472 - protein, 493 aa, Zea mays subsp. mays
  peptide (1)..(493): Ceres Seq. ID no. 12407459
ARDHYLEHPNQKFFFLRPFHPRSPPRLRPSLLPTIFSTRQHARTSLPTRRTPLRALAFIAPPPRSQPAARPRPPAAGRAMPRRGETAVVPIDVASAGGGRGDERPKRERHRSHGPGRHGPHRSRPPPPPPPAFRPFRRWFPFLVPLFIVANIVLFVLTMYVNDCPAHARATGAAIGGSVGESATAQGCWLAPELGRFAFQSFKENPLIGPSSATLLEMGALETSKVTKDHEGWRLITCIWLHAGVVHILANMLSLLMIGIRLEKEFGFIRIGTLYVISGVGGSLLSSLFMVSNISVGASGALFGLLGSMLSELITNWTIYENKFAALLTLVMIILINLAVGILPHVDNFAHLGGFMSGFCLGFVLLMRPQFGYINQKNSPLGFPMGVTKRKFKTYQVILLVISTMILVSGFTIGLVLLFQGFNASEHCSWCHYMSCVPTSKWSCNAPNNYCMSSQLGNQLNLTCESTGKTASYVLSDPNNSEAIKNLCVGLCS

SEQ ID NO: 16473 - protein, 414 aa, Zea mays subsp. mays
  peptide (1)..(414): Ceres Seq. ID no. 12407460
MPRRGETAVVPIDVASAGGGRGDERPKRERHRSHGPGRHGPHRSRPPPPPPPAFRPFRRWFPFLVPLFIVANIVLFVLTMYVNDCPAHARATGAAIGGSVGESATAQGCWLAPELGRFAFQSFKENPLIGPSSATLLEMGALETSKVTKDHEGWRLITCIWLHAGVVHILANMLSLLMIGIRLEKEFGFIRIGTLYVISGVGGSLLSSLFMVSNISVGASGALFGLLGSMLSELITNWTIYENKFAALLTLVMIILINLAVGILPHVDNFAHLGGFMSGFCLGFVLLMRPQFGYINQKNSPLGFPMGVTKRKFKTYQVILLVISTMILVSGFTIGLVLLFQGFNASEHCSWCHYMSCVPTSKWSCNAPNNYCMSSQLGNQLNLTCESTGKTASYVLSDPNNSEAIKNLCVGLCS

SEQ ID NO: 16474 - protein, 335 aa, Zea mays subsp. mays
  peptide (1)..(335): Ceres Seq. ID no. 12407461
MYVNDCPAHARATGAAIGGSVGESATAQGCWLAPELGRFAFQSFKENPLIGPSSATLLEMGALETSKVTKDHEGWRLITCIWLHAGVVHILANMLSLLMIGIRLEKEFGFIRIGTLYVISGVGGSLLSSLFMVSNISVGASGALFGLLGSMLSELITNWTIYENKFAALLTLVMIILINLAVGILPHVDNFAHLGGFMSGFCLGFVLLMRPQFGYINQKNSPLGFPMGVTKRKFKTYQVILLVISTMILVSGFTIGLVLLFQGFNASEHCSWCHYMSCVPTSKWSCNAPNNYCMSSQLGNQLNLTCESTGKTASYVLSDPNNSEAIKNLCVGLCS

SEQ ID NO: 16475 - DNA, 1553 bp, Zea mays subsp. mays
  misc_feature (1)..(1553): Ceres Seq. ID no. 13498955
  misc_feature (1)..(1553): Ortholog of  Ceres SEQ ID NO 14303539 as cited in SEQ ID NO 67580
actatactctcgcgcggcgagctcctcgagctcgctccccgttccaagatagaaaaatggccgcggcggaagcagcctcctccgcgccggcgcccgagcatctcctggaggtggaggacgacgaggtgctgatcgacttcaagcccaacgccaagtgccgcgccgacctccgcctccgctccctgcacccgtccctccccgtcgccttcaaggtgcagacctcctccccgctcaagttcctcgtcagcccgccgcgcggcgccgtgccgccgctctcctcggcgtccctgcgcgtcgtgctccgcccgcagccgcacgcgccgccgtccttcccgcgctcccgcgccgaccgcttmctcgtcctgtcctcgctctccgcggcgcgcctcgactccgtgggaagcagcaacgacggcggcggcgggggcggagtcagggccgtccgcctccgcgtgttcttcggcgggccgtaccttctccgcctcgccgcggacgccggagacgccgykgccgtgcgcctcatcctgcgccggcagccgcacctgctgccgttcctggagcaccagcaggccgccgcggcgcccgacgccggcgagcakyaktgggcgccgctgcacgcggcggccgccaggggggactgcggtkkagctgaggcggctggggcccgaggcgctggccgcgcgtgaccgygaggggaggacggtcctgcacgcdgtcgccgcggccggcgaggccgagacggtggcggtgctggtggacatgggcgccgacacgtmdkyggtcgacgcgcgcggkaggactccgctggacgtckcgcgcgacaagggataccaagaagtggtggacgtyctgkaacggtggsagctgstgatgacggcggcgaggcgaggcgacctcgggagcctcgagtccctgctcagcaagcgcgccggcgtccgcgggcgcgaccagtacggcctcacggcgctgcacctggccgcgatcaagggccacggcgacgcgatcgcgctgctcgccgggccgggatgcatggacgtcgagtgcgaggacgtggaagggcacaggccgctccacctcgccgtcgagggaggccacgcggaggccgtggagctgctgctcgacatgggcgccgacgccaacgcccggaccaggcgcggcgccacgccgctccagatggcggaggccatggggtacgaggccatcgctcagctcctgtgcgcgagaggtgcggaggtggccgccgcgtcggcgttgtgcgccgcgtcgtcgtcttcatcgtccatatcgtgcgcctgattgctgccggtatcgtttccgctgctgctcctgctgtgcgtgagctgtgtggtacagtactgtagccgagagatgcctacaaccgccgtggctggctttaaagtaagaagcgaacccgtccgaaattgcactgtactgtatagtggtttgttctgctttgttgggagagtagctcattgttgagacggtcgattgctatacccagcgtgctggtggaaaaaaaaacatcgccatgcaattgcagtgctttacatgtc

SEQ ID NO: 16476 - protein, 227 aa, Zea mays subsp. mays
  peptide (1)..(227): Ceres Seq. ID no. 15223058
  misc_feature (118)..(118): Xaa is any aa, unknown or other
  misc_feature (169)..(169): Xaa is any aa, unknown or other
  misc_feature (199)..(199): Xaa is any aa, unknown or other
  misc_feature (200)..(200): Xaa is any aa, unknown or other
  misc_feature (215)..(215): Xaa is any aa, unknown or other
YTLARRAPRARSPFQDRKMAAAEAASSAPAPEHLLEVEDDEVLIDFKPNAKCRADLRLRSLHPSLPVAFKVQTSSPLKFLVSPPRGAVPPLSSASLRVVLRPQPHAPPSFPRSRADRXLVLSSLSAARLDSVGSSNDGGGGGGVRAVRLRVFFGGPYLLRLAADAGDAXAVRLILRRQPHLLPFLEHQQAAAAPDAGEXXWAPLHAAAARGDCGXAEAAGARGAGRA

SEQ ID NO: 16477 - protein, 209 aa, Zea mays subsp. mays
  peptide (1)..(209): Ceres Seq. ID no. 15223059
  misc_feature (100)..(100): Xaa is any aa, unknown or other
  misc_feature (151)..(151): Xaa is any aa, unknown or other
  misc_feature (181)..(181): Xaa is any aa, unknown or other
  misc_feature (182)..(182): Xaa is any aa, unknown or other
  misc_feature (197)..(197): Xaa is any aa, unknown or other
MAAAEAASSAPAPEHLLEVEDDEVLIDFKPNAKCRADLRLRSLHPSLPVAFKVQTSSPLKFLVSPPRGAVPPLSSASLRVVLRPQPHAPPSFPRSRADRXLVLSSLSAARLDSVGSSNDGGGGGGVRAVRLRVFFGGPYLLRLAADAGDAXAVRLILRRQPHLLPFLEHQQAAAAPDAGEXXWAPLHAAAARGDCGXAEAAGARGAGRA

SEQ ID NO: 16478 - protein, 178 aa, Zea mays subsp. mays
  peptide (1)..(178): Ceres Seq. ID no. 15223060
  misc_feature (6)..(6): Xaa is any aa, unknown or other
  misc_feature (7)..(7): Xaa is any aa, unknown or other
  misc_feature (12)..(12): Xaa is any aa, unknown or other
  misc_feature (19)..(19): Xaa is any aa, unknown or other
  misc_feature (30)..(30): Xaa is any aa, unknown or other
  misc_feature (32)..(32): Xaa is any aa, unknown or other
  misc_feature (35)..(35): Xaa is any aa, unknown or other
  misc_feature (37)..(37): Xaa is any aa, unknown or other
MGADTXXVDARXRTPLDVXRDKGYQEVVDXLXRWXLXMTAARRGDLGSLESLLSKRAGVRGRDQYGLTALHLAAIKGHGDAIALLAGPGCMDVECEDVEGHRPLHLAVEGGHAEAVELLLDMGADANARTRRGATPLQMAEAMGYEAIAQLLCARGAEVAAASALCAASSSSSSISCA

SEQ ID NO: 16479 - DNA, 1071 bp, Zea mays subsp. mays
  misc_feature (1)..(1071): Ceres Seq. ID no. 12406460
  misc_feature (1)..(1071): Ortholog of  Ceres SEQ ID NO 15176514 as cited in SEQ ID NO 1114
  misc_feature (1)..(1071): Ortholog of  Ceres SEQ ID NO 15173688 as cited in SEQ ID NO 61918
  misc_feature (1)..(1071): Ortholog of  Ceres SEQ ID NO 12778345 as cited in SEQ ID NO 62792
  misc_feature (1)..(1071): Ortholog of  Ceres SEQ ID NO 13662513 as cited in SEQ ID NO 63303
  misc_feature (1)..(1071): Ortholog of  Ceres SEQ ID NO 12616929 as cited in SEQ ID NO 63962
  misc_feature (1)..(1071): Ortholog of  Ceres SEQ ID NO 15225803 as cited in SEQ ID NO 67623
  misc_feature (1)..(1071): Ortholog of  Ceres SEQ ID NO 15174088 as cited in SEQ ID NO 0
gtctctctgaccttatccccttgcggcaaaaccttgcgcgcaacaatggccgcctccctcccgaccaccgccgcgcgcctcgcggccccggccttcgcctaccggtcgcccaaggctccctccgccaccgccctcccgcgtgccgccgccttccctgcaatcgccgttgcggcggcgcccctgcgcccgcgccgcgcgccgaggccggtggcggcccgggccgggggcgaggagagggagacgatactgctccccgggtgcgactacaaccactggctgatcgtcatggagttccccaaggaccccgcgcccacccgcgagcagatgatcgacacctacctcaacacactcgccaccgtcctcggcagcatggaggaagccaagaagaacatgtacgccttcagcacgaccacctacaccgggttccagtgcaccgtggacgaggagacgtcggagaagttcaagggtctgcctggggtgctgtgggtgctccctgattcctacatcgacgtgaagaacaaggactacggaggtgacaagtacgtgaacggcgagataatcccctgcacgtacccgacgtaccagccgaaggagcggaggacgtccaagtacgagagcaggcggtacgagaggcggagagatgggccaccggcggccagcaggaaaccgaggcagcaggcaccagctcagactcagaccgagtcggcgtcttcgtgacgagctctgcaggcattttgtccacgtacctacctacctagaagtagaacaagagaggaggacgcctaaaattctgtcgcattgggcaccgcgtactggactggacaggcgggtcgggatccatcatccatcgtcagccagaaaattgtcgctgtccaagcagcctgggcagcttgtgtgtgactgtgtgtgctgatatcttgagctagctgtggcagaaactggaaaccctactgtgtgtgtgctgatatcttgtcatagcgagctgtgtgatgccgactggtgtagagctgtatcgctgattgcgtgaaaccgaaatgctgtggctttatttagactgatgttgtcacttcc

SEQ ID NO: 16480 - protein, 238 aa, Zea mays subsp. mays
  peptide (1)..(238): Ceres Seq. ID no. 12406461
VSLTLSPCGKTLRATMAASLPTTAARLAAPAFAYRSPKAPSATALPRAAAFPAIAVAAAPLRPRRAPRPVAARAGGEERETILLPGCDYNHWLIVMEFPKDPAPTREQMIDTYLNTLATVLGSMEEAKKNMYAFSTTTYTGFQCTVDEETSEKFKGLPGVLWVLPDSYIDVKNKDYGGDKYVNGEIIPCTYPTYQPKERRTSKYESRRYERRRDGPPAASRKPRQQAPAQTQTESASS

SEQ ID NO: 16481 - protein, 223 aa, Zea mays subsp. mays
  peptide (1)..(223): Ceres Seq. ID no. 12406462
MAASLPTTAARLAAPAFAYRSPKAPSATALPRAAAFPAIAVAAAPLRPRRAPRPVAARAGGEERETILLPGCDYNHWLIVMEFPKDPAPTREQMIDTYLNTLATVLGSMEEAKKNMYAFSTTTYTGFQCTVDEETSEKFKGLPGVLWVLPDSYIDVKNKDYGGDKYVNGEIIPCTYPTYQPKERRTSKYESRRYERRRDGPPAASRKPRQQAPAQTQTESASS

SEQ ID NO: 16482 - protein, 164 aa, Zea mays subsp. mays
  peptide (1)..(164): Ceres Seq. ID no. 12406463
LSDLIPLRQNLARNNGRLPPDHRRAPRGPGLRLPVAQGSLRHRPPACRRLPCNRRCGGAPAPAPRAEAGGGPGRGRGEGDDTAPRVRLQPLADRHGVPQGPRAHPRADDRHLPQHTRHRPRQHGGSQEEHVRLQHDHLHRVPVHRGRGDVGEVQGSAWGAVGAP

SEQ ID NO: 16483 - DNA, 481 bp, Zea mays subsp. mays
  misc_feature (1)..(481): Ceres Seq. ID no. 4611714
  misc_feature (1)..(481): Ortholog of  Ceres SEQ ID NO 12626248 as cited in SEQ ID NO 65768
accgcaaggatccaccacaacagcgaaggagaaagcagaccaacctagccacccagggagaaaggccaaaagggaggggagagtgtcgtcatggcttccattgtcgcttccaggagggccgttcctctagttcgcgctctggagaagctcatcgcagcgtcctccgcgcccgggacatgccgggcctggggaaggagcacgtcaaggtgtgggcggagcagaacagcctggtgatcaagggcgagggcgagaaggaggatagcgaggacgaggccgccccgcctccgagatacagcggtcgcatcgagctcgcgccagaggtttacaggatggacaagatcaaggcggagatgaagaacggcgtgctcaaggtggtcgtgccgaaggtgaaggagcagcagcgcaaggacgtgttccaagtcaacgtcgagtagatgtttccaaatagaagcaagtgccggtacgggatggaggattggag

SEQ ID NO: 16484 - protein, 143 aa, Zea mays subsp. mays
  peptide (1)..(143): Ceres Seq. ID no. 4611715
RKDPPQQRRRKQTNLATQGERPKGRGECRHGFHCRFQEGRSSSSRSGEAHRSVLRARDMPGLGKEHVKVWAEQNSLVIKGEGEKEDSEDEAAPPPRYSGRIELAPEVYRMDKIKAEMKNGVLKVVVPKVKEQQRKDVFQVNVE

SEQ ID NO: 16485 - protein, 85 aa, Zea mays subsp. mays; identical to SEQ ID NO: 14964
  peptide (1)..(85): Ceres Seq. ID no. 4611716

SEQ ID NO: 16486 - DNA, 1075 bp, Zea mays subsp. mays
  misc_feature (1)..(1075): Ceres Seq. ID no. 12407455
  misc_feature (1)..(1075): Ortholog of  Ceres SEQ ID NO 15172660 as cited in SEQ ID NO 68708
ctcccgcagccgccacctcaacccaggaacagagcgaggcgacgccgcggcacctcttctccggtaagtgagatcgcatatctcgtcgcatgcggcgaagaatttttaggtccggtagcttgttctctgctttattcgtggtgaagtttgggcggttcgaagttgatgaattgcttgtacgattcgactgggggtttgtcgtgcttattaggcacgattcgtcgttggttaggtggctgtagcatccctgcttctgttttgcactttctatgcgtatttttgcactctatatgtgttaaggttgacttaaatctgattattcgctcggttagatttggtatcctcatagtgtgtaggtctatctgtcttagaaatactaagtcaaatgttccgcattagcttgcaacccaaagtcttccgcagatagtaatgatatacggaatatcacatttggcagttgatattgattatttaggcgaagggaaatggcaaccgttccaggggatctgatctggcaggttgtgaggaagaacaactccttccttgtgaagcagttcggcaacggcaatgccaaggtgcagttcaccaaggagccgaacaacctctacaacatccactccttcaaacactcgggtttggcgaacaagaagactgtgacgatccagccagctgcaaaggactcggctgtggtcctctctactaccaagaccaagaagcagaacgcacctgcgaagctcagccacaagtctgtgatgcgcaaggagttccgcaagatggccaaggctgtgaaaaaccaggttagtgacaactactacaggcctgatctgaccaagccagctcttgctaggctaagctcggtgtaccgcagcctccaggttgccaagtccggtgtcaagaagaagaacaggcagtcctaagcgctaagtttgtgttctgtcagggggcatgttggtgctcgtagtcccagcttatatttatctatgttccaacagttttgagacttgttagaactgagcaaaccatgttaagatgctgctgtgtgtcattccttaaaaaaattgccttgcactttgtg

SEQ ID NO: 16487 - protein, 143 aa, Zea mays subsp. mays
  peptide (1)..(143): Ceres Seq. ID no. 12407456
MATVPGDLIWQVVRKNNSFLVKQFGNGNAKVQFTKEPNNLYNIHSFKHSGLANKKTVTIQPAAKDSAVVLSTTKTKKQNAPAKLSHKSVMRKEFRKMAKAVKNQVSDNYYRPDLTKPALARLSSVYRSLQVAKSGVKKKNRQS

SEQ ID NO: 16488 - protein, 77 aa, Zea mays subsp. mays
  peptide (1)..(77): Ceres Seq. ID no. 12407457
MNCLYDSTGGLSCLLGTIRRWLGGCSIPASVLHFLCVFLHSICVKVDLNLIIRSVRFGILIVCRSICLRNTKSNVPH

SEQ ID NO: 16489 - DNA, 1418 bp, Zea mays subsp. mays
  misc_feature (1)..(1418): Ceres Seq. ID no. 12376548
  misc_feature (1)..(1418): Ortholog of  Ceres SEQ ID NO 13663419 as cited in SEQ ID NO 66561
aaggatcgagtcgtttaattttctactaggagctagcagcgagcgggttatttgcaacgacggcatcgtcttggcgttggcgggcgtgtttggcaccatgggcgactactactacagccgccgctcgccgcacctcctcccggcggcggtgctggcgctgctcgccgtcgtcgtcgtcgtcgtcgcgagcagcagcctccggggtgcggcggcggcggcgggggcgggccggaatgtgatcacgcacatcaagggcttcgaaggccctctgcccttccacctcgagacagggtacgtggaggtggacgaggagcacggcacgcggctcttctactacttcatcgagtcggagaggaacccggcggaggacccgctcatcctctggatcaccggtggccccggatgctccgcgctctctggactcctcttcgagatcggacccctcaagttcgatgtggcggggtacacggaagggttcccgcggctggtctacttcgaggattcatggaccaaggtgagcaacgtgatcttccttgacgcgccggtggggacaggcttctcctactcgcgggaggaggccggcctgaacgtgagcctgacggagtccgggcggcagcaccacgtgttcctccgcaagtgggtggcggagcaccccgagttcgcgtccaacccgctgtacatcggcggcgactcctactcgggctacaccgtgcccgtgacggcgatggacatcgccaccagcagcgacgacgaggagccgccgaagctgaaccttgtgggctacctggtgggcaacgccgcgacggacgaccggtacgacacggggggcaaggtgccgttcatgcacggcatggggctcatctccgacgagctgtacgagtcggcgaagcagggctgcggcggcgacttctacgtggcgccggaccccaccaacgcgcggtgcgccagcgcgatgatggccatcaacatggtgaccttcgccgtgaaccccgtgcacatcctggagcccttctgcggcgcggccgtgcgggccgacggcggcagcatcttccagggctacggcggcggcgcgaggcggtcgatgctggtgcgggacgacgtccgccacccgggcttcttcgccaagcagcggctgggcctgcccgtggagtgcagggacaacgggtaccggctgtcctacatctgggcggacgacccggaggtgagggaggcgctcggcatccacgagggttccatcgggtcgtggagccggtgcaccatgctgtcgcactacaggcacgacgtcaccaccgtcatcccctaccatgtcaacctcaccaaggcaggatacagggcgcttgtgtacaagtacgtacgtacgtgttagctagtatgtatatactattgatcgatgcttattaaactaggattattatttg

SEQ ID NO: 16490 - protein, 454 aa, Zea mays subsp. mays
  peptide (1)..(454): Ceres Seq. ID no. 12376549
RIESFNFLLGASSERVICNDGIVLALAGVFGTMGDYYYSRRSPHLLPAAVLALLAVVVVVVASSSLRGAAAAAGAGRNVITHIKGFEGPLPFHLETGYVEVDEEHGTRLFYYFIESERNPAEDPLILWITGGPGCSALSGLLFEIGPLKFDVAGYTEGFPRLVYFEDSWTKVSNVIFLDAPVGTGFSYSREEAGLNVSLTESGRQHHVFLRKWVAEHPEFASNPLYIGGDSYSGYTVPVTAMDIATSSDDEEPPKLNLVGYLVGNAATDDRYDTGGKVPFMHGMGLISDELYESAKQGCGGDFYVAPDPTNARCASAMMAINMVTFAVNPVHILEPFCGAAVRADGGSIFQGYGGGARRSMLVRDDVRHPGFFAKQRLGLPVECRDNGYRLSYIWADDPEVREALGIHEGSIGSWSRCTMLSHYRHDVTTVIPYHVNLTKAGYRALVYKYVRTC

SEQ ID NO: 16491 - protein, 422 aa, Zea mays subsp. mays
  peptide (1)..(422): Ceres Seq. ID no. 12376550
MGDYYYSRRSPHLLPAAVLALLAVVVVVVASSSLRGAAAAAGAGRNVITHIKGFEGPLPFHLETGYVEVDEEHGTRLFYYFIESERNPAEDPLILWITGGPGCSALSGLLFEIGPLKFDVAGYTEGFPRLVYFEDSWTKVSNVIFLDAPVGTGFSYSREEAGLNVSLTESGRQHHVFLRKWVAEHPEFASNPLYIGGDSYSGYTVPVTAMDIATSSDDEEPPKLNLVGYLVGNAATDDRYDTGGKVPFMHGMGLISDELYESAKQGCGGDFYVAPDPTNARCASAMMAINMVTFAVNPVHILEPFCGAAVRADGGSIFQGYGGGARRSMLVRDDVRHPGFFAKQRLGLPVECRDNGYRLSYIWADDPEVREALGIHEGSIGSWSRCTMLSHYRHDVTTVIPYHVNLTKAGYRALVYKYVRTC

SEQ ID NO: 16492 - DNA, 1481 bp, Zea mays subsp. mays
  misc_feature (1)..(1481): Ceres Seq. ID no. 12376576
  misc_feature (1)..(1481): Ortholog of  Ceres SEQ ID NO 12784459 as cited in SEQ ID NO 66415
atccagcgcggctccactcaaagcttgagccttccttttcttttcttgtttttgttttattttcttggtaggggggagtcgtcttctccatctctccttagcctaggagaaggagagatccagaggcaaaagcttcagggtttgtacaaattctagatctaaccggactaaccagaaaacaaaacaaaaaaagacgaaagcatgagccacttcgccgccgccatgaagagcccccttgcggtcgccgtcgcagcgcccgccgccgccgccgacgccaagagcccgctcttctgccccaagccgcggcgccccgcggcgccgctgcggtgccaccagagcggcggcttctccgacgccggcacggatctgctcgacctcctnctctcgaagggcgacgagagcggcctgtcgtcggcgtccccgcagccgccgctgttctgcggctcgccgccgcggcgagcgtcgaaccccgtggtccacgacagcaggttcggcgcggactgccnncccatgcccgtgccgggactgcccgtgcaccggcccagcccgcgcccgtcggctggcggnnccgtccatgtcgccgcgagggtgcgcccgcgcgcggttcgcgttccagcccgccgcggtccgcgtnnagggttttgactgcctcgaccgcggccgcggcggccgtggccatggcatcaccgccatggcctagactgtgcacatacaacagccagcaccctgagaccctcctcccccgcccctccatccatggcacgcaagagccaggagcacctggttggaggtagaagaagagggggggggggggggggggctgttaggggaggaattgagagggatcggtttgtcctaaatcttaacccccctaaaaagtaaaaaaaaactagtacttttatataaacccgtcccatcctcccatccccaacaattacagcgagtttaggtaattttatcacagatccttttttgtatgtaaataaagttcgaggttcagaaattatgtagaaaaaatgtagaggggaggaggagcagggacaaaagggcttacaaaaagcagagaagggatgattaatcagagtttcctctctcatgtgtcactgcccctcctctctggaaggattaattagccattgggtttggtgggagggagttcgggaatagttaggtagtatgtcctagttcgtcaattaatgatgctttcttttttgttttttgatggggaattgttttttctttgttgtccgtccgtccatccatgcaaccaagaaatttcatggagaatctgtacaaaagagtggctagctattacgagagtccggtctgagagaagcaacacgagagaagtcagtggatgagcttagagaaagacattcacacgctgcgagggttgataatttgtgatattttcctctttttttcttcctgattttgtatattgtaatatcctgcttgattttccaatgaatgaatcaatc

SEQ ID NO: 16493 - protein, 147 aa, Zea mays subsp. mays
  peptide (1)..(147): Ceres Seq. ID no. 12376577
  misc_feature (60)..(60): Xaa is any aa, unknown or other
  misc_feature (102)..(102): Xaa is any aa, unknown or other
  misc_feature (122)..(122): Xaa is any aa, unknown or other
  misc_feature (123)..(123): Xaa is any aa, unknown or other
  misc_feature (145)..(145): Xaa is any aa, unknown or other
MSHFAAAMKSPLAVAVAAPAAAADAKSPLFCPKPRRPAAPLRCHQSGGFSDAGTDLLDLXLSKGDESGLSSASPQPPLFCGSPPRRASNPVVHDSRFGADCXPMPVPGLPVHRPSPRPSAGXXVHVAARVRPRAVRVPARRGPRXGF

SEQ ID NO: 16494 - protein, 140 aa, Zea mays subsp. mays
  peptide (1)..(140): Ceres Seq. ID no. 12376578
  misc_feature (53)..(53): Xaa is any aa, unknown or other
  misc_feature (95)..(95): Xaa is any aa, unknown or other
  misc_feature (115)..(115): Xaa is any aa, unknown or other
  misc_feature (116)..(116): Xaa is any aa, unknown or other
  misc_feature (138)..(138): Xaa is any aa, unknown or other
MKSPLAVAVAAPAAAADAKSPLFCPKPRRPAAPLRCHQSGGFSDAGTDLLDLXLSKGDESGLSSASPQPPLFCGSPPRRASNPVVHDSRFGADCXPMPVPGLPVHRPSPRPSAGXXVHVAARVRPRAVRVPARRGPRXGF

SEQ ID NO: 16495 - DNA, 1965 bp, Zea mays subsp. mays
  misc_feature (1)..(1965): Ceres Seq. ID no. 12406126
  misc_feature (1)..(1965): Ortholog of  Ceres SEQ ID NO 15169252 as cited in SEQ ID NO 54957
  misc_feature (1)..(1965): Ortholog of  Ceres SEQ ID NO 15180094 as cited in SEQ ID NO 0
aaggcctcaacacacacacacactctctcgcttgacctacccccctccgccccccgccgggcctgcagggtgttcgacgcttcgcccgcccgcccgagcgccgccacggcatggcttcctccatctccgccgccgctaaggcctccgcggcctttgcccaaaagaaggagctggccgcgccggcgccgcaccgcgcgggctcgagccgtcggaccaagccgtgccgcgtgcgcgccgtcgcgtcgcccgcgcgcaccccccgcgccccgtcgtccaccggctcggtgaagaccgcgatgacgatgacggagaagatcctggcgagggcgtcggagcgcgcggcgctggagcccggggagaacgtgtgggtggacatcgacgtgctcatgacgcacgacgtctgcgggcccggcaccatcggcatcttcaagaaggagttcggggaggatgccaaggtctgggaccgcgagaaggtcgtcatcatccccgaccactacatcttcaccagcgacgagcgcgccaaccgcaacgtcgatatcctcagggacttctgtctggagcagaacatcaagtacttctatgatatcaaggacctcagcgatttcagggctaatccagactacaagggtgtctgccacattgcacttgctcaggaaggccactgccgaccaggcgaggttctcctgggtactgattctcatacgtgcaatgctggagcctttggtcaatttgcaaccggaattggaaacactgatgcaggttttgtgatgggcactggaaaggctcttctcaaggtgccacctactatcaggtttgtattagatggagaaatgccgccttatttacttgcgaaggatctgattttgcaaattattggtgagatttcagtatctggtgcaacctacaaatcgatggagtttgttggatcaactgtagaaagtctaaccatggaagaacgtatgacactatgcaacatggttgttgaagctggtggaaagaacggtgtcgtgcctgctgatgaaactacatttaaataccttgagggtaggacatcagttgattatcaacctgtctacagtgatgctgaggccagattttttagtgactaccggtttgatgtatcgaaactggagccagtagttgccaagccacattcgcctgacaaccgtgccctagcaagagaatgcaaagatgtcaagatcgaccgagtctatattggttcctgcactggtggcaagactgaggacttccttgctgccgcaaaggtgttcttagcctcgggaaagaaggttaaagttcccacattccttgtccctgccacacaaaaggtgtggatggacgtatatagccttcctgtaccaggatctggcggcaaaacttgcgcccagatattcgaggaggctggttgtgatacaccagcaagtcctaattgcggcgcttgtctgggtggccctcgcgatacgtatgcacggatgaatgaacctacggtctgcgtgtccaccacgaacaggaacttcccgggcaggatggggcacaaggaagggcagatctacctggcgtccccctacaccgctgcagcctcggccctgacggggtacgtcacggaccccagggacttcctcatgtgaaacgatcttgaaacagccacagagtgcctgcaccgctgttttttgtgttgaaccttagtttaggcgtgtgcccttcgttgagaaataaactcccatgtcgggaggctgccattgccatttatgttttttgcgttatatttattacagtgactgccgataacgtagttgagcgttacaagggaaatacattcattcttcccagtatcgatggcagtcactagactccgttcttacaaaaaaaaaggcatgtcgagagatcttgtagttcatacacttgttaaaacacttttttgtacaatgtatgggaaagaagctcagtcgatctttcttgttttgc

SEQ ID NO: 16496 - protein, 505 aa, Zea mays subsp. mays
  peptide (1)..(505): Ceres Seq. ID no. 12406127
MASSISAAAKASAAFAQKKELAAPAPHRAGSSRRTKPCRVRAVASPARTPRAPSSTGSVKTAMTMTEKILARASERAALEPGENVWVDIDVLMTHDVCGPGTIGIFKKEFGEDAKVWDREKVVIIPDHYIFTSDERANRNVDILRDFCLEQNIKYFYDIKDLSDFRANPDYKGVCHIALAQEGHCRPGEVLLGTDSHTCNAGAFGQFATGIGNTDAGFVMGTGKALLKVPPTIRFVLDGEMPPYLLAKDLILQIIGEISVSGATYKSMEFVGSTVESLTMEERMTLCNMVVEAGGKNGVVPADETTFKYLEGRTSVDYQPVYSDAEARFFSDYRFDVSKLEPVVAKPHSPDNRALARECKDVKIDRVYIGSCTGGKTEDFLAAAKVFLASGKKVKVPTFLVPATQKVWMDVYSLPVPGSGGKTCAQIFEEAGCDTPASPNCGACLGGPRDTYARMNEPTVCVSTTNRNFPGRMGHKEGQIYLASPYTAAASALTGYVTDPRDFLM

SEQ ID NO: 16497 - protein, 443 aa, Zea mays subsp. mays
  peptide (1)..(443): Ceres Seq. ID no. 12406128
MTMTEKILARASERAALEPGENVWVDIDVLMTHDVCGPGTIGIFKKEFGEDAKVWDREKVVIIPDHYIFTSDERANRNVDILRDFCLEQNIKYFYDIKDLSDFRANPDYKGVCHIALAQEGHCRPGEVLLGTDSHTCNAGAFGQFATGIGNTDAGFVMGTGKALLKVPPTIRFVLDGEMPPYLLAKDLILQIIGEISVSGATYKSMEFVGSTVESLTMEERMTLCNMVVEAGGKNGVVPADETTFKYLEGRTSVDYQPVYSDAEARFFSDYRFDVSKLEPVVAKPHSPDNRALARECKDVKIDRVYIGSCTGGKTEDFLAAAKVFLASGKKVKVPTFLVPATQKVWMDVYSLPVPGSGGKTCAQIFEEAGCDTPASPNCGACLGGPRDTYARMNEPTVCVSTTNRNFPGRMGHKEGQIYLASPYTAAASALTGYVTDPRDFLM

SEQ ID NO: 16498 - protein, 441 aa, Zea mays subsp. mays
  peptide (1)..(441): Ceres Seq. ID no. 12406129
MTEKILARASERAALEPGENVWVDIDVLMTHDVCGPGTIGIFKKEFGEDAKVWDREKVVIIPDHYIFTSDERANRNVDILRDFCLEQNIKYFYDIKDLSDFRANPDYKGVCHIALAQEGHCRPGEVLLGTDSHTCNAGAFGQFATGIGNTDAGFVMGTGKALLKVPPTIRFVLDGEMPPYLLAKDLILQIIGEISVSGATYKSMEFVGSTVESLTMEERMTLCNMVVEAGGKNGVVPADETTFKYLEGRTSVDYQPVYSDAEARFFSDYRFDVSKLEPVVAKPHSPDNRALARECKDVKIDRVYIGSCTGGKTEDFLAAAKVFLASGKKVKVPTFLVPATQKVWMDVYSLPVPGSGGKTCAQIFEEAGCDTPASPNCGACLGGPRDTYARMNEPTVCVSTTNRNFPGRMGHKEGQIYLASPYTAAASALTGYVTDPRDFLM

SEQ ID NO: 16499 - DNA, 1799 bp, Zea mays subsp. mays
  misc_feature (1)..(1799): Ceres Seq. ID no. 12358658
  misc_feature (1)..(1799): Ortholog of  Ceres SEQ ID NO 15176532 as cited in SEQ ID NO 58184
  misc_feature (1)..(1799): Ortholog of  Ceres SEQ ID NO 14303627 as cited in SEQ ID NO 62070
  misc_feature (1)..(1799): Ortholog of  Ceres SEQ ID NO 13597546 as cited in SEQ ID NO 65017
  misc_feature (1)..(1799): Ortholog of  Ceres SEQ ID NO 14308015 as cited in SEQ ID NO 65798
  misc_feature (1)..(1799): Ortholog of  Ceres SEQ ID NO 14307912 as cited in SEQ ID NO 66380
  misc_feature (1)..(1799): Ortholog of  Ceres SEQ ID NO 15176077 as cited in SEQ ID NO 66728
  misc_feature (1)..(1799): Ortholog of  Ceres SEQ ID NO 14307908 as cited in SEQ ID NO 67189
  misc_feature (1)..(1799): Ortholog of  Ceres SEQ ID NO 14308045 as cited in SEQ ID NO 67444
  misc_feature (1)..(1799): Ortholog of  Ceres SEQ ID NO 13654353 as cited in SEQ ID NO 68318
ctataaataaataccgcccaccaacatctggtggtatcaaagaatctcctctgtatctctggcagccgcatcgtctcaatctcagtcactcccggacacgcgcacgagccaccccgcacccaactaaccaacccatggacgcgggcggaacgccgccgctgctgttcctcctggccgcggcggccgccctgctgggcgcggcgctcaggtggctgctcctggcctggcggtcggcggcgaggacggggcggctgccaccgggcagcacggggctgccgctcatcggggagacgctgcgcctcatcgcggcgtacaagacgccgaacccggagccgttcatcgacgagcgcgtggcgcggcacggcagcggggtgttcacgacgcacgtgttcggcgagcgcaccgtgttctccgcggacccggccttcaaccgcctgctcctggccgccgagggccgcgccgtcagctgcagctacccgtcgtccatcgccacgctgctgggcccgcgctcgctgctcctcaccgccggccccgcgcacaagcgcctccactcgctcacgctcgcccgcctcggccggccggcctcgccgccgctgctggcgcacatcgaccgcctcgtcctcgccaccctgcgggactggggccggccaggcgccggcgccgtcgtccgcctcctcgacgaggccaagaagatcaccttcaacctcactgtctggcagctcgtcagcatcgagcctgggccctggaccgagagcctccgccgcgagtacgtcaagctcgtcgacggcttcttctccatccccttccccttcgcctacctcctccctttcaccgcctacggccaggccctcaaggcgaggaagaaggtggctggagctcttcgggaggtgataaggaagaggatgggcgaggaggccggaactggccctggcgccggtagaaatggggagaagaaggacatggtggaggagcttctggaagcagagggtgggagcttctcggtggaggagatggtggatttctgcctgtctctgctggtgggctggctacgagaccacctccgtgctcatgacgctcgccgtcaagttcctcaccgagacgcccactgcactggcgcagctcaaggaagagcacgacagcatcagacacaggaaaggcaaggacgagcagcctctgcaatggagcgattacaagtcgatgccgtttacacaatgcgtgatcagtgagacgctgcgcgtggctaacttgatcagcggggtgttcaggcgggcgaacaccgacatccatttcaaagattacgttatcccaaagggctgcagaatcttcgcgtcgttccgagccgtgcacctgagccccgagcactacgagaacgctcgagccttcgacccctggagatggcagcagagcaagaaggagggagtactagtagtagggcaggacgcgcagcagggggcccagggccagcgtgttcactcccttcggcggggggcctcgcctgtgcccgggccacgagcttgcccgcgtcgtggtctccgttttcctccaccgcctggtgacgcgcttcagctgggaagaggctgaggaggacagggtcgtcttcttccccaccacccgcaccctcaaagggtaccccatcatcctgcggcggcgaccgggttgggatttctgacctagctcatcatgttacaatagagtcgatccatctatagttgttacactcatctctctctctctctctctctctgtctgtaataacactactgtctaatataaacaagcatctccgctctattctgttc

SEQ ID NO: 16500 - protein, 407 aa, Zea mays subsp. mays
  peptide (1)..(407): Ceres Seq. ID no. 12358659
INKYRPPTSGGIKESPLYLWQPHRLNLSHSRTRARATPHPTNQPMDAGGTPPLLFLLAAAAALLGAALRWLLLAWRSAARTGRLPPGSTGLPLIGETLRLIAAYKTPNPEPFIDERVARHGSGVFTTHVFGERTVFSADPAFNRLLLAAEGRAVSCSYPSSIATLLGPRSLLLTAGPAHKRLHSLTLARLGRPASPPLLAHIDRLVLATLRDWGRPGAGAVVRLLDEAKKITFNLTVWQLVSIEPGPWTESLRREYVKLVDGFFSIPFPFAYLLPFTAYGQALKARKKVAGALREVIRKRMGEEAGTGPGAGRNGEKKDMVEELLEAEGGSFSVEEMVDFCLSLLVGWLRDHLRAHDARRQVPHRDAHCTGAAQGRARQHQTQERQGRAASAMERLQVDAVYTMRDQ

SEQ ID NO: 16501 - protein, 363 aa, Zea mays subsp. mays
  peptide (1)..(363): Ceres Seq. ID no. 12358660
MDAGGTPPLLFLLAAAAALLGAALRWLLLAWRSAARTGRLPPGSTGLPLIGETLRLIAAYKTPNPEPFIDERVARHGSGVFTTHVFGERTVFSADPAFNRLLLAAEGRAVSCSYPSSIATLLGPRSLLLTAGPAHKRLHSLTLARLGRPASPPLLAHIDRLVLATLRDWGRPGAGAVVRLLDEAKKITFNLTVWQLVSIEPGPWTESLRREYVKLVDGFFSIPFPFAYLLPFTAYGQALKARKKVAGALREVIRKRMGEEAGTGPGAGRNGEKKDMVEELLEAEGGSFSVEEMVDFCLSLLVGWLRDHLRAHDARRQVPHRDAHCTGAAQGRARQHQTQERQGRAASAMERLQVDAVYTMRDQ

SEQ ID NO: 16502 - protein, 212 aa, Zea mays subsp. mays
  peptide (1)..(212): Ceres Seq. ID no. 12358661
MGRRRTWWRSFWKQRVGASRWRRWWISACLCWWAGYETTSVLMTLAVKFLTETPTALAQLKEEHDSIRHRKGKDEQPLQWSDYKSMPFTQCVISETLRVANLISGVFRRANTDIHFKDYVIPKGCRIFASFRAVHLSPEHYENARAFDPWRWQQSKKEGVLVVGQDAQQGAQGQRVHSLRRGASPVPGPRACPRRGLRFPPPPGDALQLGRG

SEQ ID NO: 16503 - DNA, 1457 bp, Zea mays subsp. mays
  misc_feature (1)..(1457): Ceres Seq. ID no. 12566276
  misc_feature (1)..(1457): Ortholog of  Ceres SEQ ID NO 13593855 as cited in SEQ ID NO 53838
  misc_feature (1)..(1457): Ortholog of  Ceres SEQ ID NO 14302247 as cited in SEQ ID NO 62154
  misc_feature (1)..(1457): Ortholog of  Ceres SEQ ID NO 13539874 as cited in SEQ ID NO 64069
gccgtctcgtctgaccgtacgtctttggtgatgaagcatcgatccgggagaaggttcagcattagctctagctagagctagatagccggaggaggagctagtaggaagaggcatggataatcatcaacttgtcgccatggcagcggtggctcagccggcgagcccgacctcgccgcacgtcgcgcacaagatcccgcccggcgacgggccttacgcgagggccaagcacttccagctggtggagaaggacctggacgcgtcgatcgcgtggttctggaaggcgatcagcgcgggcgacaagttggacagcgcgctcaaggacatggcggtggtgatgaagcagcgcgggtacctggcggaggccatcgacgccatcaggtcgctgcggcacctgtgcccgaagcagtcccaggagccgctggacaacatcctcctggacctctacaaggccagcgggcggaccaaggaggagatcgagctgctcaagcagaagctccgcaagatctacctcggcgaggcgttccatggcaggaccaccaagcgcgcccgctcgcacggccgcaagatccacgtctccgtcaagcaagagacatcgcgcgtcctgggcaacctcgcgtgggcgtacatgcagcagcgcaacttcatggcggcggaggtggtgtaccggaaggcgcagatgatcgacccggacgccaacaaggcgtgcaacctcgccctctgcctcatcgagcaggcccggctcgccgacgccgagctcgtcctcgccgacgtgctcgccgggaggtacctgcaggcccgcgaccagcaggacggcaagatcgtccggaaagtggaggagctgctggcccggatcatggcgcatacgacgtggccgggcggtggcggcggtgacggacgacgacgcccggcggataagagcgggagcgggagcgagagcgacgacgatgactgggtcgagaaccagatgctggctttgctcgacgtggcggtgccgtaccggaagaagagcaggaggctgccggtctttgaggagatctcgcgagcagaatagcagatggctgatatagattagcagcagcatcatcatctttcgatcgagctccatgcatatatcgtttgagcgagcgcggatcctctggacctaactgcagtctgcagataggtaggtaggtaggtctgagctgatccagacccacatgtcagtgaccggacgcagaggatctgcttccattattatttgatcgactcctgtccagctcaaccttttggaccaactccgtggcgatagcagtagcagcagcagaaaggtaaagcgcgcgtgtgtgtgtgtgcccctgtgaatctgtggatcggagacagtgtgcagtagcatagcatcagcagcaaggtatttaaagcgtgcaagtgtgtgtataactgtatatacgcttcttatatgcatctgtggatattttgcg

SEQ ID NO: 16504 - protein, 312 aa, Zea mays subsp. mays
  peptide (1)..(312): Ceres Seq. ID no. 12566277
MDNHQLVAMAAVAQPASPTSPHVAHKIPPGDGPYARAKHFQLVEKDLDASIAWFWKAISAGDKLDSALKDMAVVMKQRGYLAEAIDAIRSLRHLCPKQSQEPLDNILLDLYKASGRTKEEIELLKQKLRKIYLGEAFHGRTTKRARSHGRKIHVSVKQETSRVLGNLAWAYMQQRNFMAAEVVYRKAQMIDPDANKACNLALCLIEQARLADAELVLADVLAGRYLQARDQQDGKIVRKVEELLARIMAHTTWPGGGGGDGRRRPADKSGSGSESDDDDWVENQMLALLDVAVPYRKKSRRLPVFEEISRAE

SEQ ID NO: 16505 - protein, 304 aa, Zea mays subsp. mays
  peptide (1)..(304): Ceres Seq. ID no. 12566278
MAAVAQPASPTSPHVAHKIPPGDGPYARAKHFQLVEKDLDASIAWFWKAISAGDKLDSALKDMAVVMKQRGYLAEAIDAIRSLRHLCPKQSQEPLDNILLDLYKASGRTKEEIELLKQKLRKIYLGEAFHGRTTKRARSHGRKIHVSVKQETSRVLGNLAWAYMQQRNFMAAEVVYRKAQMIDPDANKACNLALCLIEQARLADAELVLADVLAGRYLQARDQQDGKIVRKVEELLARIMAHTTWPGGGGGDGRRRPADKSGSGSESDDDDWVENQMLALLDVAVPYRKKSRRLPVFEEISRAE

SEQ ID NO: 16506 - protein, 242 aa, Zea mays subsp. mays
  peptide (1)..(242): Ceres Seq. ID no. 12566279
MAVVMKQRGYLAEAIDAIRSLRHLCPKQSQEPLDNILLDLYKASGRTKEEIELLKQKLRKIYLGEAFHGRTTKRARSHGRKIHVSVKQETSRVLGNLAWAYMQQRNFMAAEVVYRKAQMIDPDANKACNLALCLIEQARLADAELVLADVLAGRYLQARDQQDGKIVRKVEELLARIMAHTTWPGGGGGDGRRRPADKSGSGSESDDDDWVENQMLALLDVAVPYRKKSRRLPVFEEISRAE

SEQ ID NO: 16507 - DNA, 699 bp, Zea mays subsp. mays
  misc_feature (1)..(699): Ceres Seq. ID no. 12346538
  misc_feature (1)..(699): Ortholog of  Ceres SEQ ID NO 14315067 as cited in SEQ ID NO 57249
  misc_feature (1)..(699): Ortholog of  Ceres SEQ ID NO 15173278 as cited in SEQ ID NO 58144
accaatgggcaacagccttaggtgctgcctggcctgcgtcctcccctgcggcgcgctggacctgatcaggatcgtccacctcaacggccgcatcgaggagtacggccggccggtggccgccggcgagatcctggccgccaacccgaaccacgtcctcagcaagccgtgctcccagggcgtcgccgtgcggaggatcctcatcgtgtcgccggactccgagctagagcgcggcgagatatacttcctcatcccggcctcgtcggtgccgccggagaagaagccgcagccgcagcgacagcagaagagcgtcgtcctggccggctcgcacggcaaccaggcggtggtcaacaagaaggcatcgtcgtcgcaccggagacgacgcaccgccggctgcagaaccaccgtatggaagccacacctcgagtgcattgttgagggggacacttaggcagaggtggacgatgatccattcttttgctctcttttttttttttttggtttttgtggatcaagcgggggggctaatggctaatgcaatgtaacaccactagcagcatggtgttttgcccacttaatttgtgtggttagtcagcatttttaatcttttttcttgggtaaatgtatatccatgtaatgttttcccccttcctacatatgatgggaatgcagaggaagggttgttgccagttctttcttctt

SEQ ID NO: 16508 - protein, 148 aa, Zea mays subsp. mays
  peptide (1)..(148): Ceres Seq. ID no. 12346539
PMGNSLRCCLACVLPCGALDLIRIVHLNGRIEEYGRPVAAGEILAANPNHVLSKPCSQGVAVRRILIVSPDSELERGEIYFLIPASSVPPEKKPQPQRQQKSVVLAGSHGNQAVVNKKASSSHRRRRTAGCRTTVWKPHLECIVEGDT

SEQ ID NO: 16509 - protein, 147 aa, Zea mays subsp. mays
  peptide (1)..(147): Ceres Seq. ID no. 12346540
MGNSLRCCLACVLPCGALDLIRIVHLNGRIEEYGRPVAAGEILAANPNHVLSKPCSQGVAVRRILIVSPDSELERGEIYFLIPASSVPPEKKPQPQRQQKSVVLAGSHGNQAVVNKKASSSHRRRRTAGCRTTVWKPHLECIVEGDT

SEQ ID NO: 16510 - DNA, 1771 bp, Zea mays subsp. mays
  misc_feature (1)..(1771): Ceres Seq. ID no. 12381090
  misc_feature (1)..(1771): Ortholog of  Ceres SEQ ID NO 15177692 as cited in SEQ ID NO 52664
  misc_feature (1)..(1771): Ortholog of  Ceres SEQ ID NO 14303959 as cited in SEQ ID NO 53709
gcacgagaccattacctagaacatcctaatcgaaaaatcgaatcgcgaccaaaccaaatcctccaccccggcgcgctgccccatcacccttcccgctgtgctcacgcaccaaaccccactccgttcctcactgcaatccaccgccccagctctttcgcgcaatggcggccgtcgcggcgccggcgccgccaccgccggcggcagctgagcctggaggacctcaaggtggtgtccgtgctcgggcgcggcgccaagggcgtcgtgttccacgtcgtgcacgctcccggggaaccggacggcgagggcgagggcgccgccgcagccgcggccatggcgctcaaggcggtctcgcgggaggcagcgcggcacaagaaggcggccagcggggacggggacggccaccgccggatctggttcgagcgggatgtgctcctggcgctgcgccacccgctgctcccttccctgcgaggcatcctcgccaccgacgcgatcgtcggcttcgccatggaccgctgcggcggcggggacctcaactcgctgcggcggcggcagacggagaagatgttctccgactccgtcatacggttctacgcggcggagctggtgctggcgctcgagtacctgcacagtctcggcgtcgtgtaccgggacctcaagccggagaacgtcctcatccaggacagcggccacatcatgctcgtcgacttcgacctctccacgcggctcccggccgcagccgcaggagccagacgcgccggccaccagtcccaagccggcgcctccggtcgccgcgccgtccccgagccgcggcagagcaaggaagccggcgggcgccgccctgtgcttcccattccgcaccaccggcagcgctgcgaagcctgccgcggactcgccgtcgccgctgtccacctcgcggacggcctcgtcgtcgtcgtcgtcctcgacggcgaccacggcctcctcctcggcggcgtcggccggcacgcggactcccgcgaagtcgaactcgttcgtggggacggaggactacgtggcgccggagatcatcgccgggcgcgggcacgacttcgccgtggactggtggggcctgggcgtggtgctctacgagatgctctacggccgcacgccgttccgggggcagaaccgcaaggagaccttctaccgcgtcctcgccaagcagccggagctcgtcggcgagcagacgccgctgcgcgacctcatcgcccgcctcctcgagaaggaccccgagaggcgcatcggcgcgcgcggcgtcaaggcccaccccttcttcggcggcgtcgactggaacgcatcctgcaggtggcgcgcccgccgttcatcccggcgccgccgcaggacgaggacggcgacgaggcgctcgacgtcgagaaggtcgtccgcgaggtgttcgcgtccaaggagggcgagggagggaaggcttcgcctgtggcagacggaggccctgtgggcggcgacggcgacgggaggagagatcattccaaagatggtgatttctcagtgtttttctgagctatttattttctttagatttgttctttctttttctttagatttgtactgtatgaacatgatggcatttagcaactgaggttaggagtgagtacggcgcaatggccggtggagtacataaattaaagaggtgcaggtgctcccgctcaatggggtatagccaatatatagggtttttttttgctgtgtactttgcttgatcataataaataataatgatagcgcagttgtgctcaaacgc

SEQ ID NO: 16511 - protein, 509 aa, Zea mays subsp. mays
  peptide (1)..(509): Ceres Seq. ID no. 12381091
ARDHYLEHPNRKIESRPNQILHPGALPHHPSRCAHAPNPTPFLTAIHRPSSFAQWRPSRRRRRHRRRQLSLEDLKVVSVLGRGAKGVVFHVVHAPGEPDGEGEGAAAAAAMALKAVSREAARHKKAASGDGDGHRRIWFERDVLLALRHPLLPSLRGILATDAIVGFAMDRCGGGDLNSLRRRQTEKMFSDSVIRFYAAELVLALEYLHSLGVVYRDLKPENVLIQDSGHIMLVDFDLSTRLPAAAAGARRAGHQSQAGASGRRAVPEPRQSKEAGGRRPVLPIPHHRQRCEACRGLAVAAVHLADGLVVVVVLDGDHGLLLGGVGRHADSREVELVRGDGGLRGAGDHRRARARLRRGLVGPGRGALRDALRPHAVPGAEPQGDLLPRPRQAAGARRRADAAARPHRPPPREGPREAHRRARRQGPPLLRRRRLERILQVARPPFIPAPPQDEDGDEALDVEKVVREVFASKEGEGGKASPVADGGPVGGDGDGRRDHSKDGDFSVFF

SEQ ID NO: 16512 - protein, 449 aa, Zea mays subsp. mays
  peptide (1)..(449): Ceres Seq. ID no. 12381092
MAAVAAPAPPPPAAAEPGGPQGGVRARARRQGRRVPRRARSRGTGRRGRGRRRSRGHGAQGGLAGGSAAQEGGQRGRGRPPPDLVRAGCAPGAAPPAAPFPARHPRHRRDRRLRHGPLRRRGPQLAAAAADGEDVLRLRHTVLRGGAGAGARVPAQSRRRVPGPQAGERPHPGQRPHHARRLRPLHAAPGRSRRSQTRRPPVPSRRLRSPRRPRAAAEQGSRRAPPCASHSAPPAALRSLPRTRRRRCPPRGRPRRRRRPRRRPRPPPRRRRPARGLPRSRTRSWGRRTTWRRRSSPGAGTTSPWTGGAWAWCSTRCSTAARRSGGRTARRPSTASSPSSRSSSASRRRCATSSPASSRRTPRGASARAASRPTPSSAASTGTHPAGGAPAVHPGAAAGRGRRRGARRREGRPRGVRVQGGRGREGFACGRRRPCGRRRRREERSFQRW

SEQ ID NO: 16513 - protein, 399 aa, Zea mays subsp. mays
  peptide (1)..(399): Ceres Seq. ID no. 12381093
MALKAVSREAARHKKAASGDGDGHRRIWFERDVLLALRHPLLPSLRGILATDAIVGFAMDRCGGGDLNSLRRRQTEKMFSDSVIRFYAAELVLALEYLHSLGVVYRDLKPENVLIQDSGHIMLVDFDLSTRLPAAAAGARRAGHQSQAGASGRRAVPEPRQSKEAGGRRPVLPIPHHRQRCEACRGLAVAAVHLADGLVVVVVLDGDHGLLLGGVGRHADSREVELVRGDGGLRGAGDHRRARARLRRGLVGPGRGALRDALRPHAVPGAEPQGDLLPRPRQAAGARRRADAAARPHRPPPREGPREAHRRARRQGPPLLRRRRLERILQVARPPFIPAPPQDEDGDEALDVEKVVREVFASKEGEGGKASPVADGGPVGGDGDGRRDHSKDGDFSVFF

SEQ ID NO: 16514 - DNA, 1622 bp, Zea mays subsp. mays
  misc_feature (1)..(1622): Ceres Seq. ID no. 12349591
  misc_feature (1)..(1622): Ortholog of  Ceres SEQ ID NO 14316165 as cited in SEQ ID NO 52560
  misc_feature (1)..(1622): Ortholog of  Ceres SEQ ID NO 13597076 as cited in SEQ ID NO 63571
gagaaggaagaagctcaggcgaagcgaggcagagggatgtcgtgacgacgaaaccgaagccgagaacggaagcgagccttacatatacccggccccgtcccagtgccctcggcttccgccccagataccaaaccctaaccttagtcggccgttccgcaggcccgccggcggcgacgccttgtgtgccgcgtccgtgattctcttgcacagggaagcgtttggaaggggactccctgcctagtgcactggccgcagcgacgcgcggccgaggcgcggatcggggaggggaggacggctgtggcgagatggcgggtgacgtcgcgacctcgccagccccggcgccgctgtccgtgtcctcatcgtcgcagaaccaccaccaccacggccccacgaccgcccgcggtctcctctgccacgccggcgccggtgcctccgctggtgtggtggcggcgacgttcgtgtgcccactcgatgtcatcaagaccaggttccaggtccacggctggcccaagcttgccacaggtagtgtaattattgggagcttgcagcagattgctcaacaagaaggtttccggggaatgtatcgcggcctatccccaactattctggcactcttgcctaactgggcggtttactttactgtgtatgagcagcttaaaagttttctttcttccaacgatggaagccatcaactttctttaggggcaaatgttgttgctgcatcatgtgctggagctgcaacaactattgtaacaaatccactttgggttgtgaagacaagatttcagacccaaggaattagagccgggccaatcccgtataaaggtacacttgctgccttgagaagaatagcacatgaagaaggcatccgagggctatacagtggcctggtccctgccttggctggtatcagtcacgttgctattcagttccctgtgtacgagaagataaaagcttatctggctgagcgagataatactactgtagaagcattgagttttggtgatgtcgctgttgcttcgtctctggctaaagtagctgcgtcaacattgacatatcctcatgaggttgttcgatcaaggctgcaagaccagcgagcaaactctgatgccagatacaaaggtgtaatagactgtgtcagaaaggtttatcataaagagggtgtggctggcttctaccgtggatgtgccacaaatctgttgcggacgacccctgctgcagtgataactttcactagcttcgagatgatccataggtcccttcttgatctattccctgctgaacctgaacctcacatccaacctctaaagcattgaccatacaacatttgtaccctatccatgcggcagattaggaccccagtaaccatccagcaacagcaatgttgtttactgtgccagatggctcttgtaaaagagagaattgtttttttccccagataatagctgccattcaaaagttgaaacaatagtgtaggcagagcattagcatctgtgtacgtaatagatttgttagcatgcatttggggtggaggtatatgagcgatgttgggtattttttatgatgatgacgaaaagaaaaatgttacgacatatgaaggaatgattactatattcttttcc

SEQ ID NO: 16515 - protein, 336 aa, Zea mays subsp. mays
  peptide (1)..(336): Ceres Seq. ID no. 12349592
MAGDVATSPAPAPLSVSSSSQNHHHHGPTTARGLLCHAGAGASAGVVAATFVCPLDVIKTRFQVHGWPKLATGSVIIGSLQQIAQQEGFRGMYRGLSPTILALLPNWAVYFTVYEQLKSFLSSNDGSHQLSLGANVVAASCAGAATTIVTNPLWVVKTRFQTQGIRAGPIPYKGTLAALRRIAHEEGIRGLYSGLVPALAGISHVAIQFPVYEKIKAYLAERDNTTVEALSFGDVAVASSLAKVAASTLTYPHEVVRSRLQDQRANSDARYKGVIDCVRKVYHKEGVAGFYRGCATNLLRTTPAAVITFTSFEMIHRSLLDLFPAEPEPHIQPLKH

SEQ ID NO: 16516 - protein, 245 aa, Zea mays subsp. mays
  peptide (1)..(245): Ceres Seq. ID no. 12349593
MYRGLSPTILALLPNWAVYFTVYEQLKSFLSSNDGSHQLSLGANVVAASCAGAATTIVTNPLWVVKTRFQTQGIRAGPIPYKGTLAALRRIAHEEGIRGLYSGLVPALAGISHVAIQFPVYEKIKAYLAERDNTTVEALSFGDVAVASSLAKVAASTLTYPHEVVRSRLQDQRANSDARYKGVIDCVRKVYHKEGVAGFYRGCATNLLRTTPAAVITFTSFEMIHRSLLDLFPAEPEPHIQPLKH

SEQ ID NO: 16517 - DNA, 1381 bp, Zea mays subsp. mays
  misc_feature (1)..(1381): Ceres Seq. ID no. 12349594
  misc_feature (1)..(1381): Ortholog of  Ceres SEQ ID NO 15177414 as cited in SEQ ID NO 57242
  misc_feature (1)..(1381): Ortholog of  Ceres SEQ ID NO 13594151 as cited in SEQ ID NO 58886
gacctgtcgtcttcgtctccggcagagcaaagcggcggcgaggcgggagatatagaggagagacgagagcgggatggggtacctgtggagggtgcggctgtcttcatttgctgccggcgcggcgacggcttcggcggcggggttcttcctcctctacaaggaccacctgctcgcccgcgctgccgacgccgagtccaactccgcctcctactccccgccgctcgccacagccgacaccgctttctccgcgccgccgcgcgccgtggcgcccgccgacctccagctctccgggtcctacgcctccgacatctacacctacctccgctccctggaggtggatccgcagcggcggtccagatccgattacatcgaggcggtgcaggcggacgtcacggcccacatgcggagcatcctcgtcgactggctcgtcgaggtcgccgaggagtacaagctcgtcgcggacacgctctacctcaccatctcttatgtcgaccgcttcctctccgtcaacgcgctcggccgtgacaagctgcagctccttggcgttgcctccatgctcattgccgcgaagttcgaggagatcagcccgccgcacccggaggacttctgctacatcacagacaacacctacaccaaagaggagctcctcaagatggagagcgacatactcaagcttctcaagttcgagttgggcaatcctacaatcaagaccttcctgagacgtttcataagatctgcccatgaagacaagaagggctccatcttgttaatggaattcttggggagctacctcgctgagctgagtctactagattatggctgcctccggttcttgccatcagtagttgctgcttcagtcatgtttgttgctaggctgaccattgatccaaataccaatccgtggaacacaaagctgcagaagatgactggctacaaagtttctgaactcaaggattgcatcgtagccatacatgacttgcagctcaacaggaaatgtccatcattaacggcaattcgagacaagtacaagcagcacaagttcaaatgcgtgtcattgatcctcgtgcctgtcgtgatccctacttcatactttgaagacttagctgagtagctgctctcggactgtaccgctgtaaggctaacaatctgagctctccttgagctcttagggacaagcagaaaataaccgtttgatgagctttcctctcatttaagtagcgtggtgaaagctatttgtttgaggttctttaggattcgcgccgctgtgtcactcttagtgagaccaggcattctcttgctgtgaatcttgtatcatatcttagtcacaccttgccttggtccgttggcaacgaatgtaatgtttgatacgttagacccttcg

SEQ ID NO: 16518 - protein, 345 aa, Zea mays subsp. mays
  peptide (1)..(345): Ceres Seq. ID no. 12349595
MGYLWRVRLSSFAAGAATASAAGFFLLYKDHLLARAADAESNSASYSPPLATADTAFSAPPRAVAPADLQLSGSYASDIYTYLRSLEVDPQRRSRSDYIEAVQADVTAHMRSILVDWLVEVAEEYKLVADTLYLTISYVDRFLSVNALGRDKLQLLGVASMLIAAKFEEISPPHPEDFCYITDNTYTKEELLKMESDILKLLKFELGNPTIKTFLRRFIRSAHEDKKGSILLMEFLGSYLAELSLLDYGCLRFLPSVVAASVMFVARLTIDPNTNPWNTKLQKMTGYKVSELKDCIVAIHDLQLNRKCPSLTAIRDKYKQHKFKCVSLILVPVVIPTSYFEDLAE

SEQ ID NO: 16519 - protein, 238 aa, Zea mays subsp. mays
  peptide (1)..(238): Ceres Seq. ID no. 12349596
PVVFVSGRAKRRRGGRYRGETRAGWGTCGGCGCLHLLPARRRLRRRGSSSSTRTTCSPALPTPSPTPPPTPRRSPQPTPLSPRRRAPWRPPTSSSPGPTPPTSTPTSAPWRWIRSGGPDPITSRRCRRTSRPTCGASSSTGSSRSPRSTSSSRTRSTSPSLMSTASSPSTRSAVTSCSSLALPPCSLPRSSRRSARRTRRTSATSQTTPTPKRSSSRWRATYSSFSSSSWAILQSRPS

SEQ ID NO: 16520 - protein, 236 aa, Zea mays subsp. mays
  peptide (1)..(236): Ceres Seq. ID no. 12349597
MRSILVDWLVEVAEEYKLVADTLYLTISYVDRFLSVNALGRDKLQLLGVASMLIAAKFEEISPPHPEDFCYITDNTYTKEELLKMESDILKLLKFELGNPTIKTFLRRFIRSAHEDKKGSILLMEFLGSYLAELSLLDYGCLRFLPSVVAASVMFVARLTIDPNTNPWNTKLQKMTGYKVSELKDCIVAIHDLQLNRKCPSLTAIRDKYKQHKFKCVSLILVPVVIPTSYFEDLAE

SEQ ID NO: 16521 - DNA, 1230 bp, Zea mays subsp. mays
  misc_feature (1)..(1230): Ceres Seq. ID no. 12434921
  misc_feature (1)..(1230): Ortholog of  Ceres SEQ ID NO 13662799 as cited in SEQ ID NO 65338
gcacgagaccattacctagaacatcctaatcgaaaaacgacgacgagaatccccccatcccccaccaggccacaaaaaccaggtcgccgatgccgcctaccgtctgacatcgatcacccaggcagatcgcgcgcaagccacccaaacaaatccaaaaccgaatcctgatccgatcccgtcgatcggcggcggcggcgatggaggcccggcccggcgcgtggcgcctgcagcagcggggccccggcgcgcccgtcgcgggcctgcccatcggcttccgcttccgccccaccgacgaggagctgctgctgcactacctccgccgcaaggcgctggcctgcccgctcccggcgggcgtcatcccggacgccgacctcgcgcgcctcgacccgtcggacctcctcctccccgccgccgcaccacctgcggggggagccgccgacgacgccagcggggagcacttcttcttccaccgcccggcgacgcggtgctggcgcaggggaggcggcgcggccagggcggccggcgccggcgtctggaggccgtccgggaaggagaccgtcgtcgtgtcgccgcgctgcaagcgcccccgtcggcaccaagcggacgctcgtcttctgcccgcgccgccgtggcggcggcggcgcccgcaccgactgggtcatgcacgagtaccgcctcctccccgccggcctccacctccacggctgcgccgccaacgcgcctccgcccactaatgtgagctcccatggcggtggcgcggcggcggccgactgggtggtctgtcgcattttcaggagggccaggccagcccaccgcgcccgccttggtgacgcgcaagaagaagaagaagagcacgcggcggtggagagcgcgtcgtccacgtcgtcgtgcgtcaccgacgcctccgggaccatcggccaggacgatgacggcgacgaagggatcagtggcagctgcagcgtcgcctcctctaattgagaccgactagaagaaacaagagttggctagcccgcccgtcgaccaaatcacgggcgccgtgtcctaattgccgtagcaccctctcagtctcagtccctagtagcaatcaatagagagaagaagcttgagctccaacaaaccgacaacaacatcataaaaaggctaagcgctttgctgccatgttatgttgttgctggagctcgtcgcgaatccagagtgttaattagcgagaaaatcaatcagttcccttcc

SEQ ID NO: 16522 - protein, 178 aa, Zea mays subsp. mays
  peptide (1)..(178): Ceres Seq. ID no. 12434922
MEARPGAWRLQQRGPGAPVAGLPIGFRFRPTDEELLLHYLRRKALACPLPAGVIPDADLARLDPSDLLLPAAAPPAGGAADDASGEHFFFHRPATRCWRRGGGAARAAGAGVWRPSGKETVVVSPRCKRPRRHQADARLLPAPPWRRRRPHRLGHARVPPPPRRPPPPRLRRQRASAH

SEQ ID NO: 16523 - protein, 105 aa, Zea mays subsp. mays
  peptide (1)..(105): Ceres Seq. ID no. 12434923
MHEYRLLPAGLHLHGCAANAPPPTNVSSHGGGAAAADWVVCRIFRRARPAHRARLGDAQEEEEEHAAVESASSTSSCVTDASGTIGQDDDGDEGISGSCSVASSN

SEQ ID NO: 16524 - DNA, 1449 bp, Zea mays subsp. mays
  misc_feature (1)..(1449): Ceres Seq. ID no. 12366087
  misc_feature (1)..(1449): Ortholog of  Ceres SEQ ID NO 15177935 as cited in SEQ ID NO 60258
  misc_feature (1)..(1449): Ortholog of  Ceres SEQ ID NO 13659033 as cited in SEQ ID NO 66372
  misc_feature (1)..(1449): Ortholog of  Ceres SEQ ID NO 13655724 as cited in SEQ ID NO 68973
  misc_feature (1)..(1449): Ortholog of  Ceres SEQ ID NO 12625899 as cited in SEQ ID NO 69079
  misc_feature (1)..(1449): Ortholog of  Ceres SEQ ID NO 15180366 as cited in SEQ ID NO 0
acattttttactgcgagaggctcctcgtcccactttgcattgcacccccgcaagctctcttcactctccccagctcaactcaaatgcaagcaaagatcgagcagaaacggcagcggctgctgggcatcgcgcccgatctgccgctgcacaagctccagctcgtcgtcgccccgaccgcggcctcgctcccggcgctcgccgtggtcgccctcctcctcctcctcctcgccacggcgcgccgtccgtgctccttcctcgacgcgtaccgctccggcgtcgtctccctgccttccccgtccagaacctcgccgccccacctcgggcgctctgcggccgccaacagggtgccgagcgggtgcgacatcttccgcccgggccagtgggttcccgacgacgacgcgccgtactacaccaacctcacctgcccgctcatccaggagcaccagaactgcatgaagtacggccgccccgaccgcggattccttcgctggcggtggcgccccgatggctgcgacctgccccgcttcgacgccgccgccttcctggacgccgtccgggacacgtcgctggcgttcgtcggggactcgctcgccaggaaccacatgcagtccctcatgtgcctcctgtccaaggtggcgtaccccaaagacgtctcgacgacgacgaacccagagttccggacgatgcgctacgaggcgtacaacttcaccatggccatcttctggtcgccgttcctggtccgggggcaccagccggacccgcggcgccacatgtgggacatctacctggacgagccggacgcggcgtggcgcgacgccgtctcgggcttcgaccgcgtggtcctgtcggcggcgacctggttcacccggccggccatgttctacgaggccggcggggggcgcgtccgcgtcgtggggtgccactactgcctggtcccgggcgtccccgaccggacgctgcgctactcgctgcgcatggcgctccgctccgcgctccgcgtgctcacggggccccggttcaacaggacggtgatcctgcggacgctgtcgccgacgtcgcacttcgagggcggggagtgggaccggggcggggactgccggcggacgcggccgttcgcgcccaacgagacgcgggtggcggggctggacctcgacctccacgcggtgcaggtggaggagttctccagggcaagggccgaggcggaggcgtccggcggggggacgaggctggcgctcatggacaccacggcggccatggtgcttcggccggacggccacccgagccggtacggccactggccgcacgagaacgtgacgctgtacaacgactgcgtgcactggtgcctccccggccccatcgacgcctggaacgacatgctgctccagatgctcctcgcggacccatcttgatgtccgtgtgtttcttccgctagctccaatttgtcccagg

SEQ ID NO: 16525 - protein, 476 aa, Zea mays subsp. mays
  peptide (1)..(476): Ceres Seq. ID no. 12366088
HFLLREAPRPTLHCTPASSLHSPQLNSNASKDRAETAAAAGHRARSAAAQAPARRRPDRGLAPGARRGRPPPPPPRHGAPSVLLPRRVPLRRRLPAFPVQNLAAPPRALCGRQQGAERVRHLPPGPVGSRRRRAVLHQPHLPAHPGAPELHEVRPPRPRIPSLAVAPRWLRPAPLRRRRLPGRRPGHVAGVRRGLARQEPHAVPHVPPVQGGVPQRRLDDDEPRVPDDALRGVQLHHGHLLVAVPGPGAPAGPAAPHVGHLPGRAGRGVARRRLGLRPRGPVGGDLVHPAGHVLRGRRGARPRRGVPLLPGPGRPRPDAALLAAHGAPLRAPRAHGAPVQQDGDPADAVADVALRGRGVGPGRGLPADAAVRAQRDAGGGAGPRPPRGAGGGVLQGKGRGGGVRRGDEAGAHGHHGGHGASAGRPPEPVRPLAARERDAVQRLRALVPPRPHRRLERHAAPDAPRGPILMSVCFFR

SEQ ID NO: 16526 - protein, 468 aa, Zea mays subsp. mays
  peptide (1)..(468): Ceres Seq. ID no. 12366089
IFYCERLLVPLCIAPPQALFTLPSSTQMQAKIEQKRQRLLGIAPDLPLHKLQLVVAPTAASLPALAVVALLLLLLATARRPCSFLDAYRSGVVSLPSPSRTSPPHLGRSAAANRVPSGCDIFRPGQWVPDDDAPYYTNLTCPLIQEHQNCMKYGRPDRGFLRWRWRPDGCDLPRFDAAAFLDAVRDTSLAFVGDSLARNHMQSLMCLLSKVAYPKDVSTTTNPEFRTMRYEAYNFTMAIFWSPFLVRGHQPDPRRHMWDIYLDEPDAAWRDAVSGFDRVVLSAATWFTRPAMFYEAGGGRVRVVGCHYCLVPGVPDRTLRYSLRMALRSALRVLTGPRFNRTVILRTLSPTSHFEGGEWDRGGDCRRTRPFAPNETRVAGLDLDLHAVQVEEFSRARAEAEASGGGTRLALMDTTAAMVLRPDGHPSRYGHWPHENVTLYNDCVHWCLPGPIDAWNDMLLQMLLADPS

SEQ ID NO: 16527 - protein, 441 aa, Zea mays subsp. mays
  peptide (1)..(441): Ceres Seq. ID no. 12366090
MQAKIEQKRQRLLGIAPDLPLHKLQLVVAPTAASLPALAVVALLLLLLATARRPCSFLDAYRSGVVSLPSPSRTSPPHLGRSAAANRVPSGCDIFRPGQWVPDDDAPYYTNLTCPLIQEHQNCMKYGRPDRGFLRWRWRPDGCDLPRFDAAAFLDAVRDTSLAFVGDSLARNHMQSLMCLLSKVAYPKDVSTTTNPEFRTMRYEAYNFTMAIFWSPFLVRGHQPDPRRHMWDIYLDEPDAAWRDAVSGFDRVVLSAATWFTRPAMFYEAGGGRVRVVGCHYCLVPGVPDRTLRYSLRMALRSALRVLTGPRFNRTVILRTLSPTSHFEGGEWDRGGDCRRTRPFAPNETRVAGLDLDLHAVQVEEFSRARAEAEASGGGTRLALMDTTAAMVLRPDGHPSRYGHWPHENVTLYNDCVHWCLPGPIDAWNDMLLQMLLADPS

SEQ ID NO: 16528 - DNA, 1374 bp, Zea mays subsp. mays
  misc_feature (1)..(1374): Ceres Seq. ID no. 12352823
  misc_feature (1)..(1374): Ortholog of  Ceres SEQ ID NO 13596762 as cited in SEQ ID NO 63019
accaaaccgccccgccgagcgacccagtccgtcagcgagcacccctgtcgccgaagcccaggcagcagcagcgggcagcggcgtccgtccggtccgcgcgcgttcgttccccacttcccctccccgaccggcagattccccgtccacgcccccgccttaaaacgcccgccactaatcccgtttctcactgcccttccgcggctgtgctgtgctgttctgtgctctgctctgctctgctccccgtctttcctcctctcccggtctttcctcctctccccttcccgcccagcgcgtccccccgaggaaccaaccccgcggcatggggatcgtggaggaggcgcacaacctgcgagtggtgggcgaggggaagcgcggggtcatcgtgctggcgcacggcttcggcaccgaccagtccgtgtggaagcacctggtgccgcacctcgtcgcccgactaccgcgtcgtgctcttcgacaccatgggcgccggccccaccaacccggactacttcgacttctcccgctacgccacgctcgagggctacgcgctcgacctcctcgccatcctccaggagctcggcgtccgctcctgcatctacgtcggccactccgtctccgcggtcatcggcgcgctcgcctccatctccaggcctgacctcttcaccaagctcgtgctcctctccgcgtccccaaggtacctcaatgatgtggactactatggcgggtttgagcaagatgagcttgatgagctgtttgaggcgatgcgatcaaactacaaggcctggtgctcaggttttgcgcccctgtgtgttggcggagacatggaatcagtggcagttcaggagtttagcaggacgctcttcaatatacgtccggacattgcgcttagtgttgcccagacgatcttccagagcgacgtgcgcagcctcctcccgcacgtcactgtcccatgccacattgttcagagcaccaaggatctcgcggtgccggtcgtggtgtctgagtacctgcacaggcaccttggtggcgactccatcgtggaggtgatgccctctgaaggccatcttccccagcttagctctccggacattgtaatccctgtcttactccgacacatccagcacgatatcgcagtctaggttggtcaatcgttcctccaagacgatgagcatccgaagctgtctacttgtctgtttgtatcttgcttaattgttcaacgtaggatcgcatctatttgatgttctaataaggtttcaaaggtgttatgtagtgttggcggtggaaagtgtagcatatatgtatgtgttatccattggtcgtctaatgtaggctaccatgttggatgctctgacatctgaagtccttcagaagctcttc

SEQ ID NO: 16529 - protein, 377 aa, Zea mays subsp. mays
  peptide (1)..(377): Ceres Seq. ID no. 12352824
QTAPPSDPVRQRAPLSPKPRQQQRAAASVRSARVRSPLPLPDRQIPRPRPRLKTPATNPVSHCPSAAVLCCSVLCSALLPVFPPLPVFPPLPFPPSASPRGTNPAAWGSWRRRTTCEWWARGSAGSSCWRTASAPTSPCGSTWCRTSSPDYRVVLFDTMGAGPTNPDYFDFSRYATLEGYALDLLAILQELGVRSCIYVGHSVSAVIGALASISRPDLFTKLVLLSASPRYLNDVDYYGGFEQDELDELFEAMRSNYKAWCSGFAPLCVGGDMESVAVQEFSRTLFNIRPDIALSVAQTIFQSDVRSLLPHVTVPCHIVQSTKDLAVPVVVSEYLHRHLGGDSIVEVMPSEGHLPQLSSPDIVIPVLLRHIQHDIAV

SEQ ID NO: 16530 - protein, 347 aa, Zea mays subsp. mays
  peptide (1)..(347): Ceres Seq. ID no. 12352825
TKPPRRATQSVSEHPCRRSPGSSSGQRRPSGPRAFVPHFPSPTGRFPVHAPALKRPPLIPFLTALPRLCCAVLCSALLCSPSFLLSRSFLLSPSRPARPPEEPTPRHGDRGGGAQPASGGRGEARGHRAGARLRHRPVRVEAPGAAPRRPTTASCSSTPWAPAPPTRTTSTSPATPRSRATRSTSSPSSRSSASAPASTSATPSPRSSARSPPSPGLTSSPSSCSSPRPQGTSMMWTTMAGLSKMSLMSCLRRCDQTTRPGAQVLRPCVLAETWNQWQFRSLAGRSSIYVRTLRLVLPRRSSRATCAASSRTSLSHATLFRAPRISRCRSWCLSTCTGTLVATPSWR

SEQ ID NO: 16531 - protein, 219 aa, Zea mays subsp. mays
  peptide (1)..(219): Ceres Seq. ID no. 12352826
MGAGPTNPDYFDFSRYATLEGYALDLLAILQELGVRSCIYVGHSVSAVIGALASISRPDLFTKLVLLSASPRYLNDVDYYGGFEQDELDELFEAMRSNYKAWCSGFAPLCVGGDMESVAVQEFSRTLFNIRPDIALSVAQTIFQSDVRSLLPHVTVPCHIVQSTKDLAVPVVVSEYLHRHLGGDSIVEVMPSEGHLPQLSSPDIVIPVLLRHIQHDIAV

SEQ ID NO: 16532 - DNA, 1419 bp, Zea mays subsp. mays
  misc_feature (1)..(1419): Ceres Seq. ID no. 12353172
  misc_feature (1)..(1419): Ortholog of  Ceres SEQ ID NO 15171131 as cited in SEQ ID NO 58111
  misc_feature (1)..(1419): Ortholog of  Ceres SEQ ID NO 13655451 as cited in SEQ ID NO 68999
ccggcaaatcccgtatccaaatccaatagggtaaacctagccgcccatctgcccgccatgaaggcgtcgatcaagttccgcgacgacgaccgcccgctgctgcgcgccaaggtgccggtcggcgtgctggggctgcctttcttctcgggcctcgtggcggggggagacgccaaggacctccgcttcgacctctccaccgccttcacctccggcccggcgctccgcctctcgtaccgccccaacgaaccgctccagccctttgccctctccatccgcacggggctggggccgctggggtcccctgtccgagcccccttcgccctcgccgccgaattcaacctcacctcctcgaacccgcccgccttctcgctcgttttcaagccccggatcggagacttcgccgtcgccagctccgtccgctccccgccgccgccgccgcccgcatcaactctgcccccgctgtcggtcaagatgtccgacctcgtcaccaacggcgacgaccacgaccgcaaagcgcacggtaacgggttctccttctctgggaatgggttcgcggcgaacgtggcggccgccgccgggaccggcggcggcggcgtgggcgcgctgctgtccaggatgcggctcacgaccaggagtgtgctgccactgtggagtaaggcgagcctgcggttccagtgggggctgcgcgtgccgccggagatcaaggccgcgctcgcagacgacgggtacgggcgcaaggctgggagcctcgccatcagcaagctgccgctgctggtgatgaacaagatcaccatcgagcacacgcccaaggtgccttcgcagtctgaaacggataagaagaggaagaaagatgccccaccagcagccgagggcgaggtgttctcactaatgaagaggcaattggaggagctgaatgctgagagcaccatgctgcgtctggcagtcgaggacttgcgtgcagaggttggagccagcaaaggcgatggacgtaagctgccagcaacagtgccacatccacagcgttcattcgtgtcgaaaccagatcaccattttcacagcgatgctaaggatttgggagacagtgggacgaaaccggcctccaatgatgcaagtgaggggttgaagaaggcgctggaggccagacgaaagtaggaaacacctagataggggggccatagggcttgctgacactgcaagcgctacaatatgatatggctgctgacggctgtgtcaagttttgtgcttaataataatgcttcctcaatggagaagattggtaagggctgtgaggtagccattttccataggtgatgtagtagttttgcctatattctatttccattgtttgtgttaggatattatccgttctgtataaatccgcaacttgcgatctaaaatgaatgaaggattagttttttt

SEQ ID NO: 16533 - protein, 383 aa, Zea mays subsp. mays
  peptide (1)..(383): Ceres Seq. ID no. 12353173
PANPVSKSNRVNLAAHLPAMKASIKFRDDDRPLLRAKVPVGVLGLPFFSGLVAGGDAKDLRFDLSTAFTSGPALRLSYRPNEPLQPFALSIRTGLGPLGSPVRAPFALAAEFNLTSSNPPAFSLVFKPRIGDFAVASSVRSPPPPPPASTLPPLSVKMSDLVTNGDDHDRKAHGNGFSFSGNGFAANVAAAAGTGGGGVGALLSRMRLTTRSVLPLWSKASLRFQWGLRVPPEIKAALADDGYGRKAGSLAISKLPLLVMNKITIEHTPKVPSQSETDKKRKKDAPPAAEGEVFSLMKRQLEELNAESTMLRLAVEDLRAEVGASKGDGRKLPATVPHPQRSFVSKPDHHFHSDAKDLGDSGTKPASNDASEGLKKALEARRK

SEQ ID NO: 16534 - protein, 364 aa, Zea mays subsp. mays
  peptide (1)..(364): Ceres Seq. ID no. 12353174
MKASIKFRDDDRPLLRAKVPVGVLGLPFFSGLVAGGDAKDLRFDLSTAFTSGPALRLSYRPNEPLQPFALSIRTGLGPLGSPVRAPFALAAEFNLTSSNPPAFSLVFKPRIGDFAVASSVRSPPPPPPASTLPPLSVKMSDLVTNGDDHDRKAHGNGFSFSGNGFAANVAAAAGTGGGGVGALLSRMRLTTRSVLPLWSKASLRFQWGLRVPPEIKAALADDGYGRKAGSLAISKLPLLVMNKITIEHTPKVPSQSETDKKRKKDAPPAAEGEVFSLMKRQLEELNAESTMLRLAVEDLRAEVGASKGDGRKLPATVPHPQRSFVSKPDHHFHSDAKDLGDSGTKPASNDASEGLKKALEARRK

SEQ ID NO: 16535 - protein, 226 aa, Zea mays subsp. mays
  peptide (1)..(226): Ceres Seq. ID no. 12353175
MSDLVTNGDDHDRKAHGNGFSFSGNGFAANVAAAAGTGGGGVGALLSRMRLTTRSVLPLWSKASLRFQWGLRVPPEIKAALADDGYGRKAGSLAISKLPLLVMNKITIEHTPKVPSQSETDKKRKKDAPPAAEGEVFSLMKRQLEELNAESTMLRLAVEDLRAEVGASKGDGRKLPATVPHPQRSFVSKPDHHFHSDAKDLGDSGTKPASNDASEGLKKALEARRK

SEQ ID NO: 16536 - DNA, 1621 bp, Zea mays subsp. mays
  misc_feature (1)..(1621): Ceres Seq. ID no. 12366091
  misc_feature (1)..(1621): Ortholog of  Ceres SEQ ID NO 15176169 as cited in SEQ ID NO 0
caaaaatgggattggcttgccatattgcggaaattcatagccaggtaattgaggtggaggggtgcatgcaagtgtttttttcttctagtgctaggttgcattcttgcttcatattttttcttgaagctgttgctgcttgtactagtatctcgtactgctattcctttcacttactgttgggaccatgcttcgtcgccgaaggtcctgcagaaagaaacagcttcggctgaagttgctcgtacgcgatgccgaatgtgccatttcgtgaagcttcggaattacaaaccgacttaaagatagaatgaccttttagtccataagagtccgagtcattgttgtaaacttttacgagggctacgattgtaattcctcacgggttgtgtcctgtgcctataaatagtgaacaatattcctttactgttcatgcatccctgtaattgcaattgcatcactcggaaattaccctttgtcaaggcagaggtataaatgtgtctaaatattatgtttgaacatcttaaatttatagtatataaatgatgctatttatctccaatttacttgtctttaatgccttatgtcttacgttattttatattatctttgtgagttgaattatgaaggttaattctgccattataaccttcgtccgaagtacatccttagggaaataatgcttcagcggacgaagggcattgaaatttaacattttatgttgtcttgttcttaattcatagcatttgagaacaagtctccaacacttacaatttgctttgtctaggcgtcagtagagaacaacgcatgggaactgaaaataatacattgaggagctgtacttgcgatctgttaagcaggttctgctccttgtccatatcaaaggtggagttgatgcagctgcagctctttcttttcttgtactggtctgagctcaagggtaaggttactactggcctggcgttggttctgagcccatatggtggcaccccggtcgcctctgatatctttcgagaaggcctgatccctgataaggatacaaggaggatcatggagctcatggtatgcaaactaatcaagacgaacaagcagggtgacatcagggtcttggaggacacctcacacatgctaagacaaaggactgcatcaccaagcacaaacttcccgtcggtgagctcttcaaaggacttcatcgatgtgtcggcagccatggtggtcatgggcttacggccctccacctgcggctgcactatggggagaggagcaccgggctggtgacgaggcgtgatgccgaggtgcctgggttggtggtggtgaggcccgagagaaggctcgaccacgcgtggatggtttactccacgctgaagatgtgtagcgatgaggccgatgcaagcgagatgtgtgcgaggctctgctggccttgctcgttgagatcgacaggaagaaatttggctggccgtccggtcatgttggagtcctcgatggttttggttatagatgcaaatgtgtcgaaccagatagcacatgctacaaatgatcgatttgtttcctttgttcaaagcaaatatactgtggcaatatgctacttggctatgtaatgttcttcacattttaacttagttctatttgc

SEQ ID NO: 16537 - protein, 156 aa, Zea mays subsp. mays
  peptide (1)..(156): Ceres Seq. ID no. 12366092
MGTENNTLRSCTCDLLSRFCSLSISKVELMQLQLFLFLYWSELKGKVTTGLALVLSPYGGTPVASDIFREGLIPDKDTRRIMELMVCKLIKTNKQGDIRVLEDTSHMLRQRTASPSTNFPSVSSSKDFIDVSAAMVVMGLRPSTCGCTMGRGAPGW

SEQ ID NO: 16538 - protein, 127 aa, Zea mays subsp. mays
  peptide (1)..(127): Ceres Seq. ID no. 12366093
MQLQLFLFLYWSELKGKVTTGLALVLSPYGGTPVASDIFREGLIPDKDTRRIMELMVCKLIKTNKQGDIRVLEDTSHMLRQRTASPSTNFPSVSSSKDFIDVSAAMVVMGLRPSTCGCTMGRGAPGW

SEQ ID NO: 16539 - protein, 83 aa, Zea mays subsp. mays
  peptide (1)..(83): Ceres Seq. ID no. 12366094
MVYSTLKMCSDEADASEMCARLCWPCSLRSTGRNLAGRPVMLESSMVLVIDANVSNQIAHATNDRFVSFVQSKYTVAICYLAM

SEQ ID NO: 16540 - DNA, 1605 bp, Zea mays subsp. mays
  misc_feature (1)..(1605): Ceres Seq. ID no. 15180809
  misc_feature (1)..(1605): Ortholog of  Ceres SEQ ID NO 13598353 as cited in SEQ ID NO 68742
agaacatcctaatcgaaaagaaaccccagagctttaaagcttttccgattccgcaatgctcaccgttcggttccttctcgtaccgagccgcgggtagccagccaaccgccgacgcagtccacaagcgatgaagcgcttcttccagccagtgcccaaggacggctccccgtccaagaagcggctagcgggtgctgctgaaccgggcgacggccccacatcagccggtgccgccaccggcgctggcggggatgtagaggggaggcccaccgaggagccgttcaagttcctgacgtggaacgccaacagcctgctcctccggatgaagagcgactggcctgctttctcgcagctcgtcgcccgccttgaccccgacgtcatttgtgtccaggaagtgcggatgccggcagctggttccaaaggggcacctaaaaaccccagtgaactaaaagatgacacaagcttgtcacgggatgaaaagcaggtagttctacgtgctttgtcagcttcacctttcaaagactaccgtgtctggtggtctctttcagattcaaaatatgctgggacagctatgtttataaagaaaaagtttgagcctaagaaggtgtctttcaacttggatagaacatcttctaagcatgaagccgatgggcgtgttataattgcggaatttgaatcattccttttactgaacacttattctccaaacaatggatggaaggaggaggaaaatgcatttcaaagaagacgtaagtgggacaagaggatgctagaatttgttcaacacgtggataaacccttaatctggtgtggggacttgaatgtcagtcatgaagaaatcgacgtcagccatcctgatttctttagcagcgctaagctgaatggatacaccccacccaataaagaggactgtggacagccaggattcaccccagcagagagacggcgttttggcaacatattattccaaggaaagctggtagatgcttacaggcacctgcacaaagaaaaggacatagacggtggcttctcttggtccggtcatccaattggcaagtaccgaggaaagagaatgaggatcgactacttccttgtttcggaacagttaaaggacagaatagtttcatgtgaaatgcatggccgtggcattgaattggatggattttatggaagtgaccactgccctgtttcgcttgagctttccgaagctgtagcagaagaagcaccaggacagcccaagccatccatctaaatataccaccatggtggtcattgttgagacatttccggtccttcattaaacctgactgttccatgcattgcctactctaggtagctgaggtttgattgtaggtattattatgatcccagtaggttaccagttcctgtggtcagggctggtatagtttagggatcattgccatttaagcagtgcaatttggacatctcattctgcttgaaatgttgtttgtctaagagcagccatggactacctaatacctcatggggatcgaagagattaatcccttcgtatccaattttaactagcaagggatttaatccacccctaacaagcacaataaaatcttgttcgttttttctaccaca

SEQ ID NO: 16541 - protein, 373 aa, Zea mays subsp. mays
  peptide (1)..(373): Ceres Seq. ID no. 15180810
MKRFFQPVPKDGSPSKKRLAGAAEPGDGPTSAGAATGAGGDVEGRPTEEPFKFLTWNANSLLLRMKSDWPAFSQLVARLDPDVICVQEVRMPAAGSKGAPKNPSELKDDTSLSRDEKQVVLRALSASPFKDYRVWWSLSDSKYAGTAMFIKKKFEPKKVSFNLDRTSSKHEADGRVIIAEFESFLLLNTYSPNNGWKEEENAFQRRRKWDKRMLEFVQHVDKPLIWCGDLNVSHEEIDVSHPDFFSSAKLNGYTPPNKEDCGQPGFTPAERRRFGNILFQGKLVDAYRHLHKEKDIDGGFSWSGHPIGKYRGKRMRIDYFLVSEQLKDRIVSCEMHGRGIELDGFYGSDHCPVSLELSEAVAEEAPGQPKPSI

SEQ ID NO: 16542 - protein, 309 aa, Zea mays subsp. mays
  peptide (1)..(309): Ceres Seq. ID no. 15180811
MKSDWPAFSQLVARLDPDVICVQEVRMPAAGSKGAPKNPSELKDDTSLSRDEKQVVLRALSASPFKDYRVWWSLSDSKYAGTAMFIKKKFEPKKVSFNLDRTSSKHEADGRVIIAEFESFLLLNTYSPNNGWKEEENAFQRRRKWDKRMLEFVQHVDKPLIWCGDLNVSHEEIDVSHPDFFSSAKLNGYTPPNKEDCGQPGFTPAERRRFGNILFQGKLVDAYRHLHKEKDIDGGFSWSGHPIGKYRGKRMRIDYFLVSEQLKDRIVSCEMHGRGIELDGFYGSDHCPVSLELSEAVAEEAPGQPKPSI

SEQ ID NO: 16543 - protein, 283 aa, Zea mays subsp. mays
  peptide (1)..(283): Ceres Seq. ID no. 15180812
MPAAGSKGAPKNPSELKDDTSLSRDEKQVVLRALSASPFKDYRVWWSLSDSKYAGTAMFIKKKFEPKKVSFNLDRTSSKHEADGRVIIAEFESFLLLNTYSPNNGWKEEENAFQRRRKWDKRMLEFVQHVDKPLIWCGDLNVSHEEIDVSHPDFFSSAKLNGYTPPNKEDCGQPGFTPAERRRFGNILFQGKLVDAYRHLHKEKDIDGGFSWSGHPIGKYRGKRMRIDYFLVSEQLKDRIVSCEMHGRGIELDGFYGSDHCPVSLELSEAVAEEAPGQPKPSI

SEQ ID NO: 16544 - DNA, 1709 bp, Zea mays subsp. mays
  misc_feature (1)..(1709): Ceres Seq. ID no. 12372989
  misc_feature (1)..(1709): Ortholog of  Ceres SEQ ID NO 15172560 as cited in SEQ ID NO 57325
  misc_feature (1)..(1709): Ortholog of  Ceres SEQ ID NO 13655716 as cited in SEQ ID NO 68965
gctcgctcgctcgctctcctccgctcgattccagtggccctgctcccctcgtcgtccctctcccgagcgagagcagcaccggcagttcggacaggagctgaagccttggaggagtaaaggtgtggtcttgccatggagcagccgcagcagcacaagggaggagcggttccggcgcctgcagcggcggccgcgaacggggccggggccggggccgcggagctgatcgggtacgtcgacgtgcacgtgcgtagcgcgcgggacatccagaacatctgcatctaccacaagcaggacgtgtacgcgcggctctcgctgccgggagacggcgcgccggcggcgtccacgcaggtggtcaacggcgggggccgcaacccggtgttcgaccagtcgctgcgcctcggcgtgcgcgcgggggacgtcgacgccgcgctccgctgcgaggtgtggatgctcagccgggtcaagaactacctgcaggaccagctgctgggcttcgcgctcgtgccgctcccggaggtcgtcgccgccgacggcggcacgctcgcccgcgacttcccgctcaccaccagcgacctcttccagaccccctcgggcttcctgcagctcgagctctcctacatcggggtcgtgccggaggtcgtgcccatctcgccgacgcccaagccggcgctggccgacccggacgaggaggagccggggaacaacgccgccgacggcgtcgggaacgggaaggagtacgagaagatcgagttcccggacctgaatctcgtggaggagaaccagatcatggtctccgagtacaccaggctgccgtgcgcggccgtggaaacgcagagctgcgacagcctcctgacctcggagcacgatgacggcgccacggccctgagccgggacgccgccgtgcgcctcgtggagagcttctcgacggacaacagcaccgccgactcggtgggcgccttccagagcgacacgccggttagcagcgtgtctaccacggagttcccggccacccctcagtctaactccagctcggagccgtccgggaacgcccactcgtcggcttaccacaaggcgaaggcggcgtcggagaccgccgacgcggaggtcgactcgtcccgcaccgtccaggaggtcgcggcggcgaactcgccctgcgccgcgtcggaggctgccgtgcacaagccggtgatcagcgtcaacatcgagcaggaggtgaaggtggacgggaaccaaatcatggacatgtacatgaagagtatgcagcaattcacggattccctggccaaaatgaagcttccagccttggacatagacaacggtagcagcgggatgagcagtcccgcagcagccacacccagcgcagactccactggtgccgactcgaccgcggtgaagaagccgaccgccgccgggcagcaggagaagccctctcccaaggtgttctacggcagccgggcgttcttctgatctccggttcgctgatcagcggtagcacaccgctccagccgccgagtaacgaagcaaagagacggcatttgcagtcgtctcagctgaatcttactagcgcagaggaataacaccttctcaggctcttgttctaggtttgtcagatcggggatgagttactgtcttaatgtatccgtcagtacttatgaaaaatggtttggtttctctgttttagtaatgatatttagatccttttttctgtt

SEQ ID NO: 16545 - protein, 444 aa, Zea mays subsp. mays
  peptide (1)..(444): Ceres Seq. ID no. 12372990
MEQPQQHKGGAVPAPAAAAANGAGAGAAELIGYVDVHVRSARDIQNICIYHKQDVYARLSLPGDGAPAASTQVVNGGGRNPVFDQSLRLGVRAGDVDAALRCEVWMLSRVKNYLQDQLLGFALVPLPEVVAADGGTLARDFPLTTSDLFQTPSGFLQLELSYIGVVPEVVPISPTPKPALADPDEEEPGNNAADGVGNGKEYEKIEFPDLNLVEENQIMVSEYTRLPCAAVETQSCDSLLTSEHDDGATALSRDAAVRLVESFSTDNSTADSVGAFQSDTPVSSVSTTEFPATPQSNSSSEPSGNAHSSAYHKAKAASETADAEVDSSRTVQEVAAANSPCAASEAAVHKPVISVNIEQEVKVDGNQIMDMYMKSMQQFTDSLAKMKLPALDIDNGSSGMSSPAAATPSADSTGADSTAVKKPTAAGQQEKPSPKVFYGSRAFF

SEQ ID NO: 16546 - protein, 339 aa, Zea mays subsp. mays
  peptide (1)..(339): Ceres Seq. ID no. 12372991
MLSRVKNYLQDQLLGFALVPLPEVVAADGGTLARDFPLTTSDLFQTPSGFLQLELSYIGVVPEVVPISPTPKPALADPDEEEPGNNAADGVGNGKEYEKIEFPDLNLVEENQIMVSEYTRLPCAAVETQSCDSLLTSEHDDGATALSRDAAVRLVESFSTDNSTADSVGAFQSDTPVSSVSTTEFPATPQSNSSSEPSGNAHSSAYHKAKAASETADAEVDSSRTVQEVAAANSPCAASEAAVHKPVISVNIEQEVKVDGNQIMDMYMKSMQQFTDSLAKMKLPALDIDNGSSGMSSPAAATPSADSTGADSTAVKKPTAAGQQEKPSPKVFYGSRAFF

SEQ ID NO: 16547 - protein, 226 aa, Zea mays subsp. mays
  peptide (1)..(226): Ceres Seq. ID no. 12372992
MVSEYTRLPCAAVETQSCDSLLTSEHDDGATALSRDAAVRLVESFSTDNSTADSVGAFQSDTPVSSVSTTEFPATPQSNSSSEPSGNAHSSAYHKAKAASETADAEVDSSRTVQEVAAANSPCAASEAAVHKPVISVNIEQEVKVDGNQIMDMYMKSMQQFTDSLAKMKLPALDIDNGSSGMSSPAAATPSADSTGADSTAVKKPTAAGQQEKPSPKVFYGSRAFF

SEQ ID NO: 16548 - DNA, 1157 bp, Zea mays subsp. mays
  misc_feature (1)..(1157): Ceres Seq. ID no. 12353179
  misc_feature (1)..(1157): Ortholog of  Ceres SEQ ID NO 14304689 as cited in SEQ ID NO 53265
  misc_feature (1)..(1157): Ortholog of  Ceres SEQ ID NO 14307820 as cited in SEQ ID NO 53938
  misc_feature (1)..(1157): Ortholog of  Ceres SEQ ID NO 15177137 as cited in SEQ ID NO 55030
  misc_feature (1)..(1157): Ortholog of  Ceres SEQ ID NO 14302407 as cited in SEQ ID NO 66891
  misc_feature (1)..(1157): Ortholog of  Ceres SEQ ID NO 13599557 as cited in SEQ ID NO 0
ctctctctagtccagatttccagcggtccagaccgagagctcggctccctacacgacatcatcatggacgccgccccgctcctcgctctcctcctcgcggccgtgtccctctccgcggcggcggcgggcgacggcgcgcacccgggctactccgacgagggcacctgcacggtggacgccgccggagcgggcgtgggctcgggcccggagctgcggcgcctggaggagcgccggcccgggcgcatcatcgacatcacgcacgcgtacgtgccggaccttctggcgttcgcgccgggggctgtcacggggcccttggtccacctcaaggagtccatggcgaacgggtccgagtacaacctgtcggagctgcggttggagtgccacatgggcacccacgtcgacgcgccaggccacatgaaccaaggccacttcgccgccggcctcgacgtggacacgctcgacctcgacgtcctcaactgacctgcgttgctggttgatgttccgagggacacaaatataacagctgaagcgatggaattcctgaatatccctagaggagttcgccgagttctattcaggacgctgaacactgacaggaagttgatgtggaggaagggaggtgacatgagctatgttgggtttacagaggatggcgcacagtggctagttgacaacactgacataaagctagtcggaatcgacagtctatcggttgcagcatttgagcacttgatctctgcccatgtggtcttcttcaagaccccggatataatccctgtcgaaggcctgaagctagacaacattgagacgggaatatacatgctgcattgtttacctctcagactggttggagccgagggtgcaccgaccagatgcatcctcatcaagtgatcacccccctgctcttgctggaggtgacattgtatcatgccagctgagctgatgcttcatcgtggccaacgcattgattcgcagtcttcgtcttcgtctatatgaaacatagtgttgtatgcccatgtagatatgcttgtacggacaatagagacacagcaatacttccatcaaggaaatacttttgggtaagccggtaatgtaaaagacagacatacagttgactgaataaactagaggcctgagaggctgaggcctcgtgcttc

SEQ ID NO: 16549 - protein, 164 aa, Zea mays subsp. mays
  peptide (1)..(164): Ceres Seq. ID no. 12353180
LSSPDFQRSRPRARLPTRHHHGRRPAPRSPPRGRVPLRGGGGRRRAPGLLRRGHLHGGRRRSGRGLGPGAAAPGGAPARAHHRHHARVRAGPSGVRAGGCHGALGPPQGVHGERVRVQPVGAAVGVPHGHPRRRARPHEPRPLRRRPRRGHARPRRPQLTCVAG

SEQ ID NO: 16550 - protein, 159 aa, Zea mays subsp. mays
  peptide (1)..(159): Ceres Seq. ID no. 12353181
LSLVQISSGPDRELGSLHDIIMDAAPLLALLLAAVSLSAAAAGDGAHPGYSDEGTCTVDAAGAGVGSGPELRRLEERRPGRIIDITHAYVPDLLAFAPGAVTGPLVHLKESMANGSEYNLSELRLECHMGTHVDAPGHMNQGHFAAGLDVDTLDLDVLN

SEQ ID NO: 16551 - protein, 138 aa, Zea mays subsp. mays
  peptide (1)..(138): Ceres Seq. ID no. 12353182
MDAAPLLALLLAAVSLSAAAAGDGAHPGYSDEGTCTVDAAGAGVGSGPELRRLEERRPGRIIDITHAYVPDLLAFAPGAVTGPLVHLKESMANGSEYNLSELRLECHMGTHVDAPGHMNQGHFAAGLDVDTLDLDVLN

SEQ ID NO: 16552 - DNA, 1522 bp, Zea mays subsp. mays
  misc_feature (1)..(1522): Ceres Seq. ID no. 12372985
  misc_feature (1)..(1522): Ortholog of  Ceres SEQ ID NO 13648081 as cited in SEQ ID NO 165
  misc_feature (1)..(1522): Ortholog of  Ceres SEQ ID NO 15224803 as cited in SEQ ID NO 56572
  misc_feature (1)..(1522): Ortholog of  Ceres SEQ ID NO 13502952 as cited in SEQ ID NO 62271
  misc_feature (1)..(1522): Ortholog of  Ceres SEQ ID NO 13502973 as cited in SEQ ID NO 68052
  misc_feature (1)..(1522): Ortholog of  Ceres SEQ ID NO 13596000 as cited in SEQ ID NO 68188
aacacctttcatcacaaccacaaagacagccagccagccagccatcattgatcatagcatcagcagcttagtataccgtaccgctccacatccgagtgctagaagatcagaagaagcccggcccggccagtacctatagctgcctagcggccggcgcgaacgaagcagagatatggcgagagcgctgccgctggtgctcgcggcgtccgtcctgctggcggccgcgctgctgctgctggccttcgcgccggcgccggccgccgcggtcgacttcggcgcggaggacctggcgtcggaggaggcgctgtgggcgctgtacgagcgctggcgcggccgccacgcgctggcgcgggacctgggcgacaaggcgcgccgcttcaacgtcttcaaggccaacgtgcgcctcatccacgagttcaaccgccgggacgagccctacaagctccgcctcaaccgcttcggcgacatgaccgccgacgagttccgacgccactacgcgggctccagggtcgcgcaccatcgcatgttccgcggcgacaggcagggctcctcggcgtcggcgtcgttcatgtacgccgacgcgcgcgatgtcccggcctccgtcgactggaggcagaagggcgctgtcaccgacgtcaaggaccagggccagtgcggtagctgctgggcgttctcgacgatcgccgccgtggagggcatcaacgcgatcaagaccaagaacctgacgtcgctgtcggagcagcagctggtggactgcgacaccaaggccaacgccggctgcaacgggggcctcatggactacgcgttccagtacatcgccaagcacggcggggtggcggcggaggacgcgtacccgtacagagcgcgccaggcgtcctgcaagaagtcgccggccccggtcgtcaccatcgacggctacgaggacgtgccggccaacgacgagtcggcgctcaagaaggcggtggcgcaccagcccgtgtccgtcgccatcgaggccagcggctcgcacttccagttctactccgagggggtgttctccggcaggtgcgggacggagctggaccacggcgtcacggcggtcggctacggggtcaccgcggacggcaccaagtactggctggtcaagaactcgtggggccccgagtggggcgagaaggggtacatccgcatggcgcgcgacgtggccgccaaggagggacactgcggcatcgccatggaggcatcctaccccgtcaagacctcgcccaaccccaaggtccacgccgtcgtcgacgaggacggctccagccacgacgagctctgaattgcgcactacactactacgtactagctatagcctatatagctatactatgattgatccatgtatgctcggacaggaacatcgccgactgtgaatgtctgaatggcatacgcacatcgtacacctgcattcatgtaataccagtcgagagttgatctaccagcaactttcatttcattcggttattattatattatttaactactgcttcctccgtcc

SEQ ID NO: 16553 - protein, 376 aa, Zea mays subsp. mays
  peptide (1)..(376): Ceres Seq. ID no. 12372986
MARALPLVLAASVLLAAALLLLAFAPAPAAAVDFGAEDLASEEALWALYERWRGRHALARDLGDKARRFNVFKANVRLIHEFNRRDEPYKLRLNRFGDMTADEFRRHYAGSRVAHHRMFRGDRQGSSASASFMYADARDVPASVDWRQKGAVTDVKDQGQCGSCWAFSTIAAVEGINAIKTKNLTSLSEQQLVDCDTKANAGCNGGLMDYAFQYIAKHGGVAAEDAYPYRARQASCKKSPAPVVTIDGYEDVPANDESALKKAVAHQPVSVAIEASGSHFQFYSEGVFSGRCGTELDHGVTAVGYGVTADGTKYWLVKNSWGPEWGEKGYIRMARDVAAKEGHCGIAMEASYPVKTSPNPKVHAVVDEDGSSHDEL

SEQ ID NO: 16554 - protein, 278 aa, Zea mays subsp. mays
  peptide (1)..(278): Ceres Seq. ID no. 12372987
MTADEFRRHYAGSRVAHHRMFRGDRQGSSASASFMYADARDVPASVDWRQKGAVTDVKDQGQCGSCWAFSTIAAVEGINAIKTKNLTSLSEQQLVDCDTKANAGCNGGLMDYAFQYIAKHGGVAAEDAYPYRARQASCKKSPAPVVTIDGYEDVPANDESALKKAVAHQPVSVAIEASGSHFQFYSEGVFSGRCGTELDHGVTAVGYGVTADGTKYWLVKNSWGPEWGEKGYIRMARDVAAKEGHCGIAMEASYPVKTSPNPKVHAVVDEDGSSHDEL

SEQ ID NO: 16555 - protein, 259 aa, Zea mays subsp. mays
  peptide (1)..(259): Ceres Seq. ID no. 12372988
MFRGDRQGSSASASFMYADARDVPASVDWRQKGAVTDVKDQGQCGSCWAFSTIAAVEGINAIKTKNLTSLSEQQLVDCDTKANAGCNGGLMDYAFQYIAKHGGVAAEDAYPYRARQASCKKSPAPVVTIDGYEDVPANDESALKKAVAHQPVSVAIEASGSHFQFYSEGVFSGRCGTELDHGVTAVGYGVTADGTKYWLVKNSWGPEWGEKGYIRMARDVAAKEGHCGIAMEASYPVKTSPNPKVHAVVDEDGSSHDEL

SEQ ID NO: 16556 - DNA, 1682 bp, Zea mays subsp. mays
  misc_feature (1)..(1682): Ceres Seq. ID no. 12352831
  misc_feature (1)..(1682): Ortholog of  Ceres SEQ ID NO 15175651 as cited in SEQ ID NO 54718
acaaacgccatcatcgcaccgactctgatccaatttcacacgcatactagcgccgccggtagcagcaccggcagccgcgttcccctccgccatggatcccgcgaacagcagcgcgggcgccgagctcgacgacgcgtccgagtggcgcacccgggcgctgggcggcacggagtacagctggctccgcgccgtgccgggcggcacgggcaccacgctgctcgcgctccgcctatcccacggcgacgcggccgaggcggcgctgcgctccctgcgggacgcgcaccccgtcctccgcgcccgcctccggacctcttctccctccggcccgacgctggcgttccccgatccggcaccgccgttcctgctggcgccgatcccggccccgggctccgcgcccgacttccacgcgctcctcgagcacgagctcaaccgcaacccgtgggccgacgaccccgcgtcctccgacgacgccccggtcctcttcgcgacgctctacgagctcccagccgccacgggcggcgcggcgctgttcgtccggatccacacggtcgcgtgcgaccgctcggcggcgagtgcgctggccagggagctcgtcgcgctgctggccggcgccggcggcgaggagcccgacccggaggatgcggcggcggaagcggggctggaggcgaggatccctcagagggacatctggaagccgttctgggcgcgcgggttggatatggtgggctactccatcaacggcctgcggacgtccacgctgccgttcgtggagaccggcacggagaggtccacgcagatgctgcggctcgggctcggcctcgacgagacgacgaggctgctcgacgcgtgcaaggagaatggggtgaggttgtgctccgccgtggccgccgcgacgatgctcgccgcgcggcagtcgaagccgatggagagcggccagcaggagacgtactctgtcgtgacccttatcaattgccgcaagtttcttgagccagtcttggaggaccgcaacgttgggttcttctactctgccatcaccaacacgcacacgatccacggcggggaagggctgtgggagctggccaagaggtgccaggactcgtacaccagcgccaagagcaacaagaaacacctcaccgacatcagcgacctcaacttcctcatgtgccgggccatcgagaacccccagctgacgaccgccggcgcgctccggacggcgctcgtctccgtgttcgaggaccccgtggtcgccgacgtggccgaggcgcagagcaaggccggcgtggaggactgcgtctgctgcgccaccgtgcacggcatcggcccgtcgatcggcgtgttcgactcgatcaaggacggcaagctggactgggcgtgcgtctacccttctcctctgcactccaggaagcaggtccaggagatattcgacaaggtgaagcagattttgcgccatgcggctgcggctgaggagaattttgaagactgcacctaagtacctaacgatgtcgtcgggagctttatggggcatctcggtagagctattgctccatttgtgtctttgtgaggcattcttttctcgtgagggttgtaatgtaagtatagtgaaccttgtgttagcctttttattctttcaattctcggcgcaatgaaaattttccggtgggaggctggtagctttatgatcc

SEQ ID NO: 16557 - protein, 465 aa, Zea mays subsp. mays
  peptide (1)..(465): Ceres Seq. ID no. 12352832
MDPANSSAGAELDDASEWRTRALGGTEYSWLRAVPGGTGTTLLALRLSHGDAAEAALRSLRDAHPVLRARLRTSSPSGPTLAFPDPAPPFLLAPIPAPGSAPDFHALLEHELNRNPWADDPASSDDAPVLFATLYELPAATGGAALFVRIHTVACDRSAASALARELVALLAGAGGEEPDPEDAAAEAGLEARIPQRDIWKPFWARGLDMVGYSINGLRTSTLPFVETGTERSTQMLRLGLGLDETTRLLDACKENGVRLCSAVAAATMLAARQSKPMESGQQETYSVVTLINCRKFLEPVLEDRNVGFFYSAITNTHTIHGGEGLWELAKRCQDSYTSAKSNKKHLTDISDLNFLMCRAIENPQLTTAGALRTALVSVFEDPVVADVAEAQSKAGVEDCVCCATVHGIGPSIGVFDSIKDGKLDWACVYPSPLHSRKQVQEIFDKVKQILRHAAAAEENFEDCT

SEQ ID NO: 16558 - protein, 328 aa, Zea mays subsp. mays
  peptide (1)..(328): Ceres Seq. ID no. 12352833
TNAIIAPTLIQFHTHTSAAGSSTGSRVPLRHGSREQQRGRRARRRVRVAHPGAGRHGVQLAPRRAGRHGHHAARAPPIPRRRGRGGAALPAGRAPRPPRPPPDLFSLRPDAGVPRSGTAVPAGADPGPGLRARLPRAPRARAQPQPVGRRPRVLRRRPGPLRDALRAPSRHGRRGAVRPDPHGRVRPLGGECAGQGARRAAGRRRRRGARPGGCGGGSGAGGEDPSEGHLEAVLGARVGYGGLLHQRPADVHAAVRGDRHGEVHADAAARARPRRDDEAARRVQGEWGEVVLRRGRRDDARRAAVEADGERPAGDVLCRDPYQLPQVS

SEQ ID NO: 16559 - protein, 256 aa, Zea mays subsp. mays
  peptide (1)..(256): Ceres Seq. ID no. 12352834
MVGYSINGLRTSTLPFVETGTERSTQMLRLGLGLDETTRLLDACKENGVRLCSAVAAATMLAARQSKPMESGQQETYSVVTLINCRKFLEPVLEDRNVGFFYSAITNTHTIHGGEGLWELAKRCQDSYTSAKSNKKHLTDISDLNFLMCRAIENPQLTTAGALRTALVSVFEDPVVADVAEAQSKAGVEDCVCCATVHGIGPSIGVFDSIKDGKLDWACVYPSPLHSRKQVQEIFDKVKQILRHAAAAEENFEDCT

SEQ ID NO: 16560 - DNA, 1759 bp, Zea mays subsp. mays
  misc_feature (1)..(1759): Ceres Seq. ID no. 12407100
  misc_feature (1)..(1759): Ortholog of  Ceres SEQ ID NO 14313038 as cited in SEQ ID NO 59520
  misc_feature (1)..(1759): Ortholog of  Ceres SEQ ID NO 13595464 as cited in SEQ ID NO 59792
  misc_feature (1)..(1759): Ortholog of  Ceres SEQ ID NO 14316416 as cited in SEQ ID NO 60078
gccgagaagcttcggactagctagcaagctagctagctacctacccgtgctttggttcggttggttggcgccatagccattgccgaggagcgagggagcagccgggcgggcagtcaggaggcggcgagtaagcatgctgggagcgagccccaggggcaggaaggccgccgcgccgccggtgaagctggggtcggcgaaggaggcgccggcggccggtggaggagggagcggctgcaaggtgccggcggaggaggtgtgggaggtgcggcccggcgggatgctggtgcagaagaggggcggcggcgacgacgagccgtcgcccaacgtgaagcccgtgcccaccatccgggtcaaggtcaagcacgccggcgtcacgcacgagatgtacatcagttccgaggcctccttcggggagctgaagaagctggtggccgccaagacggggctgcaccccgacgaccagaaggtgctgtacaaggacagggagcgtgactccaaggcgttcctggacacggctggcgtcagagaccgctccaaggtggtggtgctggaggaccccgaggcccgcgcgcgccgactcatcggggagcgccgcagcggccacctccagaaggccgccagggccgtcgccgcggtcaccgccgaggtcgacaagctggcacccaaggtggcggcgctggacgcgtcggtgcgcaggggggagaaggtcgcggagaaggacgtggtgcaggtgacggagctgctaatgaacgagctgctcaggctcgacgccgtggtcgcggacggcgacgtcaaggcgcagaggcggatgcaggtgaagcgcgtccagaagtacgtggagacgctggacgcggtggcggccaagaacgccgccctcgtcggcaagtccggcgagaaggccgcggccaagccggcgccggcgccggccccggccccgccgccgcggcagcagggacaggggcagacgcggtgggagatgttcgacctgctgtcgtcgctgccgtccacgtcctcggcctcgtcaacgacgaccgtgagctccacggcgtcctccggcgcgccgccgccgaaccgcccggactggatgctcttctgacgagtggacggcggtcccgcaccggccggccaccggcgcaaaagcgaaaggcgagtgcttgatcgatgcgatgcgatgcttgtgtgccaagaattgcaccccaaatctggtagctcgtcgagtgtcctgatgaggccatgattgggcaggcggggggctatctagcttggccacacagctgcattgcgttgggctgcatggtacccgtaccagccaattcgagttcatcaatcatgtggtgtgagagtatttttcttcttcacctctcctttttctttctttccttttgagcttttttttccctcctcctcctcctcctcctcctcttcttcttgttcatggaaggtttgggattcttttggagtgcatactatactattcagatagagaaacagaaagatggagttggttagggcaagtgaaacgtcttcagatagggaaataaataaaactagtcggtgtccaaactctgaagaaacgaacaaagaggtgcatggattgttagcttatcacactgttgtttgagagtgatgagagatgtatcgatcaagaggccacttggtcggtagtctgtcactccttgttgctgccgagtttcttcctcctcatcatcatcctgtataatgtaatcaagcaataatacaaaataaaaaaagcgttttg

SEQ ID NO: 16561 - protein, 320 aa, Zea mays subsp. mays
  peptide (1)..(320): Ceres Seq. ID no. 12407101
MLGASPRGRKAAAPPVKLGSAKEAPAAGGGGSGCKVPAEEVWEVRPGGMLVQKRGGGDDEPSPNVKPVPTIRVKVKHAGVTHEMYISSEASFGELKKLVAAKTGLHPDDQKVLYKDRERDSKAFLDTAGVRDRSKVVVLEDPEARARRLIGERRSGHLQKAARAVAAVTAEVDKLAPKVAALDASVRRGEKVAEKDVVQVTELLMNELLRLDAVVADGDVKAQRRMQVKRVQKYVETLDAVAAKNAALVGKSGEKAAAKPAPAPAPAPPPRQQGQGQTRWEMFDLLSSLPSTSSASSTTTVSSTASSGAPPPNRPDWMLF

SEQ ID NO: 16562 - protein, 272 aa, Zea mays subsp. mays
  peptide (1)..(272): Ceres Seq. ID no. 12407102
MLVQKRGGGDDEPSPNVKPVPTIRVKVKHAGVTHEMYISSEASFGELKKLVAAKTGLHPDDQKVLYKDRERDSKAFLDTAGVRDRSKVVVLEDPEARARRLIGERRSGHLQKAARAVAAVTAEVDKLAPKVAALDASVRRGEKVAEKDVVQVTELLMNELLRLDAVVADGDVKAQRRMQVKRVQKYVETLDAVAAKNAALVGKSGEKAAAKPAPAPAPAPPPRQQGQGQTRWEMFDLLSSLPSTSSASSTTTVSSTASSGAPPPNRPDWMLF

SEQ ID NO: 16563 - protein, 237 aa, Zea mays subsp. mays
  peptide (1)..(237): Ceres Seq. ID no. 12407103
MYISSEASFGELKKLVAAKTGLHPDDQKVLYKDRERDSKAFLDTAGVRDRSKVVVLEDPEARARRLIGERRSGHLQKAARAVAAVTAEVDKLAPKVAALDASVRRGEKVAEKDVVQVTELLMNELLRLDAVVADGDVKAQRRMQVKRVQKYVETLDAVAAKNAALVGKSGEKAAAKPAPAPAPAPPPRQQGQGQTRWEMFDLLSSLPSTSSASSTTTVSSTASSGAPPPNRPDWMLF

SEQ ID NO: 16564 - DNA, 1890 bp, Zea mays subsp. mays
  misc_feature (1)..(1890): Ceres Seq. ID no. 12352835
  misc_feature (1)..(1890): Ortholog of  Ceres SEQ ID NO 14311183 as cited in SEQ ID NO 58495
  misc_feature (1)..(1890): Ortholog of  Ceres SEQ ID NO 15169627 as cited in SEQ ID NO 64517
  misc_feature (1)..(1890): Ortholog of  Ceres SEQ ID NO 14307952 as cited in SEQ ID NO 66029
  misc_feature (1)..(1890): Ortholog of  Ceres SEQ ID NO 12614124 as cited in SEQ ID NO 68392
aattgctttataaataacataacatacaatataaaattgtatcgtctcctctccttcctgacattggcactggcagctgcactcaccggaagccatggaagacttgctctactactccctcaccatagccatctgcatcgcagtcatcgccctcctctccatccttcgttcgttcaccgctaccggaccgccgccggcgctcccgcccggcccgtcgctgctgtcgctgatcaccccgctcctcttcctcggccgaacgaacttcggcatcgagcggatcctctccgccgcgcggtcccgctacggccccgtcttcacgctctacctgctcccgtcccgcccggccatcttcatcgccgaccacgccgtggcgcaccgcgtgctggtgcagggcggcgccgccttcgccgacaggccgccggccagcctccccttccgcctcttctccagtgaccagcgcaacatcacatccggcgcctacggcccggtctggcgcgcgctccgtcacaacctcacgggcaacgtgttccacccgtcgcgcatgggccggttcgccgccgcccgccgccgcgcgctgcgggggctcgtcgccggcgtcgcgcgcgacgccggcagcggggccgtcgtcgtcgaggggctcctgcaccgggccatgttccacgtcctcgtcaccatgtgcttcggcgagggcctcgccaccgacgccgtcgtcgcgtccgtggaggcgctgcagcgggagttcctcacgtcggtgctcggctttcaagtgttcgacgtgtgccccgcgctcaccagcctcctgttccggcgccggtggaagcagatgctgtccctccgccgccggcaggaggagctcttcgcccctctcatacgggcgtgccgcgcgcaacgaggctccgacgccaacgccggcgcggacacgtacgtggacacgctgctcgacctccggatcccccgaggacggggggcaggaacctcacggagggcgagatggtgagcttgtgcgccgagttcgtggccgtcggcaccgacaacacggcgaccgaggcgcaatggatcatggccaacctcgtggcgcatccggagatccaagcaaggctccgggccgagatccaccaggtcaccggcggcgcgggcgtccaggagcaggacctgccgcggatgccgtaccttcgcgcagtggtcctggaggggctccgccgccacccgccgggccacttcgcgatcccgcacgccgcgaccggcatccaagacgacggcggcggcggcgaccacgcgaccatcgaaggcttccgcgtgccgcggcgcgcgtccctcaacttcacgctcgtcgcgctggggctcgacgaggcggtgtggcccgacccgctgcggttccggccggagcggttcctgccccggcggcgagggcgcggacgttgacctcaccggcgcgaaggaggtcaagatgataccgttcggcgccgggcggcggatctgccccgggatggcgctcgctctgctgcacctcgagttcttcgtggccagtctcgtcgccgagttcgagtggctccaggtccccggtgagccggtggagttcgccgagaagcaggagctgtccgtcgtgatgcgccggccgctccgtgccaccgtcgtccggtgcacaaggaacgccaactgaccacacgggttgtcgttgtcgaaccgaacgtctgcacttttctgctcttgtttgttgctgcatgcatgtgcttttctttcagtgaagttcagcgaatttcgtaaaaaattcgctaccaactttcctgtggacttgtggagtcatgttgttagcatgccctgctcttgttggctagaggctttcatgtatttgcactgcactgctctgattgtcctaaaagttataatatt

SEQ ID NO: 16565 - protein, 300 aa, Zea mays subsp. mays
  peptide (1)..(300): Ceres Seq. ID no. 12352836
MEDLLYYSLTIAICIAVIALLSILRSFTATGPPPALPPGPSLLSLITPLLFLGRTNFGIERILSAARSRYGPVFTLYLLPSRPAIFIADHAVAHRVLVQGGAAFADRPPASLPFRLFSSDQRNITSGAYGPVWRALRHNLTGNVFHPSRMGRFAAARRRALRGLVAGVARDAGSGAVVVEGLLHRAMFHVLVTMCFGEGLATDAVVASVEALQREFLTSVLGFQVFDVCPALTSLLFRRRWKQMLSLRRRQEELFAPLIRACRAQRGSDANAGADTYVDTLLDLRIPRGRGAGTSRRARW

SEQ ID NO: 16566 - protein, 151 aa, Zea mays subsp. mays
  peptide (1)..(151): Ceres Seq. ID no. 12352837
MGRFAAARRRALRGLVAGVARDAGSGAVVVEGLLHRAMFHVLVTMCFGEGLATDAVVASVEALQREFLTSVLGFQVFDVCPALTSLLFRRRWKQMLSLRRRQEELFAPLIRACRAQRGSDANAGADTYVDTLLDLRIPRGRGAGTSRRARW

SEQ ID NO: 16567 - protein, 150 aa, Zea mays subsp. mays
  peptide (1)..(150): Ceres Seq. ID no. 12352838
NCFINNITYNIKLYRLLSFLTLALAAALTGSHGRLALLLPHHSHLHRSHRPPLHPSFVHRYRTAAGAPARPVAAVADHPAPLPRPNELRHRADPLRRAVPLRPRLHALPAPVPPGHLHRRPRRGAPRAGAGRRRLRRQAAGQPPLPPLLQ

SEQ ID NO: 16568 - DNA, 1620 bp, Zea mays subsp. mays
  misc_feature (1)..(1620): Ceres Seq. ID no. 12363441
  misc_feature (1)..(1620): Ortholog of  Ceres SEQ ID NO 14302255 as cited in SEQ ID NO 65021
aacctgaggtggagagatcgcacgcgccctctgccgcttgttcgttcctcgcgctcgccaccaggcaccaccacacacatcccaatctcgcgagggcaagcagcagggtctgcggcggcggcggcggccgcgcttccggctccccttcccattggcctccacgatggcgctccgcctcaangacgtcgcgctntgcctctcnccgccgctnnncgcccgccgccgccgccgcagcagcggcaggttcgtcgccgtcgcctccatgacgtccgccgtctccaccaaggtcgagaataagaagccatttgctcctccaagggaggtacatgtccaggttacacattcaatgccacctcacaagattgaaattttcaagtcgcttgatgattgggctagagataatatcttgacgcatctcaagccagtcgagaagtgttggcagccacaggatttcctcccggacccagcatctgaaggatttcatgatgaagttaaggagctcagagaacgtgccaaggaaatccctgatgattattttgtttgtttggtgggagacatgattaccgaggaagctctaccaacataccagactatgcttaacaccctcgacggtgtcagagatgagacaggtgcaagccccactgcctgggctgtttggacgagggcatggactgctgaggagaacaggcatggtgatctgctcaacaagtatatgtacctcactgggagggtggatatgaggcagattgagaagacaattcagtatcttattggctctggaatggatcctaggactgagaataatccttatcttggtttcatctacacctccttccaagagcgggcgaccttcatctcacacgggaacactgctcgtcacgccaaggactttggcgacttaaagcttgcacaaatctgcggcatcatcgcctcagatgagaagcgacatgaaactgcgtacaccaagatcgtggagaagctgtttgagatcgaccctgatggtaccgtggtcgctctggctgacatgatgaggaagaagatctcaatgcctgcccacctgatgtttgacgggcaggacgacaagctgttcgagcacttctccatggtcgcgcagaggcttggcgtttacaccgccagggactacgccgacatcctcgagttcctcgtcgacaggtggaaggtggcgagcctgactggtctgtcgggtgaagggaacaaggcgcaggactacctttgcacccttgcttcaagaatcaggaggctggaggagagggcccagagcagagccaagaaagccggcacgctgcctttcagctgggtatacggtagggacgtccaactgtgagatcggaaacctgctgcggactgcttagacaagacctgctgtgtctgcgttacataggtctccaggttttgatcaaatggtcccgtgtcgtcttatagagcgataggagaacgtgttggtctgtggtgtagctttgtttttattttgtatttttctgctttgatgtacaacctgtggccgcatgaactggggcgtggagatgggagcgaccatgccgtactttgtctgtcgctggcggtgtgtttcggtatgttatttgagttgctcagatctgg

SEQ ID NO: 16569 - protein, 393 aa, Zea mays subsp. mays
  peptide (1)..(393): Ceres Seq. ID no. 12363442
  misc_feature (6)..(6): Xaa is any aa, unknown or other
  misc_feature (10)..(10): Xaa is any aa, unknown or other
  misc_feature (13)..(13): Xaa is any aa, unknown or other
  misc_feature (16)..(16): Xaa is any aa, unknown or other
  misc_feature (17)..(17): Xaa is any aa, unknown or other
MALRLXDVAXCLXPPXXARRRRRSSGRFVAVASMTSAVSTKVENKKPFAPPREVHVQVTHSMPPHKIEIFKSLDDWARDNILTHLKPVEKCWQPQDFLPDPASEGFHDEVKELRERAKEIPDDYFVCLVGDMITEEALPTYQTMLNTLDGVRDETGASPTAWAVWTRAWTAEENRHGDLLNKYMYLTGRVDMRQIEKTIQYLIGSGMDPRTENNPYLGFIYTSFQERATFISHGNTARHAKDFGDLKLAQICGIIASDEKRHETAYTKIVEKLFEIDPDGTVVALADMMRKKISMPAHLMFDGQDDKLFEHFSMVAQRLGVYTARDYADILEFLVDRWKVASLTGLSGEGNKAQDYLCTLASRIRRLEERAQSRAKKAGTLPFSWVYGRDVQL

SEQ ID NO: 16570 - protein, 360 aa, Zea mays subsp. mays
  peptide (1)..(360): Ceres Seq. ID no. 12363443
MTSAVSTKVENKKPFAPPREVHVQVTHSMPPHKIEIFKSLDDWARDNILTHLKPVEKCWQPQDFLPDPASEGFHDEVKELRERAKEIPDDYFVCLVGDMITEEALPTYQTMLNTLDGVRDETGASPTAWAVWTRAWTAEENRHGDLLNKYMYLTGRVDMRQIEKTIQYLIGSGMDPRTENNPYLGFIYTSFQERATFISHGNTARHAKDFGDLKLAQICGIIASDEKRHETAYTKIVEKLFEIDPDGTVVALADMMRKKISMPAHLMFDGQDDKLFEHFSMVAQRLGVYTARDYADILEFLVDRWKVASLTGLSGEGNKAQDYLCTLASRIRRLEERAQSRAKKAGTLPFSWVYGRDVQL

SEQ ID NO: 16571 - protein, 332 aa, Zea mays subsp. mays
  peptide (1)..(332): Ceres Seq. ID no. 12363444
MPPHKIEIFKSLDDWARDNILTHLKPVEKCWQPQDFLPDPASEGFHDEVKELRERAKEIPDDYFVCLVGDMITEEALPTYQTMLNTLDGVRDETGASPTAWAVWTRAWTAEENRHGDLLNKYMYLTGRVDMRQIEKTIQYLIGSGMDPRTENNPYLGFIYTSFQERATFISHGNTARHAKDFGDLKLAQICGIIASDEKRHETAYTKIVEKLFEIDPDGTVVALADMMRKKISMPAHLMFDGQDDKLFEHFSMVAQRLGVYTARDYADILEFLVDRWKVASLTGLSGEGNKAQDYLCTLASRIRRLEERAQSRAKKAGTLPFSWVYGRDVQL

SEQ ID NO: 16572 - DNA, 1097 bp, Zea mays subsp. mays
  misc_feature (1)..(1097): Ceres Seq. ID no. 12350672
  misc_feature (1)..(1097): Ortholog of  Ceres SEQ ID NO 14301526 as cited in SEQ ID NO 68130
cattgtgtaatcctcatcctccgtcgagatcaaggaagaaagaaagaaagaaagcaaccatggcggcaaccgcaatgtgcccctccccctcggccgcaataactcgccacatccatgctcgtcgctcctgtgctgctgcttccttgtccctccgccgctcgggcttcctggggcgcgtcgtgctggccgcggtgccggtggccgtggacgccacccggcgccgccgcgtctccgtgtcggtgcggatggcctgggacggtccgctctcgtcggtgcgcctcatcatgcagagcaggaacgcgaagctgagcgagaagctcaaggagcacatcgaggacaaggtgggtcgggcggtgtccaagcactgccacctggtccgggaggtagacgtgcgcctctccgcgcgcggcggcgagctcggccggggccccaagacgtcgcgctgcgagatcaccctcttcaccaagcgccatggcgtcctgcgcgccgaggaggacgccgagtccacctacgccagcatcgacctcgccgccgccatcgtcaagcgcaagctccgcaagatcaaggagaaggagacggaggtgcgccgcggcggagacgctgacggcgtctgggacgagatcccgccggccgacctgctgccccccgccgaggccgacgacctggaggcggccgtgggcgctgaggacgaggagacggtgctcgccaaggtggtgcgcaccaaggtgttcgagatgccgccgctcacggtggaggaggcgctggagcagctggagaacgtggaccacgacttctactgcttcagggacgaggccacggggcaggtgaacatcctctaccgcaggaaggaaggcggatacggcctcatcatccccaagaacgacggcaaagtggataccgttggcgttgtgccaccacccgccgtcgctgcggagccggagccggagccgtcctacgcagtgcacgccgctgacaacaacaactcctgaactgagcactcgtcgacgtctcatccaaccaaaaccaaaacgagagagaatgcttgcttggtactgtaaaaataaaacaaacgcagtcgtcgacgacgtctcatctgc

SEQ ID NO: 16573 - protein, 328 aa, Zea mays subsp. mays
  peptide (1)..(328): Ceres Seq. ID no. 12350673
LCNPHPPSRSRKKERKKATMAATAMCPSPSAAITRHIHARRSCAAASLSLRRSGFLGRVVLAAVPVAVDATRRRRVSVSVRMAWDGPLSSVRLIMQSRNAKLSEKLKEHIEDKVGRAVSKHCHLVREVDVRLSARGGELGRGPKTSRCEITLFTKRHGVLRAEEDAESTYASIDLAAAIVKRKLRKIKEKETEVRRGGDADGVWDEIPPADLLPPAEADDLEAAVGAEDEETVLAKVVRTKVFEMPPLTVEEALEQLENVDHDFYCFRDEATGQVNILYRRKEGGYGLIIPKNDGKVDTVGVVPPPAVAAEPEPEPSYAVHAADNNNS

SEQ ID NO: 16574 - protein, 309 aa, Zea mays subsp. mays
  peptide (1)..(309): Ceres Seq. ID no. 12350674
MAATAMCPSPSAAITRHIHARRSCAAASLSLRRSGFLGRVVLAAVPVAVDATRRRRVSVSVRMAWDGPLSSVRLIMQSRNAKLSEKLKEHIEDKVGRAVSKHCHLVREVDVRLSARGGELGRGPKTSRCEITLFTKRHGVLRAEEDAESTYASIDLAAAIVKRKLRKIKEKETEVRRGGDADGVWDEIPPADLLPPAEADDLEAAVGAEDEETVLAKVVRTKVFEMPPLTVEEALEQLENVDHDFYCFRDEATGQVNILYRRKEGGYGLIIPKNDGKVDTVGVVPPPAVAAEPEPEPSYAVHAADNNNS

SEQ ID NO: 16575 - protein, 304 aa, Zea mays subsp. mays
  peptide (1)..(304): Ceres Seq. ID no. 12350675
MCPSPSAAITRHIHARRSCAAASLSLRRSGFLGRVVLAAVPVAVDATRRRRVSVSVRMAWDGPLSSVRLIMQSRNAKLSEKLKEHIEDKVGRAVSKHCHLVREVDVRLSARGGELGRGPKTSRCEITLFTKRHGVLRAEEDAESTYASIDLAAAIVKRKLRKIKEKETEVRRGGDADGVWDEIPPADLLPPAEADDLEAAVGAEDEETVLAKVVRTKVFEMPPLTVEEALEQLENVDHDFYCFRDEATGQVNILYRRKEGGYGLIIPKNDGKVDTVGVVPPPAVAAEPEPEPSYAVHAADNNNS

SEQ ID NO: 16576 - DNA, 874 bp, Zea mays subsp. mays
  misc_feature (1)..(874): Ceres Seq. ID no. 12355162
  misc_feature (1)..(874): Ortholog of  Ceres SEQ ID NO 13597185 as cited in SEQ ID NO 63657
ccgtgaaaccaacgcccctctctccccgcgcacgagacccatcgcgaatggaagttgctcctgcggtgaagcaactcctccccatggcgcagggccccaactccccgtcctcctccaccacctcctcctcgccctcgccctcggccgccgcgccgtccccgccgccgcgccagcagcagtcgcagtcgcaggcgcccgtgccgcgcatcatcgacaccacgcccttccccaccaccttcgtgcaggccgacacggccagcttcaaggaggtcgtccagaggctcaccggctccgacacgccgccgcctgcccagaagcccgccaagacccacggccaccaccaccaccaccacggcggcggcggcgtcgggcccaagaagccggccttcaagctctacgagcgccggatcggcaagaacaacctcaagatgatcgcgccgctggcggggccgtcgccgcggaaggcggcgccggaggtgctgtcgcccagcgtgctcgacttcccttccctggcgctcggtagccccgtcacgccgctgctggccgaccccttcaaccggtcggcgtcggcgtccccgggcgagcaggacgaggccgcggcggccatcgcgcagaggggcttcttcctgcacccctcgccgaggggcgtcgagccgccgcggctgctgccgctgttccccgtcacgtcccccaagatggcgccgtggccgtcgcagcagtgatcgggggcgggcccccgctgccggagaattcctagtactgccgcttcagatactacttgtttaattaactccttggtgcgtcatgtatttttgctcatggtattcaactcttgagcgatcgcgaaggaacggaaagaaagatcacactcttg

SEQ ID NO: 16577 - protein, 239 aa, Zea mays subsp. mays
  peptide (1)..(239): Ceres Seq. ID no. 12355163
VKPTPLSPRARDPSRMEVAPAVKQLLPMAQGPNSPSSSTTSSSPSPSAAAPSPPPRQQQSQSQAPVPRIIDTTPFPTTFVQADTASFKEVVQRLTGSDTPPPAQKPAKTHGHHHHHHGGGGVGPKKPAFKLYERRIGKNNLKMIAPLAGPSPRKAAPEVLSPSVLDFPSLALGSPVTPLLADPFNRSASASPGEQDEAAAAIAQRGFFLHPSPRGVEPPRLLPLFPVTSPKMAPWPSQQ

SEQ ID NO: 16578 - protein, 224 aa, Zea mays subsp. mays
  peptide (1)..(224): Ceres Seq. ID no. 12355164
MEVAPAVKQLLPMAQGPNSPSSSTTSSSPSPSAAAPSPPPRQQQSQSQAPVPRIIDTTPFPTTFVQADTASFKEVVQRLTGSDTPPPAQKPAKTHGHHHHHHGGGGVGPKKPAFKLYERRIGKNNLKMIAPLAGPSPRKAAPEVLSPSVLDFPSLALGSPVTPLLADPFNRSASASPGEQDEAAAAIAQRGFFLHPSPRGVEPPRLLPLFPVTSPKMAPWPSQQ

SEQ ID NO: 16579 - protein, 212 aa, Zea mays subsp. mays
  peptide (1)..(212): Ceres Seq. ID no. 12355165
MAQGPNSPSSSTTSSSPSPSAAAPSPPPRQQQSQSQAPVPRIIDTTPFPTTFVQADTASFKEVVQRLTGSDTPPPAQKPAKTHGHHHHHHGGGGVGPKKPAFKLYERRIGKNNLKMIAPLAGPSPRKAAPEVLSPSVLDFPSLALGSPVTPLLADPFNRSASASPGEQDEAAAAIAQRGFFLHPSPRGVEPPRLLPLFPVTSPKMAPWPSQQ

SEQ ID NO: 16580 - DNA, 864 bp, Zea mays subsp. mays
  misc_feature (1)..(864): Ceres Seq. ID no. 12362860
  misc_feature (1)..(864): Ortholog of  Ceres SEQ ID NO 13584263 as cited in SEQ ID NO 63700
gcacgagaccattacctagaacatcctaatcgaaaaacctgcttattctggccttcgtctgacggacgcggcgctgcctcggccgccgctgccgcctccttctggccttcctccgacgccgcggagtcggaggcggcttcttgggcctgaaaggcctcgaggtccgcagccatggcgcgctcggcccggaggataggctcgtagtaggcggcgtgcgcgtccatgcacttccgcagcgcggccgtgacgtcttggcaccgctccacgacgtcaatgctggcatccgcggcatccgtctcctccacgcacttctcccacgcgacgaactcgtccttgcagccgccgcccttcatgaagagacagaacccgcactccccttgctcctcctcctcctccccctcccctgctccgctggccaccgcggaggcatcgatgaccaccgtctcagcagcctcttccgcgccgcctccaacagaaggagccgccgccgcatcgtctgcgccgccgccagctgcggcggtcgcggcgtcggaggcggagtgctggtgatcttctttggctggtgtagcggtggcctccggggaaggaggatcaggacgggaggcggctgtgtctagggaaagtgagggagaaggagaagcggcggttcccattgagctagggttcgggggctagcagatcgcggcggctgcgagactgtgatagggcgacgaacaaaagctagttatgatctgtaacgactaatgagtccgtcgataggggtgggcctaaacgtgtacaataccccatctattgaagaaacaaagcccaggccagcctagcccatatccattttgtaaaggtcattacgttctcatggaatgg

SEQ ID NO: 16581 - protein, 108 aa, Zea mays subsp. mays
  peptide (1)..(108): Ceres Seq. ID no. 12362861
MHFRSAAVTSWHRSTTSMLASAASVSSTHFSHATNSSLQPPPFMKRQNPHSPCSSSSSPSPAPLATAEASMTTVSAASSAPPPTEGAAAASSAPPPAAAVAASEAECW

SEQ ID NO: 16582 - protein, 91 aa, Zea mays subsp. mays
  peptide (1)..(91): Ceres Seq. ID no. 12362862
MLASAASVSSTHFSHATNSSLQPPPFMKRQNPHSPCSSSSSPSPAPLATAEASMTTVSAASSAPPPTEGAAAASSAPPPAAAVAASEAECW

SEQ ID NO: 16583 - protein, 65 aa, Zea mays subsp. mays
  peptide (1)..(65): Ceres Seq. ID no. 12362863
MKRQNPHSPCSSSSSPSPAPLATAEASMTTVSAASSAPPPTEGAAAASSAPPPAAAVAASEAECW

SEQ ID NO: 16584 - DNA, 1066 bp, Zea mays subsp. mays
  misc_feature (1)..(1066): Ceres Seq. ID no. 12382167
  misc_feature (1)..(1066): Ortholog of  Ceres SEQ ID NO 13654054 as cited in SEQ ID NO 67735
  misc_feature (1)..(1066): Ortholog of  Ceres SEQ ID NO 15180245 as cited in SEQ ID NO 0
ggaccattacctagaacatcctaatcaaaaaattttgagtcgcttccgagcagacgtcctccttggataaggggataggcgcgaggaagagcggcctatccgcatccgcataaatcccagtcaaattgaacgagagcgccactcccctctgctaatcccagtcaaatcgaagcaagcatggccatggcggccgtgggcgtgggcggcgcagtggcgttcctcctcccgcagcgccgccagggcgccgtcccctggagcggcgggcggcggcgggcgcccgtggcggtgcgcgcgtcgtacgaggccggggtgggcgtgatggcgaccaaggtggggatgatgacctacttcgatccggagacggggaagccggtgccggtgaccgtggtcgggttccgggagggcggcaacgtggtgacgcaggtgaagacggccgccacggacgggtacgacgccgtccaggtcgggtaccacggcgtgcgcgaggacaagctcacccgcccggagctgggccacctgggcaaggccggcgccccgccgctgcgccacctgcaggagttccggctcaccgccgtcgacgccttcgagcccggccagcccctcgacttcgccgacctcttcaaggagggcgacctcatcgacgtctccggcaactccatcggcaaggggttccaaggtggcatcaagaggcacaacttcaagcgcgggctgatgacgcacggttccaagagccaccggcagctgggttccatcggagccgggacgacgccgggccgcgtgtacaaggggaagaagatgcccgggaggatgggaggaaccaagaccaagatcaggaagctcaagatcgtcaagatcgacaacaacctccgggtgctcatgatcaagggggccgtgccagggaagcccgggaacctcctccgcataacgccggccaagatcgtcggcaagaacatccccaagaactagacttcttttttcaggggggtgaatgttgagtgtttgtgtttgttaccctgctacaaactggatgtaatcctttgccaatttccagtttttgaacacatgc

SEQ ID NO: 16585 - protein, 262 aa, Zea mays subsp. mays
  peptide (1)..(262): Ceres Seq. ID no. 12382168
MAMAAVGVGGAVAFLLPQRRQGAVPWSGGRRRAPVAVRASYEAGVGVMATKVGMMTYFDPETGKPVPVTVVGFREGGNVVTQVKTAATDGYDAVQVGYHGVREDKLTRPELGHLGKAGAPPLRHLQEFRLTAVDAFEPGQPLDFADLFKEGDLIDVSGNSIGKGFQGGIKRHNFKRGLMTHGSKSHRQLGSIGAGTTPGRVYKGKKMPGRMGGTKTKIRKLKIVKIDNNLRVLMIKGAVPGKPGNLLRITPAKIVGKNIPKN

SEQ ID NO: 16586 - protein, 260 aa, Zea mays subsp. mays
  peptide (1)..(260): Ceres Seq. ID no. 12382169
MAAVGVGGAVAFLLPQRRQGAVPWSGGRRRAPVAVRASYEAGVGVMATKVGMMTYFDPETGKPVPVTVVGFREGGNVVTQVKTAATDGYDAVQVGYHGVREDKLTRPELGHLGKAGAPPLRHLQEFRLTAVDAFEPGQPLDFADLFKEGDLIDVSGNSIGKGFQGGIKRHNFKRGLMTHGSKSHRQLGSIGAGTTPGRVYKGKKMPGRMGGTKTKIRKLKIVKIDNNLRVLMIKGAVPGKPGNLLRITPAKIVGKNIPKN

SEQ ID NO: 16587 - protein, 215 aa, Zea mays subsp. mays
  peptide (1)..(215): Ceres Seq. ID no. 12382170
MATKVGMMTYFDPETGKPVPVTVVGFREGGNVVTQVKTAATDGYDAVQVGYHGVREDKLTRPELGHLGKAGAPPLRHLQEFRLTAVDAFEPGQPLDFADLFKEGDLIDVSGNSIGKGFQGGIKRHNFKRGLMTHGSKSHRQLGSIGAGTTPGRVYKGKKMPGRMGGTKTKIRKLKIVKIDNNLRVLMIKGAVPGKPGNLLRITPAKIVGKNIPKN

SEQ ID NO: 16588 - DNA, 888 bp, Zea mays subsp. mays
  misc_feature (1)..(888): Ceres Seq. ID no. 12372263
  misc_feature (1)..(888): Ortholog of  Ceres SEQ ID NO 12784064 as cited in SEQ ID NO 66982
ctcattcgcgcgaccatggacacggacacggacacgacgacgtccaccggctcccgcctccatcccgcggccggacatgtacgctcattggccgcccggggcgccgagagcctcgtcacctgcgtcttcgcgacggtgggcacggtcctcggcgcgatcaccggtggcctcatcggcctggccacggagacgggcgtgctgcgcggcacgggcgtcggcggcatcacgggcgcgctggtgtccatggaggtcgtcgagtcgctgtggcgctccgacgagccggcaatctggagcgtcgtctacgtgctcgatgtcatctggagcttgctcaccggccgccttgtgcgcgagaaggtggaccccgccgtgctcagcgccgtcgagagccagatgagcgcagcggacacaccggccttgcatgcagaccacgccgacatcttcgacacgggcggcaccaacggcatggcgagggtcgccatggacgcgctccccgtcgttaggttcaccgagcgcagcaacgtcgacgccagcggcgagctcatcgcctgttcggtttgcctccaggaattccaagccggcgacagcgcgaggagcctgccggtgtgccgccacacgttccacctgccgtgcatcgacggctggctgctccggcacgcctcctgccccttgtgccgccgcgctgtctaggccgcgcccgttcctctaccctcaaggatagccgccaccagagcttctctgacaagcgacacccgttccttcaggctgtagccgtacgcacactggcagcgtgatttttctgtagctcatcagatgattcagatgggcgttatgtaaacattggttaatttttaacaaatgcaagtggtgcacatggcgatggccccatcc

SEQ ID NO: 16589 - protein, 228 aa, Zea mays subsp. mays
  peptide (1)..(228): Ceres Seq. ID no. 12372264
LIRATMDTDTDTTTSTGSRLHPAAGHVRSLAARGAESLVTCVFATVGTVLGAITGGLIGLATETGVLRGTGVGGITGALVSMEVVESLWRSDEPAIWSVVYVLDVIWSLLTGRLVREKVDPAVLSAVESQMSAADTPALHADHADIFDTGGTNGMARVAMDALPVVRFTERSNVDASGELIACSVCLQEFQAGDSARSLPVCRHTFHLPCIDGWLLRHASCPLCRRAV

SEQ ID NO: 16590 - protein, 223 aa, Zea mays subsp. mays
  peptide (1)..(223): Ceres Seq. ID no. 12372265
MDTDTDTTTSTGSRLHPAAGHVRSLAARGAESLVTCVFATVGTVLGAITGGLIGLATETGVLRGTGVGGITGALVSMEVVESLWRSDEPAIWSVVYVLDVIWSLLTGRLVREKVDPAVLSAVESQMSAADTPALHADHADIFDTGGTNGMARVAMDALPVVRFTERSNVDASGELIACSVCLQEFQAGDSARSLPVCRHTFHLPCIDGWLLRHASCPLCRRAV

SEQ ID NO: 16591 - protein, 165 aa, Zea mays subsp. mays
  peptide (1)..(165): Ceres Seq. ID no. 12372266
HSRDHGHGHGHDDVHRLPPPSRGRTCTLIGRPGRREPRHLRLRDGGHGPRRDHRWPHRPGHGDGRAARHGRRRHHGRAGVHGGRRVAVALRRAGNLERRLRARCHLELAHRPPCAREGGPRRAQRRREPDERSGHTGLACRPRRHLRHGRHQRHGEGRHGRAPRR

SEQ ID NO: 16592 - DNA, 946 bp, Zea mays subsp. mays
  misc_feature (1)..(946): Ceres Seq. ID no. 12402770
  misc_feature (1)..(946): Ortholog of  Ceres SEQ ID NO 13639712 as cited in SEQ ID NO 56301
acaagcacatagccttatctgctctctctctctctccccagtccccacccgacgcgacgactccagttccaatccgtgctccgctaggtcaatcgaagagtccaaagatcccagctttcccatcccatggcgggcggcgacctcacgcctcctcctcctcctcccgaagagacgccgccggcagcggcggccgaggacctgatcgagatcgtggaggaagggtcggggcggctggacatcgcgcggtacgtggaccacgtgcgcgacctgtcggcgggcgccatcgcgacgttcgagggcacgacgcgggaccacttcgcggggcggcgcgtggtggagctccggtacgaggcgtacgcggccatggcgcggcgccgcctggcggccatactgcgggaggcccggtcgcggcacgcgctgcggcggctggccgtggcgcaccgcctgggcgccgtccccgccggcgaggccagcgtgttcgtggccgnctncgncacgcaccgcgccgacgccatggaggcctgccgntacgtcatcgacgagctcaaggcgtccgtgcccatctggaagaaggaggtgtacgacgacggcgaggtctggaaggagaaccgcgagttcctggaccgccactcnccgacggcgatgcgacggcgggcgggtgctgcgggagcaaggtcagggtccaggaggcttgacgctgatggatggcggcgcccggatccctctgtcgctccatcgcgtcgcgactcgcganncattggagcagggggtttcatgaaattctatgtactacttactcgatctccgttgattttgttctccatcttctttctttctttctgagagagactgcagcttgtacttgcacttgcacaccatgaagatgaaaggcaaatagatgctctgataaaagtcataactcataatggaatagtagttcagtttt

SEQ ID NO: 16593 - protein, 238 aa, Zea mays subsp. mays
  peptide (1)..(238): Ceres Seq. ID no. 12402771
  misc_feature (121)..(121): Xaa is any aa, unknown or other
  misc_feature (122)..(122): Xaa is any aa, unknown or other
  misc_feature (123)..(123): Xaa is any aa, unknown or other
  misc_feature (134)..(134): Xaa is any aa, unknown or other
  misc_feature (169)..(169): Xaa is any aa, unknown or other
  misc_feature (210)..(210): Xaa is any aa, unknown or other
MAGGDLTPPPPPPEETPPAAAAEDLIEIVEEGSGRLDIARYVDHVRDLSAGAIATFEGTTRDHFAGRRVVELRYEAYAAMARRRLAAILREARSRHALRRLAVAHRLGAVPAGEASVFVAXXXTHRADAMEACXYVIDELKASVPIWKKEVYDDGEVWKENREFLDRHXPTAMRRRAGAAGARSGSRRLDADGWRRPDPSVAPSRRDSRXIGAGGFMKFYVLLTRSPLILFSIFFLSF

SEQ ID NO: 16594 - protein, 230 aa, Zea mays subsp. mays
  peptide (1)..(230): Ceres Seq. ID no. 12402772
  misc_feature (162)..(162): Xaa is any aa, unknown or other
  misc_feature (163)..(163): Xaa is any aa, unknown or other
  misc_feature (164)..(164): Xaa is any aa, unknown or other
  misc_feature (176)..(176): Xaa is any aa, unknown or other
  misc_feature (211)..(211): Xaa is any aa, unknown or other
KHIALSALSLSPQSPPDATTPVPIRAPLGQSKSPKIPAFPSHGGRRPHASSSSSRRDAAGSGGRGPDRDRGGRVGAAGHRAVRGPRARPVGGRHRDVRGHDAGPLRGAARGGAPVRGVRGHGAAPPGGHTAGGPVAARAAAAGRGAPPGRRPRRRGQRVRGXXXHAPRRRHGGLPXRHRRAQGVRAHLEEGGVRRRRGLEGEPRVPGPPLXDGDATAGGCCGSKVRVQEA

SEQ ID NO: 16595 - protein, 159 aa, Zea mays subsp. mays
  peptide (1)..(159): Ceres Seq. ID no. 12402773
  misc_feature (42)..(42): Xaa is any aa, unknown or other
  misc_feature (43)..(43): Xaa is any aa, unknown or other
  misc_feature (44)..(44): Xaa is any aa, unknown or other
  misc_feature (55)..(55): Xaa is any aa, unknown or other
  misc_feature (90)..(90): Xaa is any aa, unknown or other
  misc_feature (131)..(131): Xaa is any aa, unknown or other
MARRRLAAILREARSRHALRRLAVAHRLGAVPAGEASVFVAXXXTHRADAMEACXYVIDELKASVPIWKKEVYDDGEVWKENREFLDRHXPTAMRRRAGAAGARSGSRRLDADGWRRPDPSVAPSRRDSRXIGAGGFMKFYVLLTRSPLILFSIFFLSF

SEQ ID NO: 16596 - DNA, 974 bp, Zea mays subsp. mays
  misc_feature (1)..(974): Ceres Seq. ID no. 12357407
  misc_feature (1)..(974): Ortholog of  Ceres SEQ ID NO 14313014 as cited in SEQ ID NO 54841
  misc_feature (1)..(974): Ortholog of  Ceres SEQ ID NO 14316091 as cited in SEQ ID NO 57622
  misc_feature (1)..(974): Ortholog of  Ceres SEQ ID NO 13639317 as cited in SEQ ID NO 59781
  misc_feature (1)..(974): Ortholog of  Ceres SEQ ID NO 13654578 as cited in SEQ ID NO 68583
accatttcgatacgcgcgagggaacggggccggccggccggccggggatcggaactgaagtgtgggcacacaagagtcacaacagggggagtgggggacattccaatcagttccctgcgtgtgagcgatgcagcgggacgcgagaagctggtcgccggcgccggccacggacgccgccggcccttacgcgatgccttcgcccgtgcagccgtcgaccaagagcacgaaggagacggtgaagaatgcgctgtcgcggtgggggcggaaggtcggggaggcgaccaggaaggccgaggacctgtcgcgcaacacatggcagcacttgaggacggcgccgagcatcgcggaggccgcggtggggaggatcgcgcaggggaccaaggtgctggcggagggcggccacgacaggatattccgccaggccttcagcgccccgcccgacgagcagctgcgcaagtcctacgcttgctacctctccacggccgccggcccggtgatgggcgtcctgtacctgtccacggccagggtcgccttctgcagcgacagcccgctgtcctacgaggcttccggcggcgacagaacggagtggacccactacaaggtggcgattcctctccaacggctgcgggcggcgagcccgtccgccaacaagacgaagcccgcggagaagttcgtccagctggtgtcggtggacagccaagagttctggttcatgggcttcgtcaactacgacggcgcggtggcgcacctgcaggaagcgctgagcgggttccgcaacctgcaggcgtgacatggaggacctcaataaaatgctcagtgttgtcttgtacgtgctcgccacaactgattgatctgcgtgtgttgccgtgctagtgtttgcatcgtgttttgcgtgtgcggatttgcatgtcattttttgatttggttgccattgtcagcgagagaacagtccaatcattttattcagatttcag

SEQ ID NO: 16597 - protein, 290 aa, Zea mays subsp. mays
  peptide (1)..(290): Ceres Seq. ID no. 12357408
TISIRARERGRPAGRGSELKCGHTRVTTGGVGDIPISSLRVSDAAGREKLVAGAGHGRRRPLRDAFARAAVDQEHEGDGEECAVAVGAEGRGGDQEGRGPVAQHMAALEDGAEHRGGRGGEDRAGDQGAGGGRPRQDIPPGLQRPARRAAAQVLRLLPLHGRRPGDGRPVPVHGQGRLLQRQPAVLRGFRRRQNGVDPLQGGDSSPTAAGGEPVRQQDEARGEVRPAGVGGQPRVLVHGLRQLRRRGGAPAGSAERVPQPAGVTWRTSIKCSVLSCTCSPQLIDLRVLPC

SEQ ID NO: 16598 - protein, 220 aa, Zea mays subsp. mays
  peptide (1)..(220): Ceres Seq. ID no. 12357409
MQRDARSWSPAPATDAAGPYAMPSPVQPSTKSTKETVKNALSRWGRKVGEATRKAEDLSRNTWQHLRTAPSIAEAAVGRIAQGTKVLAEGGHDRIFRQAFSAPPDEQLRKSYACYLSTAAGPVMGVLYLSTARVAFCSDSPLSYEASGGDRTEWTHYKVAIPLQRLRAASPSANKTKPAEKFVQLVSVDSQEFWFMGFVNYDGAVAHLQEALSGFRNLQA

SEQ ID NO: 16599 - protein, 199 aa, Zea mays subsp. mays
  peptide (1)..(199): Ceres Seq. ID no. 12357410
MPSPVQPSTKSTKETVKNALSRWGRKVGEATRKAEDLSRNTWQHLRTAPSIAEAAVGRIAQGTKVLAEGGHDRIFRQAFSAPPDEQLRKSYACYLSTAAGPVMGVLYLSTARVAFCSDSPLSYEASGGDRTEWTHYKVAIPLQRLRAASPSANKTKPAEKFVQLVSVDSQEFWFMGFVNYDGAVAHLQEALSGFRNLQA

SEQ ID NO: 16600 - DNA, 1505 bp, Zea mays subsp. mays
  misc_feature (1)..(1505): Ceres Seq. ID no. 12358876
  misc_feature (1)..(1505): Ortholog of  Ceres SEQ ID NO 14302986 as cited in SEQ ID NO 66798
aaaaaaaacacacggtacgcgcttctcctcctcgcttgccgccgccgccgccgccgcgatggaaaaggagaagctctcgttctccatatcctcctcgaagcagcggccccccaagcctcccgcacgacctgcggccgccgcagacgacgatgacctccgctccgcgcccgctccgggccagcagtacgtcaccgagttcgatccgtcccaaaccctagccgccgcctgcgcggcgcgcgccgtcatcgcgccgctccccaactccggcaacttcctcacccaccgcccacgcaaaccgtcctcgctccccacccctgaggaggaggccgccctcgccgcggaatccggcggctggggccccgccttcgtcctcgacacctcgaccgctcccgaagacccatcatccaaaatcggctacggcctcactcgccgcaacggcgccatcgacgctgctgctgccaaggaaccggagaaggcgccgccaccgtcaccgtcaccgcctcgggccactgatgctgcctccgctgccggcaacctcatgctgcagcggtacaaggaggacatggaaggccttccggagcaccgtggaatggacgagttcaatgagatacccgtggagggatttggcgcggctctccttgctggatacggctggacagaaggtaagggcattggtaggaacaataagatgggggataccaaagttcttgaataccaccgccgtgctggcacacaggggttagggtacaacccctctgaagcagaccctaggaagactcgttctggcgactggattgttggcaagaaggtgtcagagggcgggagtgcgaagagagatcgaggcagtagagataggatggaagagagcgattctagtgcccagaagaagagatataatgaggaaaggtctgagaaggagggccgtgaaaaggtgaggaatggccgtggtagccgagaaggcacaagtaatgcagcggtactcatagcaatgtactgtggttgcagagccatatcagggttcggattgttagtcagaaactaagcaagaggctatacttgatgaagggtaaggttgtcgatgtggtggggcctacaaaatgtgacatcatgatggatgatggatcagagttggtgcagggggtggagcaagatatgcttgaaactgtacttccacggacgaatgggcgggtgcttgtgctttatgggaagcacaagggtttatatgggcacctggtagagaagaattccaaagaagagatcggattggtggaggatgcagatacaaaagatattgtacgtgttagatatgatcagatggcagaatacactggagatccagagttgcttggctactgattaagtttttttgggggaggatatgcttaccgggagccttctgctatgcttggtattatatttttcttctttacaaactgtcaagaattgctgcaatgtaaaaccttgaacaaactggcggttgctatgcatttcttacttgtctttgc

SEQ ID NO: 16601 - protein, 346 aa, Zea mays subsp. mays
  peptide (1)..(346): Ceres Seq. ID no. 12358877
KKTHGTRFSSSLAAAAAAAMEKEKLSFSISSSKQRPPKPPARPAAAADDDDLRSAPAPGQQYVTEFDPSQTLAAACAARAVIAPLPNSGNFLTHRPRKPSSLPTPEEEAALAAESGGWGPAFVLDTSTAPEDPSSKIGYGLTRRNGAIDAAAAKEPEKAPPPSPSPPRATDAASAAGNLMLQRYKEDMEGLPEHRGMDEFNEIPVEGFGAALLAGYGWTEGKGIGRNNKMGDTKVLEYHRRAGTQGLGYNPSEADPRKTRSGDWIVGKKVSEGGSAKRDRGSRDRMEESDSSAQKKRYNEERSEKEGREKVRNGRGSREGTSNAAVLIAMYCGCRAISGFGLLVRN

SEQ ID NO: 16602 - protein, 327 aa, Zea mays subsp. mays
  peptide (1)..(327): Ceres Seq. ID no. 12358878
MEKEKLSFSISSSKQRPPKPPARPAAAADDDDLRSAPAPGQQYVTEFDPSQTLAAACAARAVIAPLPNSGNFLTHRPRKPSSLPTPEEEAALAAESGGWGPAFVLDTSTAPEDPSSKIGYGLTRRNGAIDAAAAKEPEKAPPPSPSPPRATDAASAAGNLMLQRYKEDMEGLPEHRGMDEFNEIPVEGFGAALLAGYGWTEGKGIGRNNKMGDTKVLEYHRRAGTQGLGYNPSEADPRKTRSGDWIVGKKVSEGGSAKRDRGSRDRMEESDSSAQKKRYNEERSEKEGREKVRNGRGSREGTSNAAVLIAMYCGCRAISGFGLLVRN

SEQ ID NO: 16603 - DNA, 946 bp, Zea mays subsp. mays
  misc_feature (1)..(946): Ceres Seq. ID no. 12348256
  misc_feature (1)..(946): Ortholog of  Ceres SEQ ID NO 12609339 as cited in SEQ ID NO 51780
ctcggtctcggactacggttgagcgaagtcgtcactgtaatctactgatctgcaaatggcggaggtggaggcgacggtggggcgactgatgctgtactcgtactggcgcagctcgtgctcccaccgtgcccgcatcgctctcaatctcaaaggtgtggattacgagtacaaggcggtgaaccttctcaagggcgagcagtctgatccagaattcgtcaagcttaatcctatgaagttcgtccctgcgttggttgatggcagttctgtaataggtgactcttacgcgataacactgtatttggaggacaagtacccagagcctcctcttctacctcaagaccttcaaaagaaagctttgaatcaccagattgcaagcattgtagcttctggtattcaacctctccataacctcacagtgttgaggttcattgaccagaaggttggtgcaggggagagtgtgttgtggactcaacaacaaatcgagagaggtttcacagctattgagaacctgatacaactaaaaggatgcgccgggaagtatgcaacaggagatgaagtccaactggcagatgtattccttgcaccccagatctatgcagccattgaacgcactaaaattgacatgtcaaactacctcactcttgctaggctccactcggagtacatgtcacaccctgcgtttgaagcagcgctccctggcaagcaaccggacgccccttcatcctcctaggaactgcaccctagtgtgttgttcctctgaatatatatatatatatatgtatacttctgtaagaattaataattacagagtttcgtctgctatgtcgaaaaatgtcaaaagtttttgtgatttcagagactagcggcatgaagcgtcgttgtggatctggccgtcgtcctcatgtggcatctgtgatttcagggcatgcacttcgtcttagaaggg

SEQ ID NO: 16604 - protein, 224 aa, Zea mays subsp. mays
  peptide (1)..(224): Ceres Seq. ID no. 12348257
MAEVEATVGRLMLYSYWRSSCSHRARIALNLKGVDYEYKAVNLLKGEQSDPEFVKLNPMKFVPALVDGSSVIGDSYAITLYLEDKYPEPPLLPQDLQKKALNHQIASIVASGIQPLHNLTVLRFIDQKVGAGESVLWTQQQIERGFTAIENLIQLKGCAGKYATGDEVQLADVFLAPQIYAAIERTKIDMSNYLTLARLHSEYMSHPAFEAALPGKQPDAPSSS

SEQ ID NO: 16605 - protein, 213 aa, Zea mays subsp. mays
  peptide (1)..(213): Ceres Seq. ID no. 12348258
MLYSYWRSSCSHRARIALNLKGVDYEYKAVNLLKGEQSDPEFVKLNPMKFVPALVDGSSVIGDSYAITLYLEDKYPEPPLLPQDLQKKALNHQIASIVASGIQPLHNLTVLRFIDQKVGAGESVLWTQQQIERGFTAIENLIQLKGCAGKYATGDEVQLADVFLAPQIYAAIERTKIDMSNYLTLARLHSEYMSHPAFEAALPGKQPDAPSSS

SEQ ID NO: 16606 - protein, 166 aa, Zea mays subsp. mays
  peptide (1)..(166): Ceres Seq. ID no. 12348259
MKFVPALVDGSSVIGDSYAITLYLEDKYPEPPLLPQDLQKKALNHQIASIVASGIQPLHNLTVLRFIDQKVGAGESVLWTQQQIERGFTAIENLIQLKGCAGKYATGDEVQLADVFLAPQIYAAIERTKIDMSNYLTLARLHSEYMSHPAFEAALPGKQPDAPSSS

SEQ ID NO: 16607 - DNA, 933 bp, Zea mays subsp. mays
  misc_feature (1)..(933): Ceres Seq. ID no. 12354577
  misc_feature (1)..(933): Ortholog of  Ceres SEQ ID NO 14315067 as cited in SEQ ID NO 57249
  misc_feature (1)..(933): Ortholog of  Ceres SEQ ID NO 15173278 as cited in SEQ ID NO 58144
aaaaggacccaacgaagtccagccagctgagctgagcctcgtgaaccagagcatttgctccttcctcgtcctcctcgatcgacctctctccttggtgccgctgccgccatatatgaactgctagcacgcgcagcagccagcagctgccgaccggcctataatcagaaggccagaaaggatcgatggagaccatcaagtgctgcatcgcgtgcatcctgccgtgcggggcgctggacgtggtgcggatcgtgcactccaacggacgcgtggaggagatcagcgggggccccgtgctggccggggagatcatgaaggcgtaccccaagcacgtcctccggaagccgccgtccacgtgcccggccgacggcggcatcgtcgtgcagaagcccgtcatcctgccgcacaatgccgagctgcagaagggcaagatctacttcctcatgccggtcatggccaccccggcgcccgagaagcccgccgcgaagccacagccgccgcccgccgccggccaatccgcggcggccgcttcggtggcgaggagacggcgccggaggaaggaccacgccgccgcacggccggacggaggaggagcggcgcccgcctgcagcagcggggccggggcccggccgccggagggcgagaaggagcggctgctggccaacgagaggtacctgtccgagatcatgaaggagaaggcctccacggccagggaccggcggcgaggccgcgtcgccgtgtggcggccgcacctggagagcatcaccgaggatgacttgtaatcaagcaaggtgtcttcgatttttttttcctcccaccttttgtttctctctccatttctttagttttagcagcgtggtagtttcgtggcgctctcttttgttaattcctcctgctttgcctctccttgccctttggccttttatttttgttgcc

SEQ ID NO: 16608 - protein, 198 aa, Zea mays subsp. mays
  peptide (1)..(198): Ceres Seq. ID no. 12354578
METIKCCIACILPCGALDVVRIVHSNGRVEEISGGPVLAGEIMKAYPKHVLRKPPSTCPADGGIVVQKPVILPHNAELQKGKIYFLMPVMATPAPEKPAAKPQPPPAAGQSAAAASVARRRRRRKDHAAARPDGGGAAPACSSGAGARPPEGEKERLLANERYLSEIMKEKASTARDRRRGRVAVWRPHLESITEDDL

SEQ ID NO: 16609 - protein, 156 aa, Zea mays subsp. mays
  peptide (1)..(156): Ceres Seq. ID no. 12354579
MKAYPKHVLRKPPSTCPADGGIVVQKPVILPHNAELQKGKIYFLMPVMATPAPEKPAAKPQPPPAAGQSAAAASVARRRRRRKDHAAARPDGGGAAPACSSGAGARPPEGEKERLLANERYLSEIMKEKASTARDRRRGRVAVWRPHLESITEDDL

SEQ ID NO: 16610 - protein, 112 aa, Zea mays subsp. mays
  peptide (1)..(112): Ceres Seq. ID no. 12354580
MPVMATPAPEKPAAKPQPPPAAGQSAAAASVARRRRRRKDHAAARPDGGGAAPACSSGAGARPPEGEKERLLANERYLSEIMKEKASTARDRRRGRVAVWRPHLESITEDDL

SEQ ID NO: 16611 - DNA, 504 bp, Zea mays subsp. mays
  misc_feature (1)..(504): Ceres Seq. ID no. 13565466
  misc_feature (1)..(504): Ortholog of  Ceres SEQ ID NO 15180463 as cited in SEQ ID NO 0
atttcgccattgctggcgcagsaacgcaaccgcgagatgttccatttgcgttgcacatacaagtgcaggagttcttgtacttcagagatagatccttagaactcatcgatcaaggtctaagtggtccaattgatgcacaaggattccaaaacgctctatatatgatagacatagggcagaacgatgtaaacgctcttctgtcaaactcgccctatgatcaagttattgccaaattcccaccaattcttgctgagattaaggacgctgtccagactctatatagcaacggtagccgaaacttctggatacatgggacgggggctctgggttgcctgccgcagaagcttgccataccaaggaaaaacgacagcgatcttgatcagtatggctgtctcaagacctataacagagctgcagttgcgttcaacgccgcgctgggcagcctctgcgacgagctgagtgcgcagatgaaagacgcgacgcttgtgtacacggacctgttcc

SEQ ID NO: 16612 - protein, 167 aa, Zea mays subsp. mays
  peptide (1)..(167): Ceres Seq. ID no. 13565467
  misc_feature (7)..(7): Xaa is any aa, unknown or other
FAIAGAXTQPRDVPFALHIQVQEFLYFRDRSLELIDQGLSGPIDAQGFQNALYMIDIGQNDVNALLSNSPYDQVIAKFPPILAEIKDAVQTLYSNGSRNFWIHGTGALGCLPQKLAIPRKNDSDLDQYGCLKTYNRAAVAFNAALGSLCDELSAQMKDATLVYTDLF

SEQ ID NO: 16613 - protein, 114 aa, Zea mays subsp. mays
  peptide (1)..(114): Ceres Seq. ID no. 13565468
MIDIGQNDVNALLSNSPYDQVIAKFPPILAEIKDAVQTLYSNGSRNFWIHGTGALGCLPQKLAIPRKNDSDLDQYGCLKTYNRAAVAFNAALGSLCDELSAQMKDATLVYTDLF

SEQ ID NO: 16614 - DNA, 1345 bp, Zea mays subsp. mays
  misc_feature (1)..(1345): Ceres Seq. ID no. 12360849
  misc_feature (1)..(1345): Ortholog of  Ceres SEQ ID NO 12617475 as cited in SEQ ID NO 64550
taattgtcattgctgcaacgaactttcctgagtcgctagataaagccctagtcagacctgggcgttttgaccgtcatattgttgttcccaacccagatgttgaaggtcgacgccaaattctagaatcccatatgtcaaagatcttgaaaggtgatgatgtggacttaatgatcattgctagaggaacaccgggattctctggtgcagaccttgctaacttggtaaatgttgctgctcttaaggctgccatggatggtgcaaaagctgtcacaatggatgatcttgagtatgcaaaggaccgaatcatgatgggtagtgagcggaagtcggcagttatctctgacgaatgcaggaagctgacagcataccatgagggagggcatgcccttgttgcaatccacacagaaggagctcaccctgtccacaaggctaccatcgtacctagggggatggccctaggaatggtggcccaactccccgacaaagaccagacaagtgtgtcaaggaaacagatgctagcaaaactggatgtctgcatgggaggccgtgtggcagaagagcttatctttggggatactgaggtgacatccggtgcgtcgtcagatttccagcaagcgaccgcaatggcgagagcaatggttactaagtatggcatgagcaagcaggtcggccttgtctcttataactacgaggacgatggaaagagcatgagctcagaaacgagacttgcgatcgagcaggaggtgaagaacttcttggagaatgcatacagcaatgcgaagaccattcttacaaaacacaacaaagagctccatgctctagccaacgcacttcttgagcatgagaccctcacaggagcccagataaagaacatattagcccaggttcataacaaacagcaacatgagcatactatcgaagcaccacagaaggcctcagtcgcaccagcttcccccgcatcaccagctgcatcagctgctgcagcagcagcagccgccgccgcggcagcacagcaggcggcagccaaagctaagggggtggctggtatgggatcttagcacattagagcacccccactggtttgcattgtgtatatttcaccaaacaagcaaagctgttccagcaattaacgttcaacgagggtcctcggtagtatgctaaactgctgcagcaacagaacatactgattgtgtggaagctactgttcacgtgcctcgagtgcgaagcagaaacgaaaactttatgcattgtagtaggaggcacatttagctggtgattggatcagttttgtacccaaatcgaaaacaatttctgttgtttacaccccaagaattgttacatttcg

SEQ ID NO: 16615 - protein, 351 aa, Zea mays subsp. mays
  peptide (1)..(351): Ceres Seq. ID no. 12360850
IVIAATNFPESLDKALVRPGRFDRHIVVPNPDVEGRRQILESHMSKILKGDDVDLMIIARGTPGFSGADLANLVNVAALKAAMDGAKAVTMDDLEYAKDRIMMGSERKSAVISDECRKLTAYHEGGHALVAIHTEGAHPVHKATIVPRGMALGMVAQLPDKDQTSVSRKQMLAKLDVCMGGRVAEELIFGDTEVTSGASSDFQQATAMARAMVTKYGMSKQVGLVSYNYEDDGKSMSSETRLAIEQEVKNFLENAYSNAKTILTKHNKELHALANALLEHETLTGAQIKNILAQVHNKQQHEHTIEAPQKASVAPASPASPAASAAAAAAAAAAAAQQAAAKAKGVAGMGS

SEQ ID NO: 16616 - protein, 308 aa, Zea mays subsp. mays
  peptide (1)..(308): Ceres Seq. ID no. 12360851
MSKILKGDDVDLMIIARGTPGFSGADLANLVNVAALKAAMDGAKAVTMDDLEYAKDRIMMGSERKSAVISDECRKLTAYHEGGHALVAIHTEGAHPVHKATIVPRGMALGMVAQLPDKDQTSVSRKQMLAKLDVCMGGRVAEELIFGDTEVTSGASSDFQQATAMARAMVTKYGMSKQVGLVSYNYEDDGKSMSSETRLAIEQEVKNFLENAYSNAKTILTKHNKELHALANALLEHETLTGAQIKNILAQVHNKQQHEHTIEAPQKASVAPASPASPAASAAAAAAAAAAAAQQAAAKAKGVAGMGS

SEQ ID NO: 16617 - protein, 296 aa, Zea mays subsp. mays
  peptide (1)..(296): Ceres Seq. ID no. 12360852
MIIARGTPGFSGADLANLVNVAALKAAMDGAKAVTMDDLEYAKDRIMMGSERKSAVISDECRKLTAYHEGGHALVAIHTEGAHPVHKATIVPRGMALGMVAQLPDKDQTSVSRKQMLAKLDVCMGGRVAEELIFGDTEVTSGASSDFQQATAMARAMVTKYGMSKQVGLVSYNYEDDGKSMSSETRLAIEQEVKNFLENAYSNAKTILTKHNKELHALANALLEHETLTGAQIKNILAQVHNKQQHEHTIEAPQKASVAPASPASPAASAAAAAAAAAAAAQQAAAKAKGVAGMGS

SEQ ID NO: 16618 - DNA, 1184 bp, Zea mays subsp. mays
  misc_feature (1)..(1184): Ceres Seq. ID no. 12352843
  misc_feature (1)..(1184): Ortholog of  Ceres SEQ ID NO 14302919 as cited in SEQ ID NO 20338
  misc_feature (1)..(1184): Ortholog of  Ceres SEQ ID NO 13595497 as cited in SEQ ID NO 51127
  misc_feature (1)..(1184): Ortholog of  Ceres SEQ ID NO 14306765 as cited in SEQ ID NO 53275
  misc_feature (1)..(1184): Ortholog of  Ceres SEQ ID NO 14314046 as cited in SEQ ID NO 59316
attcaacaactctggcgagcagcagtgaacgtacttacgtcttcccccagctagctagctatctaccttggtggtggcgattggtatatagattaaacatggcgcctcaaagcctggatctcgggctgagtctcggcctgggcgtggcggcattccagcccagcttctgccacccggccggcaatgcggcggcggagcgggagaccagcccgaccgcggcggacgagagggagcggaggtgctcgcccgccggcagcccgacgtcgagcggcagcggcagcgggaagcgcgtcgcgacggagagatcggccggcagcggcagcggcgacgaggacgacgacgggggcgctcgcaagaagctgcggttgtccaaggaccaggccgccgtgctcgaggagtgcttcaaaacgcaccacaccctcactccgaagcagaaggcagcgctggccagccgcctgggcctccgggcgcggcaggtggaggtgtggttccagaaccggcgcgcccggaccaagctgaagcagacggaggtcgactgcgagtacctcaggcgctggtgcgagcagctcgccgaggagaaccggcgcctgggcaaggaggtcgccgagctcagggcgctgagcgccgcgcccgcgccagcggcccctctcaccgccctcacaatgtgcctctcctgcaggcgcgtctcctcttcatcctgctcatcctcgccgcctaacacgcacgcgcacgcgcatgccgctgcagctggcactggcactggcgggagcgtggcctctccggcggcggcgacgttgcccgcccaccggcagttcttgtgcgggttcagagacggcggggcggccgccgccgcagtgtacgggacctcatcggctctcgcaaaagccctcagggcggccagataggcgtagtcgtcgtcactagctctctccgctgatctggacttgctctgctcaccggagctccggcgatcgagggatgccacggaagtgcgtggccccaagttgcaactaattgcaactgcagagcaagtgttgtagctgaatcatcttttgttttttttcctccgtatctttagagcggaatgccgcatgcaaatgttctttagaatcgatttcatgtgggtcagtgggtgtatgattgtactcatgctgtggaaattaataacggtttgtagatgaggt

SEQ ID NO: 16619 - protein, 300 aa, Zea mays subsp. mays
  peptide (1)..(300): Ceres Seq. ID no. 12352844
STTLASSSERTYVFPQLASYLPWWWRLVYRLNMAPQSLDLGLSLGLGVAAFQPSFCHPAGNAAAERETSPTAADERERRCSPAGSPTSSGSGSGKRVATERSAGSGSGDEDDDGGARKKLRLSKDQAAVLEECFKTHHTLTPKQKAALASRLGLRARQVEVWFQNRRARTKLKQTEVDCEYLRRWCEQLAEENRRLGKEVAELRALSAAPAPAAPLTALTMCLSCRRVSSSSCSSSPPNTHAHAHAAAAGTGTGGSVASPAAATLPAHRQFLCGFRDGGAAAAAVYGTSSALAKALRAAR

SEQ ID NO: 16620 - protein, 268 aa, Zea mays subsp. mays
  peptide (1)..(268): Ceres Seq. ID no. 12352845
MAPQSLDLGLSLGLGVAAFQPSFCHPAGNAAAERETSPTAADERERRCSPAGSPTSSGSGSGKRVATERSAGSGSGDEDDDGGARKKLRLSKDQAAVLEECFKTHHTLTPKQKAALASRLGLRARQVEVWFQNRRARTKLKQTEVDCEYLRRWCEQLAEENRRLGKEVAELRALSAAPAPAAPLTALTMCLSCRRVSSSSCSSSPPNTHAHAHAAAAGTGTGGSVASPAAATLPAHRQFLCGFRDGGAAAAAVYGTSSALAKALRAAR

SEQ ID NO: 16621 - DNA, 1331 bp, Zea mays subsp. mays
  misc_feature (1)..(1331): Ceres Seq. ID no. 12366111
  misc_feature (1)..(1331): Ortholog of  Ceres SEQ ID NO 13599496 as cited in SEQ ID NO 0
atccaatacgcccaccagccaccacacatcctctctccctcccagtcccaggagcgtggcctcactctcctcgtcgcatcccccctcctcatcttcgcagcgcgggcggcggcaatggcgatggcctccacctacgcgccgggcggaggcgcgcgggcgctcgcgcagggtagatgcagggtccgcggtcccgcggggctgggcttcctcggcccctccaaggccgccggcctcccccgccccctcgccctcgccctcgccaggcggatgagcagccccgtcgcggtgggcgccaggctgcgatgcgcggcgtcgtcgtcccccgcggcggcgcggcccgccacggcgccgcgcttcatccagcacaagaaggaggccttctggttctaccgcttcctctccatcgtgtacgaccacgtcatcaatccgggccactggaccgaggacatgcgcgacgacgcgctggaacctgccgacctcttcagccgccacctcacggtcgtcgacgtcggcggcggcacggggttcaccacgctcggcatcgtcaagcacgtcaacccggagaacgtcacgctgctcgaccagtccccgcaccagctcgacaaggcccggcagaaggaggccctcaagggggtcaccatcatggagggcgacgccgaggacctcccgttccccaccgactccttcgaccgatacatctccgccggcagcatcgagtactggccagacccacagcgggggatcaaggaagcctacagggtcctgagatttggtgggctagcttgtgtgatcggcccggtctacccgaccttctggctgtcccgcttcttcgccgacatgtggatgctcttccccaaggaggaagagtacatcgagtggttcaagaaggctgggtttagggatgtcaagctgaagaggattggaccgaagtggtaccgcggtgtccgaaggcatggcctcatcatgggctgctccgtcacaggcgtcaagagagagcgcggtgactctcccttggagcttggtcccaaggcggaggatgtcagcaagccagtgaatccgatcaccttcctcttccgcttcctcgtaggaacgatatgtgctgcctactatgttctggtgcctatttacatgtggataaaggaccagatcgtgccaaaaggcatgccaatctgagtgaagggaatgagctgcatggaagagaggatagccaacgtctgaattttactcttctctatattagacgcttcctgcctgttttgtattaatacctcttgttttccttctgctatttacttcttgcactgctgttcctgtttgtggtaattaataat

SEQ ID NO: 16622 - protein, 390 aa, Zea mays subsp. mays
  peptide (1)..(390): Ceres Seq. ID no. 12366112
IQYAHQPPHILSPSQSQERGLTLLVASPLLIFAARAAAMAMASTYAPGGGARALAQGRCRVRGPAGLGFLGPSKAAGLPRPLALALARRMSSPVAVGARLRCAASSSPAAARPATAPRFIQHKKEAFWFYRFLSIVYDHVINPGHWTEDMRDDALEPADLFSRHLTVVDVGGGTGFTTLGIVKHVNPENVTLLDQSPHQLDKARQKEALKGVTIMEGDAEDLPFPTDSFDRYISAGSIEYWPDPQRGIKEAYRVLRFGGLACVIGPVYPTFWLSRFFADMWMLFPKEEEYIEWFKKAGFRDVKLKRIGPKWYRGVRRHGLIMGCSVTGVKRERGDSPLELGPKAEDVSKPVNPITFLFRFLVGTICAAYYVLVPIYMWIKDQIVPKGMPI

SEQ ID NO: 16623 - protein, 352 aa, Zea mays subsp. mays
  peptide (1)..(352): Ceres Seq. ID no. 12366113
MAMASTYAPGGGARALAQGRCRVRGPAGLGFLGPSKAAGLPRPLALALARRMSSPVAVGARLRCAASSSPAAARPATAPRFIQHKKEAFWFYRFLSIVYDHVINPGHWTEDMRDDALEPADLFSRHLTVVDVGGGTGFTTLGIVKHVNPENVTLLDQSPHQLDKARQKEALKGVTIMEGDAEDLPFPTDSFDRYISAGSIEYWPDPQRGIKEAYRVLRFGGLACVIGPVYPTFWLSRFFADMWMLFPKEEEYIEWFKKAGFRDVKLKRIGPKWYRGVRRHGLIMGCSVTGVKRERGDSPLELGPKAEDVSKPVNPITFLFRFLVGTICAAYYVLVPIYMWIKDQIVPKGMPI

SEQ ID NO: 16624 - protein, 350 aa, Zea mays subsp. mays
  peptide (1)..(350): Ceres Seq. ID no. 12366114
MASTYAPGGGARALAQGRCRVRGPAGLGFLGPSKAAGLPRPLALALARRMSSPVAVGARLRCAASSSPAAARPATAPRFIQHKKEAFWFYRFLSIVYDHVINPGHWTEDMRDDALEPADLFSRHLTVVDVGGGTGFTTLGIVKHVNPENVTLLDQSPHQLDKARQKEALKGVTIMEGDAEDLPFPTDSFDRYISAGSIEYWPDPQRGIKEAYRVLRFGGLACVIGPVYPTFWLSRFFADMWMLFPKEEEYIEWFKKAGFRDVKLKRIGPKWYRGVRRHGLIMGCSVTGVKRERGDSPLELGPKAEDVSKPVNPITFLFRFLVGTICAAYYVLVPIYMWIKDQIVPKGMPI

SEQ ID NO: 16625 - DNA, 1435 bp, Zea mays subsp. mays
  misc_feature (1)..(1435): Ceres Seq. ID no. 12354581
  misc_feature (1)..(1435): Ortholog of  Ceres SEQ ID NO 15177012 as cited in SEQ ID NO 56256
  misc_feature (1)..(1435): Ortholog of  Ceres SEQ ID NO 14314300 as cited in SEQ ID NO 57386
  misc_feature (1)..(1435): Ortholog of  Ceres SEQ ID NO 14311993 as cited in SEQ ID NO 60371
  misc_feature (1)..(1435): Ortholog of  Ceres SEQ ID NO 13596509 as cited in SEQ ID NO 62004
  misc_feature (1)..(1435): Ortholog of  Ceres SEQ ID NO 13500385 as cited in SEQ ID NO 67583
gataagaaatggtgagcaggcaagcatggagtggagtgcttttaaatttgggtgtcgctgtcgttgaaagcgatgggtggctagttttacagacagacagcagcacctgctcctccgtctggactgactgactagtgactcagctccacccacatcccccttcgtcgtcttctccctccctgctagctgacctccaatccacgataaggcaagataagctagctaggaaggcaagggatccgatggacaagtacgagcccgttcgcgagatcggggcgggcaacttcggggtggccaagctgatgaggaacaaggacacgagggagctggtggccatgaagttcatagagcgaggaaacaggatcgacgagaacgtgttccgcgagatcgtgaaccaccgctccctccgccaccccaacatcatccggttcaaggaggtggtgctgactcccacgcaccttgcgatcgtgatggagtacgctgcgggcggggagctgttcgagcgcatctgcgacgccgggcggttccacgaggacgaggcgcgctacttcttccagcagctggtttgcggcgtcagcttctgccacgccatgaacatctgccaccgggacctcaagctggagaacacgctgctggacggcagcccggcgccgcgcctcaagatctgcgacttcggctactccaagtcctcggtgctgcactcgcgaccgaagtcaacggtgggcacgccggcgtacatcgcgcccgaggtgctgtcgcggcgagagtacgacgggaagcacgccgacgtctggtcgtgcggagtcacgctctacgtcatgctggtgggggcgtacccgttcgaggatccaaaggacccaaagaacttcaggaagacaatacagcgcatcatgtcggttcagtacaagatccccgagtacgtgcacgtctcccacaactgccgccacctcctctcccgcatcttcgtccagaacccgtacaagaggatcaccatgagcgagatcaagacccacccctggtacctcaagaacctgccgagggagctcaaggaggaggcgcaggcagcctactactacagccgccagggagacagcagcagcagcagcagcaataatgcgacagcagcacccgcctactcgtcgcagagcgtggaggagatcttgaggatcgtgcaggaggcgcagacggtgcccaagccaccgtccaggcccgacgaagcagagcaacaggaagaagaagacgaccatgacgatgacgacgactacgacagaacggtgcggcaggtgcacgccagcggagagttcgacatgattatgagcagactccaaatctgactcttagtatcttgcctgccattggtagttttgtgttgtaatgcgtgcctgtaacatgaatttcagtcaaactatacactatcataatggtgatggtattg

SEQ ID NO: 16626 - protein, 363 aa, Zea mays subsp. mays
  peptide (1)..(363): Ceres Seq. ID no. 12354582
MDKYEPVREIGAGNFGVAKLMRNKDTRELVAMKFIERGNRIDENVFREIVNHRSLRHPNIIRFKEVVLTPTHLAIVMEYAAGGELFERICDAGRFHEDEARYFFQQLVCGVSFCHAMNICHRDLKLENTLLDGSPAPRLKICDFGYSKSSVLHSRPKSTVGTPAYIAPEVLSRREYDGKHADVWSCGVTLYVMLVGAYPFEDPKDPKNFRKTIQRIMSVQYKIPEYVHVSHNCRHLLSRIFVQNPYKRITMSEIKTHPWYLKNLPRELKEEAQAAYYYSRQGDSSSSSSNNATAAPAYSSQSVEEILRIVQEAQTVPKPPSRPDEAEQQEEEDDHDDDDDYDRTVRQVHASGEFDMIMSRLQI

SEQ ID NO: 16627 - protein, 343 aa, Zea mays subsp. mays
  peptide (1)..(343): Ceres Seq. ID no. 12354583
MRNKDTRELVAMKFIERGNRIDENVFREIVNHRSLRHPNIIRFKEVVLTPTHLAIVMEYAAGGELFERICDAGRFHEDEARYFFQQLVCGVSFCHAMNICHRDLKLENTLLDGSPAPRLKICDFGYSKSSVLHSRPKSTVGTPAYIAPEVLSRREYDGKHADVWSCGVTLYVMLVGAYPFEDPKDPKNFRKTIQRIMSVQYKIPEYVHVSHNCRHLLSRIFVQNPYKRITMSEIKTHPWYLKNLPRELKEEAQAAYYYSRQGDSSSSSSNNATAAPAYSSQSVEEILRIVQEAQTVPKPPSRPDEAEQQEEEDDHDDDDDYDRTVRQVHASGEFDMIMSRLQI

SEQ ID NO: 16628 - protein, 332 aa, Zea mays subsp. mays
  peptide (1)..(332): Ceres Seq. ID no. 12354584
MKFIERGNRIDENVFREIVNHRSLRHPNIIRFKEVVLTPTHLAIVMEYAAGGELFERICDAGRFHEDEARYFFQQLVCGVSFCHAMNICHRDLKLENTLLDGSPAPRLKICDFGYSKSSVLHSRPKSTVGTPAYIAPEVLSRREYDGKHADVWSCGVTLYVMLVGAYPFEDPKDPKNFRKTIQRIMSVQYKIPEYVHVSHNCRHLLSRIFVQNPYKRITMSEIKTHPWYLKNLPRELKEEAQAAYYYSRQGDSSSSSSNNATAAPAYSSQSVEEILRIVQEAQTVPKPPSRPDEAEQQEEEDDHDDDDDYDRTVRQVHASGEFDMIMSRLQI

SEQ ID NO: 16629 - DNA, 820 bp, Zea mays subsp. mays
  misc_feature (1)..(820): Ceres Seq. ID no. 12357112
  misc_feature (1)..(820): Ortholog of  Ceres SEQ ID NO 13655108 as cited in SEQ ID NO 62996
ctcggtctctctggagtctggactcgcctccacggctccaccatgtatcccaaggcggcagacgaaggtgcgcagccgctggccacgggcatccccttcagcggcggcggcggctactaccaggcgggcggcgcgatggcggcggcgttcgcggtgcaggcgcaggcgcccgtcgccgcctggtccaccgggctctgcaactgcttcgacgactgccacaactgctgcgtgacgtgcgtgtgcccgtgcatcacgttcgggcagaccgcggagatcatcgaccggggctccacgtcctgcggcaccagcgggggcgctgtacgcgctcgtcatgctgctcaccggctgtcagtgcgtctactcctgcttctaccgcgccaagatgcgcgcgcagtacggcctccaggtgagcccctgctccgactgctgcgtgcactgctgctgccagtggctgcgcgctctgccaggagtaccgcgagctcaagaagcgaggcttcgacatgagcataggatggcatgcgaacatggagaggcaggggcgcgccgccgccgccgtgccgccgcacatgcatcctgggatgacccgctgacgctctgccgctcgcctcacttctgctgaggaaatcaagtgatttggtattggtccgctcccagcaggcagtatcaactactgtaaccaatccatgatctgtatgcggtatcgggctgaactgatactttatggacttgttgcttcaacttagtccgtaaaacgctcaagaccacatgaaaatatggtccataaaacttgttcaaaaatagacattttgcactatatttt

SEQ ID NO: 16630 - protein, 167 aa, Zea mays subsp. mays
  peptide (1)..(167): Ceres Seq. ID no. 12357113
LGLSGVWTRLHGSTMYPKAADEGAQPLATGIPFSGGGGYYQAGGAMAAAFAVQAQAPVAAWSTGLCNCFDDCHNCCVTCVCPCITFGQTAEIIDRGSTSCGTSGGAVRARHAAHRLSVRLLLLLPRQDARAVRPPGEPLLRLLRALLLPVAARSARSTASSRSEAST

SEQ ID NO: 16631 - protein, 153 aa, Zea mays subsp. mays
  peptide (1)..(153): Ceres Seq. ID no. 12357114
MYPKAADEGAQPLATGIPFSGGGGYYQAGGAMAAAFAVQAQAPVAAWSTGLCNCFDDCHNCCVTCVCPCITFGQTAEIIDRGSTSCGTSGGAVRARHAAHRLSVRLLLLLPRQDARAVRPPGEPLLRLLRALLLPVAARSARSTASSRSEAST

SEQ ID NO: 16632 - protein, 135 aa, Zea mays subsp. mays
  peptide (1)..(135): Ceres Seq. ID no. 12357115
RSLWSLDSPPRLHHVSQGGRRRCAAAGHGHPLQRRRRLLPGGRRDGGGVRGAGAGARRRLVHRALQLLRRLPQLLRDVRVPVHHVRADRGDHRPGLHVLRHQRGRCTRSSCCSPAVSASTPASTAPRCARSTASR

SEQ ID NO: 16633 - DNA, 955 bp, Zea mays subsp. mays
  misc_feature (1)..(955): Ceres Seq. ID no. 12566280
  misc_feature (1)..(955): Ortholog of  Ceres SEQ ID NO 13596116 as cited in SEQ ID NO 62213
gcagagttgttgattgcagggaaaccgccaattggcaaggatgaagcttgtgaccgccttcgttgtgctgctcttttctctcctccccgactcgtccaccgcggaggacttcgatttcttctaccttgtccaacagtggccgggctcgttctgcgacacgcggcagggttgctgcttcccggacggcgcgggcaagccggaggcggcgttcggcatccacgggctgtggcccaactacgccaagtgccgcggccgccaccaccgcgagggcggcggcctcgcccgcgcggtgctcggcgccgacgacgccttcctcgccgccgtggggcggcggggcaagtgctggccggagtactgcggcggcggcggcgacggcgacggcggccaccagctgagcccctgggacgtccgggacctggtggcgtcgctgggccggagctggccgacgctgtcgtgcaagaaccggcgcagcttcgagttctggagctacgagtggaagaagcacggcacctgctccaacctggacccgcacgactacttcgcgcgcgcgctgcagctcagggagcggcacgacctcgcggcggtcctcgcggacgccgggatcgtgccgtccgacaccgacacgtacccggtggaccgcgtcagggacgccatcgcgcaggggaccggcttcgtggccaacctcgagtgcaaccgcgacgcggacggcgaggcgcagctgttccaggtgtaccagtgcgtggaccgcgaggccaaggacctcatcgactgcccgctccccatgcccaccaagtgcaccgatcgggtcaagttgcccgtcttctgattccgagcttctggctgtcgtttgcaattgtaaaaacgggccgggtgcagatcgatcgatacgacgatacatgcatgtttgcgtatgtgatttcgaaagcggatttgaataaatgtgtgtttacctttc

SEQ ID NO: 16634 - protein, 318 aa, Zea mays subsp. mays
  peptide (1)..(318): Ceres Seq. ID no. 12566281
AELLIAGKPPIGKDEACDRLRCAALFSPPRLVHRGGLRFLLPCPTVAGLVLRHAAGLLLPGRRGQAGGGVRHPRAVAQLRQVPRPPPPRGRRPRPRGARRRRRLPRRRGAAGQVLAGVLRRRRRRRRRPPAEPLGRPGPGGVAGPELADAVVQEPAQLRVLELRVEEARHLLQPGPARLLRARAAAQGAARPRGGPRGRRDRAVRHRHVPGGPRQGRHRAGDRLRGQPRVQPRRGRRGAAVPGVPVRGPRGQGPHRLPAPHAHQVHRSGQVARLLIPSFWLSFAIVKTGRVQIDRYDDTCMFAYVISKADLNKCVFTF

SEQ ID NO: 16635 - protein, 261 aa, Zea mays subsp. mays
  peptide (1)..(261): Ceres Seq. ID no. 12566282
MKLVTAFVVLLFSLLPDSSTAEDFDFFYLVQQWPGSFCDTRQGCCFPDGAGKPEAAFGIHGLWPNYAKCRGRHHREGGGLARAVLGADDAFLAAVGRRGKCWPEYCGGGGDGDGGHQLSPWDVRDLVASLGRSWPTLSCKNRRSFEFWSYEWKKHGTCSNLDPHDYFARALQLRERHDLAAVLADAGIVPSDTDTYPVDRVRDAIAQGTGFVANLECNRDADGEAQLFQVYQCVDREAKDLIDCPLPMPTKCTDRVKLPVF

SEQ ID NO: 16636 - DNA, 1047 bp, Zea mays subsp. mays
  misc_feature (1)..(1047): Ceres Seq. ID no. 12402068
  misc_feature (1)..(1047): Ortholog of  Ceres SEQ ID NO 14304408 as cited in SEQ ID NO 58051
  misc_feature (1)..(1047): Ortholog of  Ceres SEQ ID NO 14314759 as cited in SEQ ID NO 59915
  misc_feature (1)..(1047): Ortholog of  Ceres SEQ ID NO 13661769 as cited in SEQ ID NO 61435
  misc_feature (1)..(1047): Ortholog of  Ceres SEQ ID NO 13600585 as cited in SEQ ID NO 0
ttttagcaccacctctcatgactatcacatttctttcgggaaagtagaaaaaaatctattacccatgaggccatgatactttccacttggacgaagcgaaattgttaattcctcccttccagtatatagctcgctcgctcacactcggagctcgtaacaaagtcatcactcatcacatgagcttgcttgtgactgccagctttgcccagtgttcatcgcccatggaagagcgggcactgttcccggtgtccgattccagcaccacctgcagcagctctggctgtaccggccccaactcccctgtctcgtcgtcgcagtatttggacgacaccagcgacggcgccggcagctcgagcagccggaagcggccgcgccgggagctgaagcatccaacgtaccgcggcgtgcgcatgcgtgcgtggggcaagtgggtgtccgagatccgggagccccgcaagaagtcgcgcatctggctgggcaccttcgacactcccgagatggccgcgcgcgcgcatgacgtcgccgcgctcgccatcaagggccgcgccgcgcacctcaacttcccggagatgtcccacgagctgccccgcgccgcatcggcggcccccgaggacgtgcgtgcggcggcggcgctcgcggccgcgatggagatggagagcgtggcgccgcccacttctagcgagtctcgcgacggcgcccgcaatgacgaaaatgaagggccggccgcatctagctcgtccggcaacgacgccgacaatgcccagaccgaagagcgggctgcgccgtccgagcattcgatgctggctgacgggcacatccttaatctcgcggtcttcgagctgccggacgtcctactcgagttcggcttcgcgccgccgccgccgtcgacgtcttgtggctatgatttgtcctgggacgagccgttgctgctctgggagcactgacgagcaagagggggcaacgtgacatgcatgccaatgtgaagttagataggtgcagctgatgatccgcatacaagcatacttttactaatcagcattgatttgt

SEQ ID NO: 16637 - protein, 255 aa, Zea mays subsp. mays
  peptide (1)..(255): Ceres Seq. ID no. 12402069
MSLLVTASFAQCSSPMEERALFPVSDSSTTCSSSGCTGPNSPVSSSQYLDDTSDGAGSSSSRKRPRRELKHPTYRGVRMRAWGKWVSEIREPRKKSRIWLGTFDTPEMAARAHDVAALAIKGRAAHLNFPEMSHELPRAASAAPEDVRAAAALAAAMEMESVAPPTSSESRDGARNDENEGPAASSSSGNDADNAQTEERAAPSEHSMLADGHILNLAVFELPDVLLEFGFAPPPPSTSCGYDLSWDEPLLLWEH

SEQ ID NO: 16638 - protein, 240 aa, Zea mays subsp. mays
  peptide (1)..(240): Ceres Seq. ID no. 12402070
MEERALFPVSDSSTTCSSSGCTGPNSPVSSSQYLDDTSDGAGSSSSRKRPRRELKHPTYRGVRMRAWGKWVSEIREPRKKSRIWLGTFDTPEMAARAHDVAALAIKGRAAHLNFPEMSHELPRAASAAPEDVRAAAALAAAMEMESVAPPTSSESRDGARNDENEGPAASSSSGNDADNAQTEERAAPSEHSMLADGHILNLAVFELPDVLLEFGFAPPPPSTSCGYDLSWDEPLLLWEH

SEQ ID NO: 16639 - protein, 177 aa, Zea mays subsp. mays
  peptide (1)..(177): Ceres Seq. ID no. 12402071
MRAWGKWVSEIREPRKKSRIWLGTFDTPEMAARAHDVAALAIKGRAAHLNFPEMSHELPRAASAAPEDVRAAAALAAAMEMESVAPPTSSESRDGARNDENEGPAASSSSGNDADNAQTEERAAPSEHSMLADGHILNLAVFELPDVLLEFGFAPPPPSTSCGYDLSWDEPLLLWEH

SEQ ID NO: 16640 - DNA, 744 bp, Zea mays subsp. mays
  misc_feature (1)..(744): Ceres Seq. ID no. 12348192
  misc_feature (1)..(744): Ortholog of  Ceres SEQ ID NO 15224680 as cited in SEQ ID NO 59829
  misc_feature (1)..(744): Ortholog of  Ceres SEQ ID NO 13594273 as cited in SEQ ID NO 60013
acaatttgattttgacccgtcgcctgcctggccgcctcctagtcgtaatcccgccccgccgcctccccctctccggccttctccgctccgcgcgggcgccatgtcggtgacgctgcacacgaacctgggcgacatcaagtgcgaggtgttctgcgaccaggtgccgcgcacggcggagaacttcctggcgctctgcggcagcggctactacgacggcaccgtgttccaccgcaacatcaagggcttcatggtccagggcggcgaccccaccggcaccggcaagggcgggtcgtccatctggggcgccaagttcgcggacgagttgagggagtcgctcaagcacaacgcgcgcgggatcatgtcgatggccaacagcgggcccaacaccaacggcagccagttcttcatcacctacgccaagcagccgcacctcaacggtcactacaccgtgttcgccaaggtcatccacggcttcgaggtgctggacctcatggagaaggcgcagacgggacccggggacaggccgctcgccgagatcaggctcaaccgcgtcaccatccacgccaacccgctcgccgtctgaactcctcttcctaccgctctcccctccactcgctcctgtcctcatccaccgggatctgagcgtcatcagccttgctttcaaccgcaaaatcacgctttggtttcggaacatcaatctgtagctctctaattttataccgatgctgtgacatgtaacctttg

SEQ ID NO: 16641 - protein, 193 aa, Zea mays subsp. mays
  peptide (1)..(193): Ceres Seq. ID no. 12348193
QFDFDPSPAWPPPSRNPAPPPPPLRPSPLRAGAMSVTLHTNLGDIKCEVFCDQVPRTAENFLALCGSGYYDGTVFHRNIKGFMVQGGDPTGTGKGGSSIWGAKFADELRESLKHNARGIMSMANSGPNTNGSQFFITYAKQPHLNGHYTVFAKVIHGFEVLDLMEKAQTGPGDRPLAEIRLNRVTIHANPLAV

SEQ ID NO: 16642 - protein, 160 aa, Zea mays subsp. mays
  peptide (1)..(160): Ceres Seq. ID no. 12348194
MSVTLHTNLGDIKCEVFCDQVPRTAENFLALCGSGYYDGTVFHRNIKGFMVQGGDPTGTGKGGSSIWGAKFADELRESLKHNARGIMSMANSGPNTNGSQFFITYAKQPHLNGHYTVFAKVIHGFEVLDLMEKAQTGPGDRPLAEIRLNRVTIHANPLAV

SEQ ID NO: 16643 - protein, 111 aa, Zea mays subsp. mays
  peptide (1)..(111): Ceres Seq. ID no. 12348195
MVQGGDPTGTGKGGSSIWGAKFADELRESLKHNARGIMSMANSGPNTNGSQFFITYAKQPHLNGHYTVFAKVIHGFEVLDLMEKAQTGPGDRPLAEIRLNRVTIHANPLAV

SEQ ID NO: 16644 - DNA, 745 bp, Zea mays subsp. mays
  misc_feature (1)..(745): Ceres Seq. ID no. 12401848
  misc_feature (1)..(745): Ortholog of  Ceres SEQ ID NO 13595067 as cited in SEQ ID NO 55857
  misc_feature (1)..(745): Ortholog of  Ceres SEQ ID NO 12635516 as cited in SEQ ID NO 0
  misc_feature (1)..(745): Ortholog of  Ceres SEQ ID NO 15179376 as cited in SEQ ID NO 0
acctgctccattttatgcttctccctcgctcgccctcgccctcgccgcaacgctttgtgatagagtttctgtctgctaccagcaccacagcctagcaccccaccgcgtctagggttttctgctccaatggccgccgcgggggcagacggggagcgcaggatcggggtggccatcgactactcggagagcgccaagaaggcgctggactgggccatcgacaacctgctccaccacggggacaccctcgtcgtcgtccacgtcctgcaccacggcgcggaggagaccaagcacacgctctgggccaagtccggatccccgctgatccctctctccgagttccgggagcccgaggtgatgcagggctacggcgtgcgccccgacgccgaggtgctcgacgcgatcgacacggcagcgcgccagaagcagctgaaggtggtggcgaagctgtactggggcgacgccagggagaagctctgcgacgccgtcgaggacctcaggatcgattccctcgtcatgggtagtcgcggcctcggcccgatccagaggattctcctgggaagcgtgacaaactacgtgctgtcaaacgcatcgtgcccggtgacagtcgtcaaggggaagtagtggcctgggcagcgtgccagtgatatgaatgaagatgctagcgtgcagtttgtgtgggttatagctaaacactatgttccgtcttgttgctgcatttcaataaagcatgtgtcttctagatttc

SEQ ID NO: 16645 - protein, 164 aa, Zea mays subsp. mays
  peptide (1)..(164): Ceres Seq. ID no. 12401849
MAAAGADGERRIGVAIDYSESAKKALDWAIDNLLHHGDTLVVVHVLHHGAEETKHTLWAKSGSPLIPLSEFREPEVMQGYGVRPDAEVLDAIDTAARQKQLKVVAKLYWGDAREKLCDAVEDLRIDSLVMGSRGLGPIQRILLGSVTNYVLSNASCPVTVVKGK

SEQ ID NO: 16646 - protein, 88 aa, Zea mays subsp. mays
  peptide (1)..(88): Ceres Seq. ID no. 12401850
MQGYGVRPDAEVLDAIDTAARQKQLKVVAKLYWGDAREKLCDAVEDLRIDSLVMGSRGLGPIQRILLGSVTNYVLSNASCPVTVVKGK

SEQ ID NO: 16647 - DNA, 1106 bp, Zea mays subsp. mays
  misc_feature (1)..(1106): Ceres Seq. ID no. 12367566
  misc_feature (1)..(1106): Ortholog of  Ceres SEQ ID NO 15175425 as cited in SEQ ID NO 0
agaacagcagaggtgagaacgggagagcgaccccagcagacaagagacagacgagagagagcgagcaagccgagcatcgtgacctctctgtttctctctcttcccttctcgtcttctgcaagaagccagtgaccgtctctgtttctctcattccctttcatcactctgctggtctccctcttccacctctggccttggccatggcctccagcgcctcccggttcatcaagtgcgtcacagtgggggacggcgccgtgggaaagacctgcatgctcatctgctacaccagcaacaagttccccactgattacatacccactgtcttcgataacttcagtgcaaacgtggtagtcgacggtaccacggtgaatttgggcctttgggatactgcagggcaggaagattacaacagactgaggccactgagctaccgcggagcagatgtgttcgtgctcgccttctcgcttgtcagccgagctagctacgagaatgttatgaagaagtggctaccggagcttcagcattatgcaccgggtgtccccatagtgttggccggaactaaattggatcttcgtgaagacaggcactacttagttgaccatcctggtgcggtacctgttactacagcacagggggaggaactgcgcaagcacattggcgcaacttgctacatcgaatgcagctcaaaaactcagcagaatgtgaaagctgtgtttgatgctgccatcaaggtagtaatcaggcctccgacgaagcagcgagaaaggaagaaaaagaaagaacggcgaggatgctcaatattctgcagccgtatcatgcacgcaagaagactaggatgcttcaagtgatagaaggccttcttcgacgataacgtaggcttctaagatgaatcgagatcgtgtatagtttgtctccatgttccaaagtgctcgttgcgcttgtgcacttgggctggtaatgtgtatatttagtctttgccaattgatatttaggagaaatattaagcacttcgtttatgtaccattggctcataatgagctgggaagtccaatacatactaagaagtaacaatattttcttccgatgattttattatggtttctcgt

SEQ ID NO: 16648 - protein, 281 aa, Zea mays subsp. mays
  peptide (1)..(281): Ceres Seq. ID no. 12367567
NSRGENGRATPADKRQTRESEQAEHRDLSVSLSSLLVFCKKPVTVSVSLIPFHHSAGLPLPPLALAMASSASRFIKCVTVGDGAVGKTCMLICYTSNKFPTDYIPTVFDNFSANVVVDGTTVNLGLWDTAGQEDYNRLRPLSYRGADVFVLAFSLVSRASYENVMKKWLPELQHYAPGVPIVLAGTKLDLREDRHYLVDHPGAVPVTTAQGEELRKHIGATCYIECSSKTQQNVKAVFDAAIKVVIRPPTKQRERKKKKERRGCSIFCSRIMHARRLGCFK

SEQ ID NO: 16649 - protein, 215 aa, Zea mays subsp. mays
  peptide (1)..(215): Ceres Seq. ID no. 12367568
MASSASRFIKCVTVGDGAVGKTCMLICYTSNKFPTDYIPTVFDNFSANVVVDGTTVNLGLWDTAGQEDYNRLRPLSYRGADVFVLAFSLVSRASYENVMKKWLPELQHYAPGVPIVLAGTKLDLREDRHYLVDHPGAVPVTTAQGEELRKHIGATCYIECSSKTQQNVKAVFDAAIKVVIRPPTKQRERKKKKERRGCSIFCSRIMHARRLGCFK

SEQ ID NO: 16650 - protein, 192 aa, Zea mays subsp. mays
  peptide (1)..(192): Ceres Seq. ID no. 12367569
MLICYTSNKFPTDYIPTVFDNFSANVVVDGTTVNLGLWDTAGQEDYNRLRPLSYRGADVFVLAFSLVSRASYENVMKKWLPELQHYAPGVPIVLAGTKLDLREDRHYLVDHPGAVPVTTAQGEELRKHIGATCYIECSSKTQQNVKAVFDAAIKVVIRPPTKQRERKKKKERRGCSIFCSRIMHARRLGCFK

SEQ ID NO: 16651 - DNA, 1186 bp, Zea mays subsp. mays
  misc_feature (1)..(1186): Ceres Seq. ID no. 12383458
  misc_feature (1)..(1186): Ortholog of  Ceres SEQ ID NO 15178797 as cited in SEQ ID NO 1152
  misc_feature (1)..(1186): Ortholog of  Ceres SEQ ID NO 15175688 as cited in SEQ ID NO 60465
  misc_feature (1)..(1186): Ortholog of  Ceres SEQ ID NO 13495628 as cited in SEQ ID NO 60727
ctacgccaagcgcgcaattaaccctcactaaagggaacaaaagctggagctccaccgcggtggcggccgctctagaactagtggatcccccgggctgcaggaattcgcacgagaccattacctagaacatcctaatgaaaaaaaaacaagaagcccagaaaacaaaaggagcagcttcgattcgagatcgcggcgccatcgaccatgcagctcaagaatcgccgcgaagccgtgacggcgacagtgctcgtggccgtatcagtcctggcgaccctggcgcgcaccgacggcgccctctgcgacaagtccgacaaggcagccttgcttgccgtgaagtcggcgctgggcaacccactggcgctctccggctggaactccaccgtggcctgctgctcctgggagggcatctcctgcaacgccaccaccggccgcgtcaccgacctgaccgtcttcgcgctcaacatctcggcgccggtcccggccgccatcgccaacctcaccgcgctgcagagcgtcaacctggcctacaaccagctgtacggcagcatcccggcgttcctgggcccgcgcgcgctgccggacctcaccttcctccgcctcgacggcaaccggctctcgggcgccatcccgcccacggcgaccgtcttcaacctcctcctcgtcggcaaccgcctcacggggccgatcccggccgccttcgccggcgcggcgttcggcgacgtggagctctcggacaaccagctcacgggcgacgcgtcggcgctgttcggcgccgagaagccgctgaacgcgctgtccctgtcgcgcaaccggttcaggttcgacctcggccgcgtggagctgccggaggcgatggacatcctggagatcgaccacaacatggtgtacgggagcatcccggccgccgcggcggagaggaagtggctggcgttcgacgtcagctacaaccagctgtgcgggcccataccgcaggggcggtacacgcaccggttcggggccaagcacttcgctggcaacaagtgcctctgcggccgcccgctcccgccgtgcgcttattagaagaaggccggaacagtacattcatactagtataatagctttattattggaataatgatcctccgtgctgctgtactcgaacgttttgtaatcttgaagcgagccattattaagatatcctgtggcg

SEQ ID NO: 16652 - protein, 319 aa, Zea mays subsp. mays
  peptide (1)..(319): Ceres Seq. ID no. 12383459
MKKKQEAQKTKGAASIRDRGAIDHAAQESPRSRDGDSARGRISPGDPGAHRRRPLRQVRQGSLACREVGAGQPTGALRLELHRGLLLLGGHLLQRHHRPRHRPDRLRAQHLGAGPGRHRQPHRAAERQPGLQPAVRQHPGVPGPARAAGPHLPPPRRQPALGRHPAHGDRLQPPPRRQPPHGADPGRLRRRGVRRRGALGQPAHGRRVGAVRRREAAERAVPVAQPVQVRPRPRGAAGGDGHPGDRPQHGVREHPGRRGGEEVAGVRRQLQPAVRAHTAGAVHAPVRGQALRWQQVPLRPPAPAVRLLEEGRNSTFILV

SEQ ID NO: 16653 - protein, 284 aa, Zea mays subsp. mays
  peptide (1)..(284): Ceres Seq. ID no. 12383460
MQLKNRREAVTATVLVAVSVLATLARTDGALCDKSDKAALLAVKSALGNPLALSGWNSTVACCSWEGISCNATTGRVTDLTVFALNISAPVPAAIANLTALQSVNLAYNQLYGSIPAFLGPRALPDLTFLRLDGNRLSGAIPPTATVFNLLLVGNRLTGPIPAAFAGAAFGDVELSDNQLTGDASALFGAEKPLNALSLSRNRFRFDLGRVELPEAMDILEIDHNMVYGSIPAAAAERKWLAFDVSYNQLCGPIPQGRYTHRFGAKHFAGNKCLCGRPLPPCAY

SEQ ID NO: 16654 - DNA, 838 bp, Zea mays subsp. mays
  misc_feature (1)..(838): Ceres Seq. ID no. 12402762
  misc_feature (1)..(838): Ortholog of  Ceres SEQ ID NO 12589616 as cited in SEQ ID NO 1339
  misc_feature (1)..(838): Ortholog of  Ceres SEQ ID NO 14301952 as cited in SEQ ID NO 0
tcctcagcatttcagcacccagttcggcgttgcacatgtgacccgggcacccggcccccagcccccagctcccgaccatttctgcacatctacagctcgcgagctcagcaccagaacacgccaggccagcccaacctctccaagaacccaagcagcagcccccgaccgaccggccatgccaagggccatcggcggtggtgcggcctacaagggcggaatcaagggctactggaagcgccgcggctacgaccggatcgacgcggccgcggcgcagcgccgcccgcgcctccctacagcggagcttggcggcggcgaggcgcatcctcagccagcgggtcgtcggcgccgccgcgggtggcgcgttcgccggcgagcgggcgtcctcggccggcgcctcctccgcgcgctctccccgcggcggctgctggcgcggctccgcgacgcctacgtgaacgccatgctccgcctcgcgtcctccgccgccgtggccggntacggcggcgccgggccctactgcaccgccgccgacccgttcgcccggccgcgcccgctcaccagggagtacgacgagaaggcgctcgtcgagatctacaggtccatcctcgcgcgcggcgaggccgggccagtggtcgccgccgcgcggctgcncgcggtgctctgaggagctgatgacgacggggacggacgggcgctggcacgcacgcgcgctgggagcctggccggccctntggcgcgctccgtctactctccttgcctcatgcaaggctcgtgtacgctagaatctcgctttcatgtagcgcacagaatttgcatgtcggatgaaaagtttcaggtggtc

SEQ ID NO: 16655 - protein, 222 aa, Zea mays subsp. mays
  peptide (1)..(222): Ceres Seq. ID no. 12402763
  misc_feature (165)..(165): Xaa is any aa, unknown or other
  misc_feature (216)..(216): Xaa is any aa, unknown or other
SSAFQHPVRRCTCDPGTRPPAPSSRPFLHIYSSRAQHQNTPGQPNLSKNPSSSPRPTGHAKGHRRWCGLQGRNQGLLEAPRLRPDRRGRGAAPPAPPYSGAWRRRGASSASGSSAPPRVARSPASGRPRPAPPPRALPAAAAGAAPRRLRERHAPPRVLRRRGRXRRRRALLHRRRPVRPAAPAHQGVRREGARRDLQVHPRARRGRASGRRRAAXRGALRS

SEQ ID NO: 16656 - protein, 219 aa, Zea mays subsp. mays
  peptide (1)..(219): Ceres Seq. ID no. 12402764
  misc_feature (164)..(164): Xaa is any aa, unknown or other
  misc_feature (216)..(216): Xaa is any aa, unknown or other
PQHFSTQFGVAHVTRAPGPQPPAPDHFCTSTARELSTRTRQASPTSPRTQAAAPDRPAMPRAIGGGAAYKGGIKGYWKRRGYDRIDAAAAQRRPRLPTAELGGGEAHPQPAGRRRRRGWRVRRRAGVLGRRLLRALSPRRLLARLRDAYVNAMLRLASSAAVAXYGGAGPYCTAADPFARPRPLTREYDEKALVEIYRSILARGEAGPVVAAARLXAVL

SEQ ID NO: 16657 - protein, 161 aa, Zea mays subsp. mays
  peptide (1)..(161): Ceres Seq. ID no. 12402765
  misc_feature (106)..(106): Xaa is any aa, unknown or other
  misc_feature (158)..(158): Xaa is any aa, unknown or other
MPRAIGGGAAYKGGIKGYWKRRGYDRIDAAAAQRRPRLPTAELGGGEAHPQPAGRRRRRGWRVRRRAGVLGRRLLRALSPRRLLARLRDAYVNAMLRLASSAAVAXYGGAGPYCTAADPFARPRPLTREYDEKALVEIYRSILARGEAGPVVAAARLXAVL

SEQ ID NO: 16658 - DNA, 754 bp, Zea mays subsp. mays
  misc_feature (1)..(754): Ceres Seq. ID no. 13498134
  misc_feature (1)..(754): Ortholog of  Ceres SEQ ID NO 12610286 as cited in SEQ ID NO 55827
agcgccaacggccaacctcacgcagtcccgccgcatcgaatggcatccctccggcttgtggcaacgctagcgccctccggtcctccgccgccacctcgacgtaagcagcggagaccgtcctccgcagtccgtctgacaggtgggatgggcctggcggcagctgctgccgtggcggcggccgcggccgcctcaccaccggcgctcgccgcgctgtccgagccggcgaacgcgctctcgctgcccacctgggccgtccacgtctccagcgtcgccgagtgggtgacggcgatgtggctggtttgggactacggcgagaagacggggctcaagggttggaaaggcctctcgtgggggatggttccacttctaggtggagcaatgtgtgcttgcacgtggcatttcttctacaattcagagtctcttgaagttcttgtagcccttcaaggtgctctgacagtgattggtaacataacaatgtgcatagctgcataccgcatcttcaaagcatcccaggaaggctcaaaaacttcgtaggctgcaagattggatcttacagccggtttggcaaggtgatgagatatggagcttgcgtttctctgacatggatgagaatggagaactatttgattgttgtttttttttttggcccattagataaaagtttattggaaaggacaacctttcacagcaatatgcatcctctgctgtagtattatttctcaggggccaagataaaagacaatgtctggaactc

SEQ ID NO: 16659 - protein, 177 aa, Zea mays subsp. mays; identical to SEQ ID NO: 14700
  peptide (1)..(177): Ceres Seq. ID no. 13498135

SEQ ID NO: 16660 - protein, 164 aa, Zea mays subsp. mays; identical to SEQ ID NO: 14701
  peptide (1)..(164): Ceres Seq. ID no. 13498136

SEQ ID NO: 16661 - protein, 129 aa, Zea mays subsp. mays; identical to SEQ ID NO: 14702
  peptide (1)..(129): Ceres Seq. ID no. 13498137

SEQ ID NO: 16662 - DNA, 753 bp, Zea mays subsp. mays
  misc_feature (1)..(753): Ceres Seq. ID no. 12402061
  misc_feature (1)..(753): Ortholog of  Ceres SEQ ID NO 14316118 as cited in SEQ ID NO 52391
  misc_feature (1)..(753): Ortholog of  Ceres SEQ ID NO 13664032 as cited in SEQ ID NO 67527
acaagcacaaagagaggccccgaccgcgatggatcgtcagcgacagaccgaccgtgacacagccaacaactaacacgcacgcgcgcgagagagaaagagagctgcccgggagagagagagagaggaaatcaaacgaaggcgacgacgtacggagacggcatggccgatcaccaccaccaccaccaccacgggcatccgccggacgggcccggcggcgcgggggaccagctggaggtaatcaaggagcaggaccggctgctgcccatcgccaacgtcggccgcatcatgaagcagatcctgccgcccaacgccaagatctccaaggaggccaaggagacgatgcaggagtgcgtgtccgagttcatcagcttcgtcacgggcgaggcctccgacaagtgccacaaggagaagcgcaagaccgtcaacggcgacgacgtctgctgcgccttcggcgcgctcggcttcgacgactacgtcgaccccatgcgcaggtacctgcacaagtaccgcgagctcgagggcgaccgcgccgcgtcctcccgcggcggaggcggaggcggaccggccggcgccggagaccccgcgtccgcctcggccgccgccggtcccagccccagcgccgcatcagccggtcatttcatgttcggcgccgccatggaccggcccgacaacaactcatccgccggcgccaggcccttttaatccatccttcctcatcttgcttgttattattcatcagattcagatcaacaa

SEQ ID NO: 16663 - protein, 250 aa, Zea mays subsp. mays
  peptide (1)..(250): Ceres Seq. ID no. 12402062
KHKERPRPRWIVSDRPTVTQPTTNTHARERERELPGRERERKSNEGDDVRRRHGRSPPPPPPRASAGRARRRGGPAGGNQGAGPAAAHRQRRPHHEADPAAQRQDLQGGQGDDAGVRVRVHQLRHGRGLRQVPQGEAQDRQRRRRLLRLRRARLRRLRRPHAQVPAQVPRARGRPRRVLPRRRRRRTGRRRRPRVRLGRRRSQPQRRISRSFHVRRRHGPARQQLIRRRQALLIHPSSSCLLLFIRFRST

SEQ ID NO: 16664 - protein, 180 aa, Zea mays subsp. mays
  peptide (1)..(180): Ceres Seq. ID no. 12402063
MADHHHHHHHGHPPDGPGGAGDQLEVIKEQDRLLPIANVGRIMKQILPPNAKISKEAKETMQECVSEFISFVTGEASDKCHKEKRKTVNGDDVCCAFGALGFDDYVDPMRRYLHKYRELEGDRAASSRGGGGGGPAGAGDPASASAAAGPSPSAASAGHFMFGAAMDRPDNNSSAGARPF

SEQ ID NO: 16665 - protein, 138 aa, Zea mays subsp. mays
  peptide (1)..(138): Ceres Seq. ID no. 12402064
MKQILPPNAKISKEAKETMQECVSEFISFVTGEASDKCHKEKRKTVNGDDVCCAFGALGFDDYVDPMRRYLHKYRELEGDRAASSRGGGGGGPAGAGDPASASAAAGPSPSAASAGHFMFGAAMDRPDNNSSAGARPF

SEQ ID NO: 16666 - DNA, 854 bp, Zea mays subsp. mays; identical to SEQ ID NO: 6368
  misc_feature (1)..(854): Ceres Seq. ID no. 12409092
  misc_feature (1)..(854): Ortholog of  Ceres SEQ ID NO 13594809 as cited in SEQ ID NO 51847
  misc_feature (1)..(854): Ortholog of  Ceres SEQ ID NO 12563124 as cited in SEQ ID NO 57104
  misc_feature (1)..(854): Ortholog of  Ceres SEQ ID NO 15226273 as cited in SEQ ID NO 64934
  misc_feature (1)..(854): Ortholog of  Ceres SEQ ID NO 12617639 as cited in SEQ ID NO 65219
  misc_feature (1)..(854): Ortholog of  Ceres SEQ ID NO 15173998 as cited in SEQ ID NO 0
  misc_feature (1)..(854): Ortholog of  Ceres SEQ ID NO 15178333 as cited in SEQ ID NO 0

SEQ ID NO: 16667 - protein, 156 aa, Zea mays subsp. mays; identical to SEQ ID NO: 6369
  peptide (1)..(156): Ceres Seq. ID no. 12409093

SEQ ID NO: 16668 - protein, 122 aa, Zea mays subsp. mays; identical to SEQ ID NO: 6370
  peptide (1)..(122): Ceres Seq. ID no. 12409094

SEQ ID NO: 16669 - protein, 96 aa, Zea mays subsp. mays; identical to SEQ ID NO: 6371
  peptide (1)..(96): Ceres Seq. ID no. 12409095

SEQ ID NO: 16670 - DNA, 842 bp, Zea mays subsp. mays
  misc_feature (1)..(842): Ceres Seq. ID no. 12402057
  misc_feature (1)..(842): Ortholog of  Ceres SEQ ID NO 12606053 as cited in SEQ ID NO 20448
acaagccacgctctccgcttgtggctaagctgctgcacgcgcggaccgacaaaaatccagcactagccaaagcacaggcgaagcagcagcagcgagaggccaccacaaacatggcgaccacggcgtttttacccccggccaagctgccgctgcaggggcgtcggttcgctagccccaaaacggcgggacgtatcagtgtcagggtccctccggcgcgagcgcagcaagagcagcaggtgaaggaggaggaggccgaggcggcgagcgtgccgccgccgcaggccgcggagaaggaggcgaggaagggggacgcgcagtccctgccgcggcagcctttggcggagagcaagaacatgagccgcgagtacggcgggcagtggctgagcagcaccacgcggcacgtccgcatctacgctgcgtacatcgacccggtgaccaacgcgttcgaccagacgcagatggacaagctgacgctcatgctcgacccccaggacgagttcgcctggaccgacgaggcctgccagatggtcttcaacgagttccaggacctcgtcgatcactacgagggggctgagctgtcggagtacacacttcggttgatcgggtcagaccttgagcactacatccgcaaactactgtacgacggggtgatcaagtacaacatgaggtccagagtcctcaatttcagcatgggcaaacctcgcatcaagttcaacagcaaccagataccagaaaaaatatagaatgtacttatccaacaccctgaaaagaatggtttctctccattctattaccgagcaagatgtatactctgcagtcccaaatacgatccagagcattcc

SEQ ID NO: 16671 - protein, 246 aa, Zea mays subsp. mays
  peptide (1)..(246): Ceres Seq. ID no. 12402058
KPRSPLVAKLLHARTDKNPALAKAQAKQQQREATTNMATTAFLPPAKLPLQGRRFASPKTAGRISVRVPPARAQQEQQVKEEEAEAASVPPPQAAEKEARKGDAQSLPRQPLAESKNMSREYGGQWLSSTTRHVRIYAAYIDPVTNAFDQTQMDKLTLMLDPQDEFAWTDEACQMVFNEFQDLVDHYEGAELSEYTLRLIGSDLEHYIRKLLYDGVIKYNMRSRVLNFSMGKPRIKFNSNQIPEKI

SEQ ID NO: 16672 - protein, 210 aa, Zea mays subsp. mays
  peptide (1)..(210): Ceres Seq. ID no. 12402059
MATTAFLPPAKLPLQGRRFASPKTAGRISVRVPPARAQQEQQVKEEEAEAASVPPPQAAEKEARKGDAQSLPRQPLAESKNMSREYGGQWLSSTTRHVRIYAAYIDPVTNAFDQTQMDKLTLMLDPQDEFAWTDEACQMVFNEFQDLVDHYEGAELSEYTLRLIGSDLEHYIRKLLYDGVIKYNMRSRVLNFSMGKPRIKFNSNQIPEKI

SEQ ID NO: 16673 - protein, 129 aa, Zea mays subsp. mays
  peptide (1)..(129): Ceres Seq. ID no. 12402060
MSREYGGQWLSSTTRHVRIYAAYIDPVTNAFDQTQMDKLTLMLDPQDEFAWTDEACQMVFNEFQDLVDHYEGAELSEYTLRLIGSDLEHYIRKLLYDGVIKYNMRSRVLNFSMGKPRIKFNSNQIPEKI

SEQ ID NO: 16674 - DNA, 520 bp, Zea mays subsp. mays
  misc_feature (1)..(520): Ceres Seq. ID no. 12588730
  misc_feature (1)..(520): Ortholog of  Ceres SEQ ID NO 13493536 as cited in SEQ ID NO 58515
  misc_feature (1)..(520): Ortholog of  Ceres SEQ ID NO 15225741 as cited in SEQ ID NO 59606
  misc_feature (1)..(520): Ortholog of  Ceres SEQ ID NO 12618461 as cited in SEQ ID NO 64349
accgagagtggcagtggagtagtggtaggaaaagctcgtcgccgagtcgccgtacgggggctcggctcgggtgagcgagcggcggccggcgggtactgaggcctgagggcgaggcgatgggccgcctccgtgacgggcgagccttcctccaccgcgcgcttgtcctctcgtcgctgctccttctcgcctccggcgaaatcttcttcgaggaacggttcgatgatgggtgggatagccgctgggtgaaatctgattggaagaagagccaaggacaagctggaaccttccgacacacagcgggaacctactctggagaccctgacgataaaggtatacaaacaactggggatgccaaacattttgctatatcagcaaaattcccacaatttagtaacaaggaccggacattggttatccagtactctctaaagattgaacaagatattgaatgcggtggtgcttacatcaaacttatgtctggttaatctcaaccagaagaatttggtggcgacactcctta

SEQ ID NO: 16675 - protein, 122 aa, Zea mays subsp. mays
  peptide (1)..(122): Ceres Seq. ID no. 12588731
MGRLRDGRAFLHRALVLSSLLLLASGEIFFEERFDDGWDSRWVKSDWKKSQGQAGTFRHTAGTYSGDPDDKGIQTTGDAKHFAISAKFPQFSNKDRTLVIQYSLKIEQDIECGGAYIKLMSG

SEQ ID NO: 16676 - DNA, 1501 bp, Zea mays subsp. mays
  misc_feature (1)..(1501): Ceres Seq. ID no. 12362343
  misc_feature (1)..(1501): Ortholog of  Ceres SEQ ID NO 13598579 as cited in SEQ ID NO 65523
aaggtcggcttccacatctctctcattctcgtctccccccactgctagctgctgcagctctcaagctagctggcagctagggtttacaccgatccggggtccggtcgccgccggccggcggaagcgggcaatcgagctccgcgacgtcgagatctgcttaattgctaggtggtcgccgcgccggcagccccggcacagagaaagtcaattgctctttgcaggggttgctgctcgttttaaaagagatcctctagccagcagggacaccgcgagatggcgggcgccgtcgggctaacaagacgatgataaggggcggcaaccaccagcaggcggcggacgtcgaggaggagctagcccggaacagcaggcacgccgccgccgtggcgacgtcgcggcaatggtcggcgcagacggagtcgcgcatcgtgcgcgtctcccgcgtcttcggcggcaaggaccgccacagcaaggtgaagaccgtcaagggcctgcgcgaccggcgggtgcgcctctccgtgccgacggcgatccagctctacgacctgcaggaccgcctcggcctcaaccagcctagcaaggtcgtcgactggctgctcaacgccgcgcgccacgagatcgacaagctgccgccgctgcagttcccgccgcaggacctcatggttgggcacctgacgccccacaacatgccgctgatggtgcacgacgagaagttcggacacctcgccgcggccgcggcgctcgcgagcggcggcggcggcggcgccaaggtcagccagcagggcaacgtcgtcgacgtcgacgggaccggagcccaccacttggtggggaggttccccggcggctaccaccggttcatggagctgaacagcgcgttgggcatggtcagtggcgcaatggcgccgccgtataacaacaactacaccggagaggcatggaataacagcggcggcggcgtgcatgacagcggctcgccgcagatcgtcgccgcagccgctcaccactcgccgttcccatcgttgctctccttggctccacgtccgcatcagctggcgttctactcctcggaagctgatcagcagtttcaggtggagaaccttggctcgcaaagcctgtccttgagctcggcgagggcttaccatgatcaggctagctagcggactgcgtactggaacgactcttcgatcgagattaaggtagcaataatgctcactgatcccaaaattcccaagtacaatatactatctagctgtgcaagagtgtgcatgtcagagtttccaagtgccttttaaggatcggatcggaggcagttaagcttgtgatgatttcataattagtagtagacctgaaacagaataaaatgtgcggggcttgatcttgaagcgtacgtgtgtgtgccatacgaatttgttacttctttcaatacacaaaggagtaatattaatctgtatgctggcttgtagaataacaatatatggtttgctaatattacggttttagttat

SEQ ID NO: 16677 - protein, 283 aa, Zea mays subsp. mays
  peptide (1)..(283): Ceres Seq. ID no. 12362344
MIRGGNHQQAADVEEELARNSRHAAAVATSRQWSAQTESRIVRVSRVFGGKDRHSKVKTVKGLRDRRVRLSVPTAIQLYDLQDRLGLNQPSKVVDWLLNAARHEIDKLPPLQFPPQDLMVGHLTPHNMPLMVHDEKFGHLAAAAALASGGGGGAKVSQQGNVVDVDGTGAHHLVGRFPGGYHRFMELNSALGMVSGAMAPPYNNNYTGEAWNNSGGGVHDSGSPQIVAAAAHHSPFPSLLSLAPRPHQLAFYSSEADQQFQVENLGSQSLSLSSARAYHDQAS

SEQ ID NO: 16678 - protein, 165 aa, Zea mays subsp. mays
  peptide (1)..(165): Ceres Seq. ID no. 12362345
MVGHLTPHNMPLMVHDEKFGHLAAAAALASGGGGGAKVSQQGNVVDVDGTGAHHLVGRFPGGYHRFMELNSALGMVSGAMAPPYNNNYTGEAWNNSGGGVHDSGSPQIVAAAAHHSPFPSLLSLAPRPHQLAFYSSEADQQFQVENLGSQSLSLSSARAYHDQAS

SEQ ID NO: 16679 - protein, 156 aa, Zea mays subsp. mays
  peptide (1)..(156): Ceres Seq. ID no. 12362346
MPLMVHDEKFGHLAAAAALASGGGGGAKVSQQGNVVDVDGTGAHHLVGRFPGGYHRFMELNSALGMVSGAMAPPYNNNYTGEAWNNSGGGVHDSGSPQIVAAAAHHSPFPSLLSLAPRPHQLAFYSSEADQQFQVENLGSQSLSLSSARAYHDQAS

SEQ ID NO: 16680 - DNA, 1599 bp, Zea mays subsp. mays
  misc_feature (1)..(1599): Ceres Seq. ID no. 12366495
  misc_feature (1)..(1599): Ortholog of  Ceres SEQ ID NO 14306569 as cited in SEQ ID NO 53008
  misc_feature (1)..(1599): Ortholog of  Ceres SEQ ID NO 14304855 as cited in SEQ ID NO 53974
gcacgagaccattacctagaacatcctaatcgaaaaagctcagccgtcctgcatctggcgccggtgcaggcaatgaacacatatcacccccggatcacggacagacagctgaggaaagtgatgcgagggaagactacccggcaatggctactaccacgccagcagaggacgggtacagctggaggaagtacggacagaagcaggtgaagcacagcgagtacccgcgtagctacttcaagtgcacgcatcccaactgcctggtgaagaagaaggtcgagcgctcgcacgaggggcacatcacggagatcatctacaagggcgcgcacaaccacccgaagcccacgcagagccgccgtccaggcgtccagcccgtgcacccgtttggcgacagtgcgcaggcggacgcagccgacaacctggggtcacaggcaaacgcagtggacgccaaccagccgaggcgtgcgggtgttcaggatggcatggacgcgacgtcgtcgccctcagttcccattgagcgctgtgactcgccggcctcgatgcaggtcgactcggcagccccggtttggatcccccgagggcgcggatgtgacgtctgtgtccgacgaggtgggcggggacgacagggtgactcgtggcagtatgtctcagggcggtgccgacgcggagggtgacgagctggaatgtaaacgaaggaagctggagtcgtacgccatcgatatgagcaccgcgtcgagagctgttcgcgagcctcgcgtggtgatccagacgacgagcgaggtggacatcctagatgacggctaccgctggcgcaagtacggccagaaggtcgtcaagggcaacccgaatccaaggagctactacaagtgcacgtacccgggctgcgtggtgcggaagcacgtggagcgcgcgtcgcacgacctcaagtccgtgatcaccacgtacgagggcaggcacaaccacgaggtccccgccgccaggaacagcggccacccgggcaccgcggcggcgacaggcgcgggtggcccgcgcaggctggagcacccgtcgctgcgcgacggcctgatggggcacttgggcggctgcggcgtgccgttcggcctgccgccgcctagggatccgctggcgccgatgggcaattacccgacgtatgcctcctccattccccttggcggcgccggccccacgtcactgccgagcctgccggtgccggcggggaccctcancgccgtcgatgggctgaagctcccgatgctggcgccgtcgtccctgcagcagcacccgctgctgaggcaccggcaggcgatgcaggccgctggcctcgtggcgcccaaggacgacgtgaaggtcgagggcaacgttgccggcggcgctgccccgtcggtgtaccagcagatgatgtgcagcgggctgcggttgcgccagcagatgtagatacataaataaatgtggagaggattagtgattctcaagttattagtttcttaccagtcgtattaggatgagttcgtgataattgttataacgtgggaacaaacacccgttgctttctgtttttttttcacccttccacttcatttttagctcagcaactatttattt

SEQ ID NO: 16681 - protein, 318 aa, Zea mays subsp. mays
  peptide (1)..(318): Ceres Seq. ID no. 12366496
  misc_feature (250)..(250): Xaa is any aa, unknown or other
MAWTRRRRPQFPLSAVTRRPRCRSTRQPRFGSPEGADVTSVSDEVGGDDRVTRGSMSQGGADAEGDELECKRRKLESYAIDMSTASRAVREPRVVIQTTSEVDILDDGYRWRKYGQKVVKGNPNPRSYYKCTYPGCVVRKHVERASHDLKSVITTYEGRHNHEVPAARNSGHPGTAAATGAGGPRRLEHPSLRDGLMGHLGGCGVPFGLPPPRDPLAPMGNYPTYASSIPLGGAGPTSLPSLPVPAGTLXAVDGLKLPMLAPSSLQQHPLLRHRQAMQAAGLVAPKDDVKVEGNVAGGAAPSVYQQMMCSGLRLRQQM

SEQ ID NO: 16682 - protein, 263 aa, Zea mays subsp. mays
  peptide (1)..(263): Ceres Seq. ID no. 12366497
  misc_feature (195)..(195): Xaa is any aa, unknown or other
MSQGGADAEGDELECKRRKLESYAIDMSTASRAVREPRVVIQTTSEVDILDDGYRWRKYGQKVVKGNPNPRSYYKCTYPGCVVRKHVERASHDLKSVITTYEGRHNHEVPAARNSGHPGTAAATGAGGPRRLEHPSLRDGLMGHLGGCGVPFGLPPPRDPLAPMGNYPTYASSIPLGGAGPTSLPSLPVPAGTLXAVDGLKLPMLAPSSLQQHPLLRHRQAMQAAGLVAPKDDVKVEGNVAGGAAPSVYQQMMCSGLRLRQQM

SEQ ID NO: 16683 - protein, 237 aa, Zea mays subsp. mays
  peptide (1)..(237): Ceres Seq. ID no. 12366498
  misc_feature (169)..(169): Xaa is any aa, unknown or other
MSTASRAVREPRVVIQTTSEVDILDDGYRWRKYGQKVVKGNPNPRSYYKCTYPGCVVRKHVERASHDLKSVITTYEGRHNHEVPAARNSGHPGTAAATGAGGPRRLEHPSLRDGLMGHLGGCGVPFGLPPPRDPLAPMGNYPTYASSIPLGGAGPTSLPSLPVPAGTLXAVDGLKLPMLAPSSLQQHPLLRHRQAMQAAGLVAPKDDVKVEGNVAGGAAPSVYQQMMCSGLRLRQQM

SEQ ID NO: 16684 - DNA, 1614 bp, Zea mays subsp. mays
  misc_feature (1)..(1614): Ceres Seq. ID no. 12374652
  misc_feature (1)..(1614): Ortholog of  Ceres SEQ ID NO 13594345 as cited in SEQ ID NO 58043
  misc_feature (1)..(1614): Ortholog of  Ceres SEQ ID NO 12614112 as cited in SEQ ID NO 60891
  misc_feature (1)..(1614): Ortholog of  Ceres SEQ ID NO 14302832 as cited in SEQ ID NO 64926
  misc_feature (1)..(1614): Ortholog of  Ceres SEQ ID NO 13597678 as cited in SEQ ID NO 65375
  misc_feature (1)..(1614): Ortholog of  Ceres SEQ ID NO 13662880 as cited in SEQ ID NO 65422
  misc_feature (1)..(1614): Ortholog of  Ceres SEQ ID NO 13596180 as cited in SEQ ID NO 67941
  misc_feature (1)..(1614): Ortholog of  Ceres SEQ ID NO 13596089 as cited in SEQ ID NO 68373
aaaggccacgggtgcgctgtccactttgcaggcaagctcacggcctcacgtgaggccgacgaagtcgtagcagagatccgatacatgggagaggaagagggcgcgcccaccgtggcagcagcggcagagagcgctccgccgcacctgctcctgatatgcttcccggggcagggccacgtgaacccgatgctccgcctggccaagcgcatcgcggccaagggcctcctggtgaccttctcctcgatctccagagtcggggcgatgctcgccgcgtccgtgggcgtgtcggccggcggtgacggcgtgcctgtgggccggggccgcgtccggttcgagttcatggacgatgaagaccccgggcctgacctggacgacctcttgcggcacctcgcgaaggacggcccgccggcgtttgccgagctgctggagcggcaggcggacgccgggcggcctgtggcgtgcgtggtggtaaacccgttcatgccgtgggcggtcgacgtggccgccgacgcggggatcccttcggcggtgctgtgggtgcagtcgtgcgcggtgttctccctctactaccaccacgtgcacggcctcgtggagttccctcccgaggacgacctggacgcgcggttcacgctgcctggcctccccgagatgtccgtcgccgacgttccgtcgttcctgctcccgtccaacccgtacaagctgctggtggacgcgatcatcgcccagttccacaccatcgaccgcgcgtcgtgggtgctcgtcaactccttcacggagctggaacccgacgtggcggcggcgctcccgggcgtgacgccgcggccgccagagctcatccccgtgggcccgctcatcgaggtcgacgagcagcacgacggcgacggcgacggcgcggggtcgggcgcggtgcgtggcgacctgatgaaggccgcggacgactgcgtggagtggctagacgcgcaggcgccgcgctccatggtgtacgcatcggtgggcagcgtggtacggctcaacgcggaggaggtgggcgagatggcgcacgggctcgcgtccacggggcggcccttcctgtgggttgtccgtcccgatacccgggccgctcctcccagagggattcctggactccgtggccgggcgcggcacggtggtgccgtggagcccccaggaccgcgtgctggcgcacccgtccatcgcctgcttcctgacgcactgcggctggaactctaccctggagaccatcgcagcgggcgtaccagtggtggccttcccgcagtggggcgaccagttgcactgacgccaagttcctggtggaggaactcaggattggggtccgcctccgcgggccgctgcggcgggacgccgtgcgggaggcggtagacgccgccgtggcggggcccgaggccgacgcgatgctcgccaacgccaggaggtggagcgcggcggcgcgggaggccgtggcgctcggcgggtcctcggacgcgcatatccaagcgttcgtggacgaggtggcccggcgagcatgtgtcgtgccgccgtcgtcagagattcctagtcctagttgaggtcgaggagcttcagcagtcaccctcaccggacaaagtgagtcgaaagctg

SEQ ID NO: 16685 - protein, 458 aa, Zea mays subsp. mays
  peptide (1)..(458): Ceres Seq. ID no. 12374653
KGHGCAVHFAGKLTASREADEVVAEIRYMGEEEGAPTVAAAAESAPPHLLLICFPGQGHVNPMLRLAKRIAAKGLLVTFSSISRVGAMLAASVGVSAGGDGVPVGRGRVRFEFMDDEDPGPDLDDLLRHLAKDGPPAFAELLERQADAGRPVACVVVNPFMPWAVDVAADAGIPSAVLWVQSCAVFSLYYHHVHGLVEFPPEDDLDARFTLPGLPEMSVADVPSFLLPSNPYKLLVDAIIAQFHTIDRASWVLVNSFTELEPDVAAALPGVTPRPPELIPVGPLIEVDEQHDGDGDGAGSGAVRGDLMKAADDCVEWLDAQAPRSMVYASVGSVVRLNAEEVGEMAHGLASTGRPFLWVVRPDTRAAPPRGIPGLRGRARHGGAVEPPGPRAGAPVHRLLPDALRLELYPGDHRSGRTSGGLPAVGRPVALTPSSWWRNSGLGSASAGRCGGTPCGRR

SEQ ID NO: 16686 - protein, 430 aa, Zea mays subsp. mays
  peptide (1)..(430): Ceres Seq. ID no. 12374654
MGEEEGAPTVAAAAESAPPHLLLICFPGQGHVNPMLRLAKRIAAKGLLVTFSSISRVGAMLAASVGVSAGGDGVPVGRGRVRFEFMDDEDPGPDLDDLLRHLAKDGPPAFAELLERQADAGRPVACVVVNPFMPWAVDVAADAGIPSAVLWVQSCAVFSLYYHHVHGLVEFPPEDDLDARFTLPGLPEMSVADVPSFLLPSNPYKLLVDAIIAQFHTIDRASWVLVNSFTELEPDVAAALPGVTPRPPELIPVGPLIEVDEQHDGDGDGAGSGAVRGDLMKAADDCVEWLDAQAPRSMVYASVGSVVRLNAEEVGEMAHGLASTGRPFLWVVRPDTRAAPPRGIPGLRGRARHGGAVEPPGPRAGAPVHRLLPDALRLELYPGDHRSGRTSGGLPAVGRPVALTPSSWWRNSGLGSASAGRCGGTPCGRR

SEQ ID NO: 16687 - protein, 396 aa, Zea mays subsp. mays
  peptide (1)..(396): Ceres Seq. ID no. 12374655
MLRLAKRIAAKGLLVTFSSISRVGAMLAASVGVSAGGDGVPVGRGRVRFEFMDDEDPGPDLDDLLRHLAKDGPPAFAELLERQADAGRPVACVVVNPFMPWAVDVAADAGIPSAVLWVQSCAVFSLYYHHVHGLVEFPPEDDLDARFTLPGLPEMSVADVPSFLLPSNPYKLLVDAIIAQFHTIDRASWVLVNSFTELEPDVAAALPGVTPRPPELIPVGPLIEVDEQHDGDGDGAGSGAVRGDLMKAADDCVEWLDAQAPRSMVYASVGSVVRLNAEEVGEMAHGLASTGRPFLWVVRPDTRAAPPRGIPGLRGRARHGGAVEPPGPRAGAPVHRLLPDALRLELYPGDHRSGRTSGGLPAVGRPVALTPSSWWRNSGLGSASAGRCGGTPCGRR

SEQ ID NO: 16688 - DNA, 1108 bp, Zea mays subsp. mays
  misc_feature (1)..(1108): Ceres Seq. ID no. 12374780
  misc_feature (1)..(1108): Ortholog of  Ceres SEQ ID NO 13580204 as cited in SEQ ID NO 0
ccgtctccctcctatcgcactcgcgtctctttcctattcgcgccgccgccgctgctgcaagcgccagctcgccgtcgtccgaatagtacactctaacgccgccatggggcgtatgcacagccgcgggaagggtatctcgtcgtcggcgctgccgtacaagaggacgcctcctacctggctgaagaccgccgcctccgacgtgagagccgtctcctctccttcgactccattccattcggccgtcgtctggttcgttattgttgggaatgcggatttggttcgttgacgtgtgttctcgcctggtaggtggaggagatgatcacaaaggcagcgaagaagggacagatgccgtcgcagatcggcgtcctgctccgtgaccagcacggtatcccccttgtcaagagtgtcaccggcagcaaaatcctccgcatcctcaaggcccatgggctggcacccgaaatcccggaggacctgtacttcctcatcaagaaggcggtggcgataaggaagcaccttgagaggaacaggaaggacaaagactctaaattcaggctcattcttgtcgagagcaggatccaccgccttgcccgctactacaagcgcacaaagaagcttccacccacgtggaagtacgagtcaaccactgcaagcactctggtggcctaagcgaggagctcagcgtacggcgcttgaagccgagggcattgttggaaatcatttttatgtaccgttttaagagtttggagtgaactagagatggtgaatgtccctcctctggaggatgccatggaccctttttgtttacatagaactgccctgctgttaaacctttgctacttggcgaaggcagttgattgcttgcctccattaacacctgctatgcgagaagcttttagccttgggctgtcgggcagagggactcctaaatgtatgatgtcaaaagcgcacccctagatctgtcagttgcttcgtatacatgtacgtggctgtgtagcttgtgcctgcagcagtgttcgtgtgacatcatccagggcaggacctttccgttggacacccctgacatgatcaacagtatttaaaagccatgttgcggcctatgagcctgttt

SEQ ID NO: 16689 - protein, 116 aa, Zea mays subsp. mays
  peptide (1)..(116): Ceres Seq. ID no. 12374781
MITKAAKKGQMPSQIGVLLRDQHGIPLVKSVTGSKILRILKAHGLAPEIPEDLYFLIKKAVAIRKHLERNRKDKDSKFRLILVESRIHRLARYYKRTKKLPPTWKYESTTASTLVA

SEQ ID NO: 16690 - protein, 106 aa, Zea mays subsp. mays
  peptide (1)..(106): Ceres Seq. ID no. 12374782
MPSQIGVLLRDQHGIPLVKSVTGSKILRILKAHGLAPEIPEDLYFLIKKAVAIRKHLERNRKDKDSKFRLILVESRIHRLARYYKRTKKLPPTWKYESTTASTLVA

SEQ ID NO: 16691 - protein, 94 aa, Zea mays subsp. mays
  peptide (1)..(94): Ceres Seq. ID no. 12374783
RLPPIALASLSYSRRRRCCKRQLAVVRIVHSNAAMGRMHSRGKGISSSALPYKRTPPTWLKTAASDVRAVSSPSTPFHSAVVWFVIVGNADLVR

SEQ ID NO: 16692 - DNA, 1428 bp, Zea mays subsp. mays
  misc_feature (1)..(1428): Ceres Seq. ID no. 12415601
  misc_feature (1)..(1428): Ortholog of  Ceres SEQ ID NO 14314851 as cited in SEQ ID NO 54014
  misc_feature (1)..(1428): Ortholog of  Ceres SEQ ID NO 15227214 as cited in SEQ ID NO 55368
  misc_feature (1)..(1428): Ortholog of  Ceres SEQ ID NO 13638897 as cited in SEQ ID NO 55839
  misc_feature (1)..(1428): Ortholog of  Ceres SEQ ID NO 15173484 as cited in SEQ ID NO 61804
  misc_feature (1)..(1428): Ortholog of  Ceres SEQ ID NO 12614814 as cited in SEQ ID NO 68816
gcacgagaccattacctagaacatcctaatcgaaaaatcgcctcctctcgggctagctccacactcctttgtcctctccaaacgaacgaacaaaaagaggccgcttccccacccagtcacctcgacctcagcccctctcccccctccctatctcgactccgatgccgccgccgctcctcgaggcgcgcgactacatgggcgccggcgccaccccgttgtcctgctcctccagcggcgagggcacggggccgcacctcgcgctgcggctcgggctcccagggtccgactcccccggccgcgacgcggggccggagccggaccacgcccacgtcgacgccgcgctcaccctcggccctgcccccgcccccgcccccgcgcctcccagggtcggcgcaaagcgcgggttcgctgactcccgcgaccggtgcgtgaagcgggacgccactgctgcggatgacgctgctgggggagtgaccggggaggagaagcgggtagctgccggccgctgccggaactccgccggctgccaaggcgcaagttgttggatggccgcctgttaggagctaccggaagaacacactagctatgagtgccacaaagacaaacggggaagatgaaggtaggagtgaggcgggatgctgttatgttaaggtcagcatggatggagccccatacctaaggaaggtggacctcaagaccttttcgagctatgaggcacctttcgcttgctctggagaaaatgttcacctgcttcatcactggccaaagcggttcgtgcaagacttcaagaagggagaggctcactgatggttctagggctgatgcccttcaggaccaagaatatgtccttacttacgaagataaagatgctgactggatgctcgttggtgatctcccctgggacttgttcaccacaatttgtgggaaacttagaatcatgagaggctctgatgctgctggcatggctccaagatcaccggagcagatagttgggaccagaataaggaacgttgcccggcatgcagagtcgtgaactgaaaggaaaggacagagtttacatggcgctgaagggagcggtgtttttacgtgaagtgctccggttaagtctctctctctctctttttaacccccacatgtgcaatgagatgtgtgtggccctactgtaagacaccccattttgcccacgaggttgtcacgcgttattgtagatggtcgcctttgtgttatgaacgatcaaactcggtagtagcttgcttgctgcttcctctacgatactttcctccgtatttggaagctcgtacttcatatggtagaagtaagaaaaaatgcccatgttgcccattaagtttttttctctcgtgatgtgtgtgcgagcgaactaactattcagtggatctagaaagaatctgatcagtgagtctgtgtgcc

SEQ ID NO: 16693 - protein, 143 aa, Zea mays subsp. mays
  peptide (1)..(143): Ceres Seq. ID no. 12415602
ARDHYLEHPNRKIASSRASSTLLCPLQTNEQKEAASPPSHLDLSPSPPSLSRLRCRRRSSRRATTWAPAPPRCPAPPAARARGRTSRCGSGSQGPTPPAATRGRSRTTPTSTPRSPSALPPPPPPRLPGSAQSAGSLTPATGA

SEQ ID NO: 16694 - protein, 132 aa, Zea mays subsp. mays
  peptide (1)..(132): Ceres Seq. ID no. 12415603
MPPPLLEARDYMGAGATPLSCSSSGEGTGPHLALRLGLPGSDSPGRDAGPEPDHAHVDAALTLGPAPAPAPAPPRVGAKRGFADSRDRCVKRDATAADDAAGGVTGEEKRVAAGRCRNSAGCQGASCWMAAC

SEQ ID NO: 16695 - protein, 121 aa, Zea mays subsp. mays
  peptide (1)..(121): Ceres Seq. ID no. 12415604
MGAGATPLSCSSSGEGTGPHLALRLGLPGSDSPGRDAGPEPDHAHVDAALTLGPAPAPAPAPPRVGAKRGFADSRDRCVKRDATAADDAAGGVTGEEKRVAAGRCRNSAGCQGASCWMAAC

SEQ ID NO: 16696 - DNA, 1086 bp, Zea mays subsp. mays; identical to SEQ ID NO: 10089
  misc_feature (1)..(1086): Ceres Seq. ID no. 12358654
  misc_feature (1)..(1086): Ortholog of  Ceres SEQ ID NO 15176375 as cited in SEQ ID NO 53238
  misc_feature (1)..(1086): Ortholog of  Ceres SEQ ID NO 15170532 as cited in SEQ ID NO 55671
  misc_feature (1)..(1086): Ortholog of  Ceres SEQ ID NO 14316507 as cited in SEQ ID NO 57397
  misc_feature (1)..(1086): Ortholog of  Ceres SEQ ID NO 13663060 as cited in SEQ ID NO 60964
  misc_feature (1)..(1086): Ortholog of  Ceres SEQ ID NO 13598532 as cited in SEQ ID NO 65204
  misc_feature (1)..(1086): Ortholog of  Ceres SEQ ID NO 13656849 as cited in SEQ ID NO 65764
  misc_feature (1)..(1086): Ortholog of  Ceres SEQ ID NO 13656501 as cited in SEQ ID NO 69206

SEQ ID NO: 16697 - protein, 216 aa, Zea mays subsp. mays; identical to SEQ ID NO: 10090
  peptide (1)..(216): Ceres Seq. ID no. 12358655

SEQ ID NO: 16698 - protein, 210 aa, Zea mays subsp. mays; identical to SEQ ID NO: 10091
  peptide (1)..(210): Ceres Seq. ID no. 12358656

SEQ ID NO: 16699 - protein, 201 aa, Zea mays subsp. mays; identical to SEQ ID NO: 10092
  peptide (1)..(201): Ceres Seq. ID no. 12358657

SEQ ID NO: 16700 - DNA, 1178 bp, Zea mays subsp. mays
  misc_feature (1)..(1178): Ceres Seq. ID no. 13499179
  misc_feature (1)..(1178): Ortholog of  Ceres SEQ ID NO 12625306 as cited in SEQ ID NO 62387
gcacgagaccattacctagaacatcctaatcgaaaaaaagaagcgttggatcgtcttcggctagcttccggcgcgatggcggggcaggggcagcgcctgaacgtggtgccgacggtgacgacgctgggcacggtgaaggcgcggctggcgggcgccgcccgcggccacgcgctgctcaagaagaagtcggacgcgctgacggtgcagttccgcgccatcctcaggcgcatcgtgtccgccaaggacgccgtgggcgacgccatgcgcaccgcctcgctctcgctcgccgaggcgctgtacgtggccggcgcgccgctccggccacgctgcgcagcagtccgtgtccggcccggccaggctccgcgtgcgcgcgcaccaggacaacatcgccggcgtccgcctcccgcgcttcgagagcgacgcagcgtcgcctgcaggctctgcagcatcgccggcgtcgctcgccgggctcgccggcggcgggcagcaggtgtcggcctgccgcgcggcgtacgcgcgcgcgctccaggtgctggtggagctggcgtcgctgcagacgtcgttcctcgcgctggacgcgtccatcaagaccaccaaccggcgcgtcaacgcgctggagagcgtggtgaagccgcgcctggagaacaccatcgcctacatcaggggcgagctggacgagcacgagcgggaggagttcttccgcctcaagaagatccaggggtacaagcagcgcgagctcgagcgccagaaggaggccgccagccgctacgccgaggagaaggccgccggcgaggtcgcgctcaagcgcggcgtttccgtcgccactgcggagagcatgctggagaacggcgacagggacgaggaggatatcatcttttgagcctgtggagtgtggagtcctatgagtagagcgtgcagtggctgtgctacacctgcggcgccaaacagcaaccttctgtacacacagcccaataagctcgtagctgcagccggtgagccggagcccggaggctacgcgtatattccatctctgcgttaatccatgcgtgtgttttctcacttttttttgttgactgtcacagtggcgaagaacatcctcagctgaatttcattgaaagcaaccttgtttttggaaaaaagaggcaaaacctatataaaattgtggttgaccacatatt

SEQ ID NO: 16701 - protein, 302 aa, Zea mays subsp. mays
  peptide (1)..(302): Ceres Seq. ID no. 13499180
ARDHYLEHPNRKKEALDRLRLASGAMAGQGQRLNVVPTVTTLGTVKARLAGAARGHALLKKKSDALTVQFRAILRRIVSAKDAVGDAMRTASLSLAEALYVAGAPLRPRCAAVRVRPGQAPRARAPGQHRRRPPPALRERRSVACRLCSIAGVARRARRRRAAGVGLPRGVRARAPGAGGAGVAADVVPRAGRVHQDHQPARQRAGERGEAAPGEHHRLHQGRAGRARAGGVLPPQEDPGVQAARARAPEGGRQPLRRGEGRRRGRAQARRFRRHCGEHAGERRQGRGGYHLLSLWSVESYE

SEQ ID NO: 16702 - protein, 277 aa, Zea mays subsp. mays
  peptide (1)..(277): Ceres Seq. ID no. 13499181
MAGQGQRLNVVPTVTTLGTVKARLAGAARGHALLKKKSDALTVQFRAILRRIVSAKDAVGDAMRTASLSLAEALYVAGAPLRPRCAAVRVRPGQAPRARAPGQHRRRPPPALRERRSVACRLCSIAGVARRARRRRAAGVGLPRGVRARAPGAGGAGVAADVVPRAGRVHQDHQPARQRAGERGEAAPGEHHRLHQGRAGRARAGGVLPPQEDPGVQAARARAPEGGRQPLRRGEGRRRGRAQARRFRRHCGEHAGERRQGRGGYHLLSLWSVESYE

SEQ ID NO: 16703 - protein, 215 aa, Zea mays subsp. mays
  peptide (1)..(215): Ceres Seq. ID no. 13499182
MRTASLSLAEALYVAGAPLRPRCAAVRVRPGQAPRARAPGQHRRRPPPALRERRSVACRLCSIAGVARRARRRRAAGVGLPRGVRARAPGAGGAGVAADVVPRAGRVHQDHQPARQRAGERGEAAPGEHHRLHQGRAGRARAGGVLPPQEDPGVQAARARAPEGGRQPLRRGEGRRRGRAQARRFRRHCGEHAGERRQGRGGYHLLSLWSVESYE

SEQ ID NO: 16704 - DNA, 1993 bp, Zea mays subsp. mays; identical to SEQ ID NO: 16084
  misc_feature (1)..(1993): Ceres Seq. ID no. 13492718
  misc_feature (1)..(1993): Ortholog of  Ceres SEQ ID NO 14316204 as cited in SEQ ID NO 59644

SEQ ID NO: 16705 - protein, 444 aa, Zea mays subsp. mays; identical to SEQ ID NO: 16085
  peptide (1)..(444): Ceres Seq. ID no. 15222889
  misc_feature (44)..(44): Xaa is any aa, unknown or other
  misc_feature (86)..(86): Xaa is any aa, unknown or other
  misc_feature (87)..(87): Xaa is any aa, unknown or other

SEQ ID NO: 16706 - DNA, 1921 bp, Zea mays subsp. mays; identical to SEQ ID NO: 11243
  misc_feature (1)..(1921): Ceres Seq. ID no. 12414468
  misc_feature (1)..(1921): Ortholog of  Ceres SEQ ID NO 14302287 as cited in SEQ ID NO 68134
  misc_feature (1)..(1921): Ortholog of  Ceres SEQ ID NO 14309328 as cited in SEQ ID NO 0

SEQ ID NO: 16707 - protein, 504 aa, Zea mays subsp. mays; identical to SEQ ID NO: 11244
  peptide (1)..(504): Ceres Seq. ID no. 12414469

SEQ ID NO: 16708 - protein, 470 aa, Zea mays subsp. mays; identical to SEQ ID NO: 11245
  peptide (1)..(470): Ceres Seq. ID no. 12414470

SEQ ID NO: 16709 - protein, 393 aa, Zea mays subsp. mays; identical to SEQ ID NO: 11246
  peptide (1)..(393): Ceres Seq. ID no. 12414471

SEQ ID NO: 16710 - DNA, 1324 bp, Zea mays subsp. mays
  misc_feature (1)..(1324): Ceres Seq. ID no. 12369302
  misc_feature (1)..(1324): Ortholog of  Ceres SEQ ID NO 13598635 as cited in SEQ ID NO 64865
attggtatcaagaaaaacttgtcgaaaaatacacagggcacaatgtgcggaggcgccatcctcgcggagctgatcccgccgacgcggcgcgtggcgtcgaagccggtgacagaaggccacctctggtcggcgagctccaagaaagccggcagcggcagggacaagaggcaccagcacgaatacgccgacgatgacttcgaggccgccttcgaggacttcgacgacgactttgacgtgcatgaagacgacgaggacggccacttcgtattctcgtccaaatccgccttgtccccagccctgcacgacgggcgcgcggcgagccagaagaagcagcgcgggcgccagttccgcggcatccggcagcggccctggggcaagtgggcggcggagatccgcgacccgcacaagggcacccgcgtctggctcggcaccttcagcaccgccgaggacgccgcccgggcctacgacgtggaggcgcgccgcctccgcggcagcaaggccaaggtcaacttccccgcagccagcggtcgcgctcgcggtcgcgcgcgcccacgccgcggcgacgacggcaacccacgaaccgcgccggaaacgcagcacccagcacagcccgctctgctgcctcgaggagagagagagacgcagaggaaggaagggatcgccgccgtgaagccagaagctacggagtcgttcgacgtgggcggcggtctcttcttcgacatggccttccccaccttcccagcctcgccgccgccgcaggccgtggatacgtccttcgccggcagcaccgccacgtcggagaccgggagccccgcgaagaggccgagatgcgacgaagactcgtccgagggcggcagcggctccgcgctggagctcgctgacgagctggcgttcgacccgtttgtgctgctgcagatgccctactcgggtgggtacgacgacgactcactggacggccttttcgccgcagatgaggccgtgcagcaggacgtgggcaacggcatggacggcgtccgcctgtggagcttcgacgagttccccgccgtcgacggttctgttttctgacgtttgcttactacgtactactactattttctgcctggtggaatcatatgtgatagtgctgcatgtgtctgcctgatcgtcagattgtactccactctggatatttgtgctacgtactcgtctggtatttcctactgtgggtcaatggttcctatgaatttgttcacgtcggcgaaactctgtattgtacggtcgtgattgatgtgccaaattaaataagcctgtgaacctggttctatgtatatatggtatcttgatt

SEQ ID NO: 16711 - protein, 354 aa, Zea mays subsp. mays
  peptide (1)..(354): Ceres Seq. ID no. 12369303
IGIKKNLSKNTQGTMCGGAILAELIPPTRRVASKPVTEGHLWSASSKKAGSGRDKRHQHEYADDDFEAAFEDFDDDFDVHEDDEDGHFVFSSKSALSPALHDGRAASQKKQRGRQFRGIRQRPWGKWAAEIRDPHKGTRVWLGTFSTAEDAARAYDVEARRLRGSKAKVNFPAASGRARGRARPRRGDDGNPRTAPETQHPAQPALLPRGERETQRKEGIAAVKPEATESFDVGGGLFFDMAFPTFPASPPPQAVDTSFAGSTATSETGSPAKRPRCDEDSSEGGSGSALELADELAFDPFVLLQMPYSGGYDDDSLDGLFAADEAVQQDVGNGMDGVRLWSFDEFPAVDGSVF

SEQ ID NO: 16712 - protein, 340 aa, Zea mays subsp. mays
  peptide (1)..(340): Ceres Seq. ID no. 12369304
MCGGAILAELIPPTRRVASKPVTEGHLWSASSKKAGSGRDKRHQHEYADDDFEAAFEDFDDDFDVHEDDEDGHFVFSSKSALSPALHDGRAASQKKQRGRQFRGIRQRPWGKWAAEIRDPHKGTRVWLGTFSTAEDAARAYDVEARRLRGSKAKVNFPAASGRARGRARPRRGDDGNPRTAPETQHPAQPALLPRGERETQRKEGIAAVKPEATESFDVGGGLFFDMAFPTFPASPPPQAVDTSFAGSTATSETGSPAKRPRCDEDSSEGGSGSALELADELAFDPFVLLQMPYSGGYDDDSLDGLFAADEAVQQDVGNGMDGVRLWSFDEFPAVDGSVF

SEQ ID NO: 16713 - DNA, 931 bp, Zea mays subsp. mays
  misc_feature (1)..(931): Ceres Seq. ID no. 12354601
  misc_feature (1)..(931): Ortholog of  Ceres SEQ ID NO 15169603 as cited in SEQ ID NO 65772
  misc_feature (1)..(931): Ortholog of  Ceres SEQ ID NO 14308003 as cited in SEQ ID NO 65919
  misc_feature (1)..(931): Ortholog of  Ceres SEQ ID NO 14303087 as cited in SEQ ID NO 66569
aatagacagaacgcaccctccagtaaagtccccatggctgctttctggttgctgctgctgttcgtcgccagcgcagtccttgttcttcgtacatggagagctcaaagcttcgtcaacaaggcgcggcaggcagggccgaggtacccgccggggctggagccgtacccgctgatcgggcacctgccacagttcttggctaaccggcaccgcgtgctcgactggatgaccgaggcgctcgcgcgccagacgaccacgtgcacgttcgtgctgcgccggccgggaggcgtgcggggtgcgatcaccgcgaacccggcgaacgtggagcacttcctgcgcaccagcttcgaccactaccccaaggggccccggttcgcgtcgctgctgcacgacttcctcggccggggcatcttcaacgccgacggcgaggcctggcgcgcgcagcggaaggtcgccagccacgagttcaacacgcgctcgctccgagctttcgtggcgcgctgcgtgcacgccgagctacacggccgcctgctcccgctgctgcgccgcgccgcggcgtccggctcccccctcgacctccaggacgtgctcgagcggttcgcgttcgacaatatctgccgcgtcgccttcgaccacgaccctcgccagctcccggacgatggtgacgacactgcggacagcagcttcgccgatgcgttccgcgacgctgcgaatctcagcgcgggccggttccggtacgcggtcccggggttctggaagatcaagaaagcgctgaacttgggttctgagaagcggctgcgggagtccatcgccatggtgcacgacttcgccgatcgcataatccagtcgcgccgggaggagatgttgagcgccggttttgagaagcacgatcttctgtcgcggttcatggcgagccaggacgagacctactccg

SEQ ID NO: 16714 - protein, 310 aa, Zea mays subsp. mays
  peptide (1)..(310): Ceres Seq. ID no. 12354602
NRQNAPSSKVPMAAFWLLLLFVASAVLVLRTWRAQSFVNKARQAGPRYPPGLEPYPLIGHLPQFLANRHRVLDWMTEALARQTTTCTFVLRRPGGVRGAITANPANVEHFLRTSFDHYPKGPRFASLLHDFLGRGIFNADGEAWRAQRKVASHEFNTRSLRAFVARCVHAELHGRLLPLLRRAAASGSPLDLQDVLERFAFDNICRVAFDHDPRQLPDDGDDTADSSFADAFRDAANLSAGRFRYAVPGFWKIKKALNLGSEKRLRESIAMVHDFADRIIQSRREEMLSAGFEKHDLLSRFMASQDETYS

SEQ ID NO: 16715 - protein, 299 aa, Zea mays subsp. mays
  peptide (1)..(299): Ceres Seq. ID no. 12354603
MAAFWLLLLFVASAVLVLRTWRAQSFVNKARQAGPRYPPGLEPYPLIGHLPQFLANRHRVLDWMTEALARQTTTCTFVLRRPGGVRGAITANPANVEHFLRTSFDHYPKGPRFASLLHDFLGRGIFNADGEAWRAQRKVASHEFNTRSLRAFVARCVHAELHGRLLPLLRRAAASGSPLDLQDVLERFAFDNICRVAFDHDPRQLPDDGDDTADSSFADAFRDAANLSAGRFRYAVPGFWKIKKALNLGSEKRLRESIAMVHDFADRIIQSRREEMLSAGFEKHDLLSRFMASQDETYS

SEQ ID NO: 16716 - protein, 236 aa, Zea mays subsp. mays
  peptide (1)..(236): Ceres Seq. ID no. 12354604
MTEALARQTTTCTFVLRRPGGVRGAITANPANVEHFLRTSFDHYPKGPRFASLLHDFLGRGIFNADGEAWRAQRKVASHEFNTRSLRAFVARCVHAELHGRLLPLLRRAAASGSPLDLQDVLERFAFDNICRVAFDHDPRQLPDDGDDTADSSFADAFRDAANLSAGRFRYAVPGFWKIKKALNLGSEKRLRESIAMVHDFADRIIQSRREEMLSAGFEKHDLLSRFMASQDETYS

SEQ ID NO: 16717 - DNA, 1753 bp, Zea mays subsp. mays
  misc_feature (1)..(1753): Ceres Seq. ID no. 12368205
  misc_feature (1)..(1753): Ortholog of  Ceres SEQ ID NO 14306857 as cited in SEQ ID NO 60035
  misc_feature (1)..(1753): Ortholog of  Ceres SEQ ID NO 15227091 as cited in SEQ ID NO 60294
  misc_feature (1)..(1753): Ortholog of  Ceres SEQ ID NO 14303546 as cited in SEQ ID NO 64893
  misc_feature (1)..(1753): Ortholog of  Ceres SEQ ID NO 14302228 as cited in SEQ ID NO 65061
  misc_feature (1)..(1753): Ortholog of  Ceres SEQ ID NO 15176091 as cited in SEQ ID NO 65733
  misc_feature (1)..(1753): Ortholog of  Ceres SEQ ID NO 14308019 as cited in SEQ ID NO 65849
  misc_feature (1)..(1753): Ortholog of  Ceres SEQ ID NO 15169611 as cited in SEQ ID NO 65939
  misc_feature (1)..(1753): Ortholog of  Ceres SEQ ID NO 14307964 as cited in SEQ ID NO 66191
  misc_feature (1)..(1753): Ortholog of  Ceres SEQ ID NO 15170167 as cited in SEQ ID NO 66224
  misc_feature (1)..(1753): Ortholog of  Ceres SEQ ID NO 13502874 as cited in SEQ ID NO 66298
  misc_feature (1)..(1753): Ortholog of  Ceres SEQ ID NO 15169631 as cited in SEQ ID NO 67173
  misc_feature (1)..(1753): Ortholog of  Ceres SEQ ID NO 12614124 as cited in SEQ ID NO 68392
  misc_feature (1)..(1753): Ortholog of  Ceres SEQ ID NO 14307980 as cited in SEQ ID NO 69214
gacaacctaaaagcagaaagtataactgtataagtaatgccatcagctccgtacttgacgtagaattccaatggaaatggaactagaccctttcctgggcgtcgtgctcgccaccgccgtcctcctcgtcgccgtcctccgccggaagcgcggctccagccgcaagtacaagatgccatccgggcctaggccgtggccggtgatcggcaacctcaacctgatcggcgcgctcccgcaccgctccatccacgcgctctccgcgcggcacggcgcgttcatgtcgctccgcttcggctccgtccccgtcgtcgtcggctcctccgtggaagcggccaggttcttcctcaggaccagcgacacgtcgttcatcgaccgccccaggatggcggccgggaagtacaccgcctacgactactccgacatcgtctggtcgccctgcggggcgtactggcgccaggcgcgcaagctctggaaggcccatctgttcagcgacaggcagctcaggtcgcaggagcacgtccgcagcgaggagctgcgcgtcctgctgcgcgccctgtcgtcgtcgtcctccgcgggcgcggccgggcgcggccggcgggccgtcgcgctcaaggagcacctgctcatgtacagcctcaacgtgatctcgcgcatggcgctgggcgggaagtacgtcggcgagggcggcaccgcgggctcgccgatctcgccggccgagttcagctggatggtcgacgagctcttcctcctcaacggcgtgttctgcgtcggggacttcatcccgtggctcggctggctggacctccagggctacgtcgggaggatgaagaggctgggcaagatgttcgatcgcttcctggagcacgtggtggacgagcacgaccagcggcggcggcgggagggcggcgggttcgtccccgcggacatggtggacctgctgctggagctcgccgacgaccccaaactcgaggtccccatcgaacgggatggcgtcaagggattcgcgctggacctgatcgctggcggcacggactccacggcggtgaccatcgagtgggccatgtcggagctcctgcggaagcccgaggtcctcgccaaggtcaccgaggagctggacggcgtcatcggccacggccgcctggtcaccgagcaggacatcccggacctgccgtacctggaggccgtcgtgaaggagaccctccgcctgcacccggtgacgccgctgctggcgccgcggctgtgccgcgaggacgcgtccacgggcagctacgacatcccgcggggcacgctcgtgttcgtcaacgtctgggccatcggccgcgaccccgccgtgtggggccacgacgcggaggagttccgcccggagaggttcgtcggcagcgccgtggacgtgaagggccacgacctggagctgctcccgttcgggtccggccgccggatgtgcccgggctacgtcctcgggctcaagatggtgcaggtcaccctggccaacctgctgcacgccttctcgtggaggctgcctgatagcgtggcgccggagaagctgaacatgcaggagaagttcgggctcgccgtgccgcgcttggtcccgctcgaggccgtcgccgtgcccaggctgccaccacacctgtatgccgggccatgatgcatgtctatgtttgtttttgtaggcgcatacaactgtctcgtaataaaagatacatatcttttctctgtacatatacacctaataaagagacaaacaatatcgtcg

SEQ ID NO: 16718 - protein, 524 aa, Zea mays subsp. mays
  peptide (1)..(524): Ceres Seq. ID no. 12368206
MEMELDPFLGVVLATAVLLVAVLRRKRGSSRKYKMPSGPRPWPVIGNLNLIGALPHRSIHALSARHGAFMSLRFGSVPVVVGSSVEAARFFLRTSDTSFIDRPRMAAGKYTAYDYSDIVWSPCGAYWRQARKLWKAHLFSDRQLRSQEHVRSEELRVLLRALSSSSSAGAAGRGRRAVALKEHLLMYSLNVISRMALGGKYVGEGGTAGSPISPAEFSWMVDELFLLNGVFCVGDFIPWLGWLDLQGYVGRMKRLGKMFDRFLEHVVDEHDQRRRREGGGFVPADMVDLLLELADDPKLEVPIERDGVKGFALDLIAGGTDSTAVTIEWAMSELLRKPEVLAKVTEELDGVIGHGRLVTEQDIPDLPYLEAVVKETLRLHPVTPLLAPRLCREDASTGSYDIPRGTLVFVNVWAIGRDPAVWGHDAEEFRPERFVGSAVDVKGHDLELLPFGSGRRMCPGYVLGLKMVQVTLANLLHAFSWRLPDSVAPEKLNMQEKFGLAVPRLVPLEAVAVPRLPPHLYAGP

SEQ ID NO: 16719 - protein, 522 aa, Zea mays subsp. mays
  peptide (1)..(522): Ceres Seq. ID no. 12368207
MELDPFLGVVLATAVLLVAVLRRKRGSSRKYKMPSGPRPWPVIGNLNLIGALPHRSIHALSARHGAFMSLRFGSVPVVVGSSVEAARFFLRTSDTSFIDRPRMAAGKYTAYDYSDIVWSPCGAYWRQARKLWKAHLFSDRQLRSQEHVRSEELRVLLRALSSSSSAGAAGRGRRAVALKEHLLMYSLNVISRMALGGKYVGEGGTAGSPISPAEFSWMVDELFLLNGVFCVGDFIPWLGWLDLQGYVGRMKRLGKMFDRFLEHVVDEHDQRRRREGGGFVPADMVDLLLELADDPKLEVPIERDGVKGFALDLIAGGTDSTAVTIEWAMSELLRKPEVLAKVTEELDGVIGHGRLVTEQDIPDLPYLEAVVKETLRLHPVTPLLAPRLCREDASTGSYDIPRGTLVFVNVWAIGRDPAVWGHDAEEFRPERFVGSAVDVKGHDLELLPFGSGRRMCPGYVLGLKMVQVTLANLLHAFSWRLPDSVAPEKLNMQEKFGLAVPRLVPLEAVAVPRLPPHLYAGP

SEQ ID NO: 16720 - protein, 490 aa, Zea mays subsp. mays
  peptide (1)..(490): Ceres Seq. ID no. 12368208
MPSGPRPWPVIGNLNLIGALPHRSIHALSARHGAFMSLRFGSVPVVVGSSVEAARFFLRTSDTSFIDRPRMAAGKYTAYDYSDIVWSPCGAYWRQARKLWKAHLFSDRQLRSQEHVRSEELRVLLRALSSSSSAGAAGRGRRAVALKEHLLMYSLNVISRMALGGKYVGEGGTAGSPISPAEFSWMVDELFLLNGVFCVGDFIPWLGWLDLQGYVGRMKRLGKMFDRFLEHVVDEHDQRRRREGGGFVPADMVDLLLELADDPKLEVPIERDGVKGFALDLIAGGTDSTAVTIEWAMSELLRKPEVLAKVTEELDGVIGHGRLVTEQDIPDLPYLEAVVKETLRLHPVTPLLAPRLCREDASTGSYDIPRGTLVFVNVWAIGRDPAVWGHDAEEFRPERFVGSAVDVKGHDLELLPFGSGRRMCPGYVLGLKMVQVTLANLLHAFSWRLPDSVAPEKLNMQEKFGLAVPRLVPLEAVAVPRLPPHLYAGP

SEQ ID NO: 16721 - DNA, 1496 bp, Zea mays subsp. mays
  misc_feature (1)..(1496): Ceres Seq. ID no. 12357245
  misc_feature (1)..(1496): Ortholog of  Ceres SEQ ID NO 12581802 as cited in SEQ ID NO 54880
caaagatcttatgatgccctgggagactttgttttgtggtgtatagatagcatcatgtctgaattgtcaggctcatcagctggatctaagggttcaaagaaggttgcccaacagtctccaagggcccaggttgcaatctttgttgttcttgccatgactttaagaagaaagcctgatgtacttgtaaatgttatgccaaagataatgggaaacaataaatatcttggacaggaaaagcttcccatcattgtctggtttattgctcaggcatctcaaggtgacctagtgactggcatgttttgctgggctcattttctatttcccacgttatgtgcgaagccaagtgggaatccccttgcaagagatttggttttgcagttgcttgaaagaattttatctgtcaccaaagctcgttctatcttattgaatggtgctgttagaaagggggaacgcctagttccccctgtttcatttgacttgttcatgagagccacatttccggtttctggtgctcgggtgaaggctacagaaaggtttgaagtagcttatcgaacaatcaaggagttggctcttgccggttctcctggctctaaaactgtgaaacaagcatcacagcaacttttacctttgtgtgcaaaagcaatgcaagaaaacaacacagagctcaccagggaggctgttgatgtgttcatttggtgcttgacacaaaatgcagagtccaacaagcagtgggaaagaatttatcctgaaaatactgaagccagtgttgctgtcctgagcaaaattgtgattgattggaaggacgtgtctcctaagctcaattctgaagctctcaaggcaacagtgaagaacttgaaggctaagaatgaggcagcgctggagtcagcaacagatgctggaaagcaggcatctatcaaagaagcagacaagcactgtaaggtgatccttggaaagctgacgcgcggttccacctgcctgaagagcacccttgtgggcatcgccctcgcagttgcagctagtctcgtgctatcatctcctgacatggaccttgcgctcgagtgggagaagatccaggcgatggtctcatcgcacctgtcgttctgaagatacctgtccggaatctccagacgtgggtggatctaagtcatacaagccatccaaaggggatggctgactcagcagtgaagagagctcaaggggtggtgagaataagagggaggggggggggataggtgctagaaccgaaaggttatagttttcatgagtcgccatttttttcccgcgcttcctccagcagcagcggtgccctgataggagggagatgcagtagtcgactttgcagagagttggtttaatcggggtgggtgcgaactgcgaagaaggtttgagtcaaatggctcgaccagaggattaacaccttttgcttttctctttgtgcatctgagatgatgttggcaaacagttttggttatctagaatcttgaatcgtattccgc

SEQ ID NO: 16722 - protein, 367 aa, Zea mays subsp. mays
  peptide (1)..(367): Ceres Seq. ID no. 12357246
QRSYDALGDFVLWCIDSIMSELSGSSAGSKGSKKVAQQSPRAQVAIFVVLAMTLRRKPDVLVNVMPKIMGNNKYLGQEKLPIIVWFIAQASQGDLVTGMFCWAHFLFPTLCAKPSGNPLARDLVLQLLERILSVTKARSILLNGAVRKGERLVPPVSFDLFMRATFPVSGARVKATERFEVAYRTIKELALAGSPGSKTVKQASQQLLPLCAKAMQENNTELTREAVDVFIWCLTQNAESNKQWERIYPENTEASVAVLSKIVIDWKDVSPKLNSEALKATVKNLKAKNEAALESATDAGKQASIKEADKHCKVILGKLTRGSTCLKSTLVGIALAVAASLVLSSPDMDLALEWEKIQAMVSSHLSF

SEQ ID NO: 16723 - protein, 349 aa, Zea mays subsp. mays
  peptide (1)..(349): Ceres Seq. ID no. 12357247
MSELSGSSAGSKGSKKVAQQSPRAQVAIFVVLAMTLRRKPDVLVNVMPKIMGNNKYLGQEKLPIIVWFIAQASQGDLVTGMFCWAHFLFPTLCAKPSGNPLARDLVLQLLERILSVTKARSILLNGAVRKGERLVPPVSFDLFMRATFPVSGARVKATERFEVAYRTIKELALAGSPGSKTVKQASQQLLPLCAKAMQENNTELTREAVDVFIWCLTQNAESNKQWERIYPENTEASVAVLSKIVIDWKDVSPKLNSEALKATVKNLKAKNEAALESATDAGKQASIKEADKHCKVILGKLTRGSTCLKSTLVGIALAVAASLVLSSPDMDLALEWEKIQAMVSSHLSF

SEQ ID NO: 16724 - protein, 316 aa, Zea mays subsp. mays
  peptide (1)..(316): Ceres Seq. ID no. 12357248
MTLRRKPDVLVNVMPKIMGNNKYLGQEKLPIIVWFIAQASQGDLVTGMFCWAHFLFPTLCAKPSGNPLARDLVLQLLERILSVTKARSILLNGAVRKGERLVPPVSFDLFMRATFPVSGARVKATERFEVAYRTIKELALAGSPGSKTVKQASQQLLPLCAKAMQENNTELTREAVDVFIWCLTQNAESNKQWERIYPENTEASVAVLSKIVIDWKDVSPKLNSEALKATVKNLKAKNEAALESATDAGKQASIKEADKHCKVILGKLTRGSTCLKSTLVGIALAVAASLVLSSPDMDLALEWEKIQAMVSSHLSF

SEQ ID NO: 16725 - DNA, 1183 bp, Zea mays subsp. mays
  misc_feature (1)..(1183): Ceres Seq. ID no. 13504973
  misc_feature (1)..(1183): Ortholog of  Ceres SEQ ID NO 14307312 as cited in SEQ ID NO 54745
  misc_feature (1)..(1183): Ortholog of  Ceres SEQ ID NO 14314194 as cited in SEQ ID NO 57366
  misc_feature (1)..(1183): Ortholog of  Ceres SEQ ID NO 13655305 as cited in SEQ ID NO 63328
aattaatcccccacgttccccttccctttctctcccgccgccgcacgcccctctcaaacctccgcgctcccgcccagctagggtttccccgatctcccctcctcctcaaccgccgccgtctccgagagcgccgccacgatgttggagctgcggcttgtgcaggggagcctcctcaagaaggtcctggaggcgatccgcgagctggtcaacgacgccaacttcgactgctccggcaccgggttctcgctgcaggccatggactcgagccacgtcgccctcgtcgcgctgctcctccgcgccgaggggttcgagcactaccgctgcgaccgcaacctctccatgggcatgaacctcaacaacatggccaagatgctccggtgcgccggtaacgacgacatcatcaccataaaggccgatgacggttctgacaccgtcacctttatgttcgagtcgcccaagcaagataagattgcggatttcgagatgaaactgatggatattgatagcgagcacctcggaatcccggattccgagtaccaggccatcgtccgcatgccttcttctgagtttatgaggatctgcaaggaccttagcagcatcggagacactgtcgttatctcggtaaccaaggagggcgtgaagttctccacatctggagaaattgggagtgcgaacattgtttgcaggcagaaccaaactattgacaagccagaagaggctaccattatagagatgcaagagccggtttccctgacctttgccctaaggtacatgaactcgttcaccaaggcgtcttcactgtccgaacaagtcacgatcagcctgtcgtccgagctaccagtggtggtcgagtacaagatcgctgagatgggttacattagattttacctggcgccaaagatcgaggacgatgaggagatgaagccatgattgccatcagtgctcgtgctgccgactttttctcgtcttccatccatggtttgcttattagctattatttgcacgcaaaggaaaaaaaagatgttatgttttatatcttaggccagactgctttagctacttatttgtgactgctgtgtgtccatggatttatagtgaatctagattagtgggcttgtgctttgtgcatgccgctgctgtctgcccatttttctattcagacatgaaattctttgttgggatc

SEQ ID NO: 16726 - protein, 263 aa, Zea mays subsp. mays
  peptide (1)..(263): Ceres Seq. ID no. 13504974
MLELRLVQGSLLKKVLEAIRELVNDANFDCSGTGFSLQAMDSSHVALVALLLRAEGFEHYRCDRNLSMGMNLNNMAKMLRCAGNDDIITIKADDGSDTVTFMFESPKQDKIADFEMKLMDIDSEHLGIPDSEYQAIVRMPSSEFMRICKDLSSIGDTVVISVTKEGVKFSTSGEIGSANIVCRQNQTIDKPEEATIIEMQEPVSLTFALRYMNSFTKASSLSEQVTISLSSELPVVVEYKIAEMGYIRFYLAPKIEDDEEMKP

SEQ ID NO: 16727 - protein, 224 aa, Zea mays subsp. mays
  peptide (1)..(224): Ceres Seq. ID no. 13504975
MDSSHVALVALLLRAEGFEHYRCDRNLSMGMNLNNMAKMLRCAGNDDIITIKADDGSDTVTFMFESPKQDKIADFEMKLMDIDSEHLGIPDSEYQAIVRMPSSEFMRICKDLSSIGDTVVISVTKEGVKFSTSGEIGSANIVCRQNQTIDKPEEATIIEMQEPVSLTFALRYMNSFTKASSLSEQVTISLSSELPVVVEYKIAEMGYIRFYLAPKIEDDEEMKP

SEQ ID NO: 16728 - protein, 196 aa, Zea mays subsp. mays
  peptide (1)..(196): Ceres Seq. ID no. 13504976
MGMNLNNMAKMLRCAGNDDIITIKADDGSDTVTFMFESPKQDKIADFEMKLMDIDSEHLGIPDSEYQAIVRMPSSEFMRICKDLSSIGDTVVISVTKEGVKFSTSGEIGSANIVCRQNQTIDKPEEATIIEMQEPVSLTFALRYMNSFTKASSLSEQVTISLSSELPVVVEYKIAEMGYIRFYLAPKIEDDEEMKP

SEQ ID NO: 16729 - DNA, 894 bp, Zea mays subsp. mays
  misc_feature (1)..(894): Ceres Seq. ID no. 13499157
  misc_feature (1)..(894): Ortholog of  Ceres SEQ ID NO 13655108 as cited in SEQ ID NO 62996
gcacgagaccattacctagaacatcctaatcaaaaagcaccgggtccttgctttgcgcgttgctgttcgcataaacaagagatcctagttctactcccaagcaatgtatccgtcagcccctccggacgcgtataacaagttcagcgccggggctccgccaacggcgccgccgccgccggcagcgtaccaccagcagcagcagcagcacggagcgaacatggacacttcacgccccggcggcgggctgaggaaatggtccaccggcctcttccactgcatggacgacccggggaactgtctcatcacatgcctgtgcccctgcgtcacgttcgggcaggtcgctgacatcgtggacaaggggcacctgcccatgtatcgcgagcggactggtgtacgggctcatctgcgcgtcgacggggatggggtgcctgtactcgtgcctctaccggtccaagctgagggccgagtacgacctggacgaaggggagtgcccggacatcctggtgcactgctgctgcgagcacctggctctgtgccaagagtaccgcgagctcaagaaccgcggcttcgacctggggatcggttgggaggctaacatggaccggcanaggcgaggagttgccggcggcggcgcggtgatgggggcgccgccggccataccgctgggcatgattaggtagatgattgattgatgcgaaatggcagaacttgctttcgtggttcttttgtttgactatgtaatgtatcttcgtttccatcgattctatgtaatttaactgtccctttttttttggctctctattgtggaggtcgctgggtgtgaatagcactgttttggatgggtttgtgattggtctagatgacttatataaggtgattgtanagcggagtttt

SEQ ID NO: 16730 - protein, 163 aa, Zea mays subsp. mays
  peptide (1)..(163): Ceres Seq. ID no. 13499158
MYPSAPPDAYNKFSAGAPPTAPPPPAAYHQQQQQHGANMDTSRPGGGLRKWSTGLFHCMDDPGNCLITCLCPCVTFGQVADIVDKGHLPMYRERTGVRAHLRVDGDGVPVLVPLPVQAEGRVRPGRRGVPGHPGALLLRAPGSVPRVPRAQEPRLRPGDRLGG

SEQ ID NO: 16731 - protein, 125 aa, Zea mays subsp. mays
  peptide (1)..(125): Ceres Seq. ID no. 13499159
MDTSRPGGGLRKWSTGLFHCMDDPGNCLITCLCPCVTFGQVADIVDKGHLPMYRERTGVRAHLRVDGDGVPVLVPLPVQAEGRVRPGRRGVPGHPGALLLRAPGSVPRVPRAQEPRLRPGDRLGG

SEQ ID NO: 16732 - protein, 105 aa, Zea mays subsp. mays
  peptide (1)..(105): Ceres Seq. ID no. 13499160
MDDPGNCLITCLCPCVTFGQVADIVDKGHLPMYRERTGVRAHLRVDGDGVPVLVPLPVQAEGRVRPGRRGVPGHPGALLLRAPGSVPRVPRAQEPRLRPGDRLGG

SEQ ID NO: 16733 - DNA, 1745 bp, Zea mays subsp. mays
  misc_feature (1)..(1745): Ceres Seq. ID no. 12362494
  misc_feature (1)..(1745): Ortholog of  Ceres SEQ ID NO 15171382 as cited in SEQ ID NO 51642
  misc_feature (1)..(1745): Ortholog of  Ceres SEQ ID NO 15168545 as cited in SEQ ID NO 57829
  misc_feature (1)..(1745): Ortholog of  Ceres SEQ ID NO 15168468 as cited in SEQ ID NO 58115
  misc_feature (1)..(1745): Ortholog of  Ceres SEQ ID NO 15179784 as cited in SEQ ID NO 64755
  misc_feature (1)..(1745): Ortholog of  Ceres SEQ ID NO 13596440 as cited in SEQ ID NO 68769
  misc_feature (1)..(1745): Ortholog of  Ceres SEQ ID NO 15180012 as cited in SEQ ID NO 0
gcacgagaccattacctagaacatcctaatcgaaaaagccttctcgtctgtccccttaatttttcaacctgctctggtggctggtttggccaccaatttcctctcaaagatacagcgaaatgcgcattattatatgtactgccgccgtcgtttaatcggtgtgttcatctcagctgtcgtgcagggcagcaggtggcgaggaggtcgtctcgtcgcggacagccgaggccgttgacctctccagctgctggacgcaacacggcaacgcgcaaacgcctctcctctgtgcgtaccggactaccggtaccgcgcgttcagtttccacttccacccgcgtcgtccgtctctctccgctcagcttgaggtgtccggatcacggcggttgcaacctgcagccgcaccagcaagccgctgctccctctcctaaccggccgctgcagctgccataccagccggaggagatgccggcggcgccggccatccgcctggggcctccgcacccgtacctgaagacccacgggggcaaggtcgcgaggctgcaccggctggactgggccgtgctgctgctcatcgccgccgccgacgtcgggctcaacctcgtcgagccgttccaccgcttcgtcggcgaggacatgctcgcggacctccggtacccgctgaagagcaacaccgtgcccgtctgggccgtgccggtgtacgcggtgatcggcccgatcgtcgtgttcgtcgggttatacctgaagcggaggaacgtgtacgacatgcaccacgccattctaggccttctcttctccgtgctcatcaccggcgtcctcaccgacgccatcaaggacggcgttggccggccgcgccccaacttcttctggcgctgcttccctgacggagtgccgaagtacgacaacatcacaagaggagtcctgtgcgacggcgtcgcgagcgtgatcaaagaagggcacaagagcttcccaagcggccattcttcgtggtccttcgctggcctaggcttcctgtcgtggtacctggcgggcaaggtcaaggcgttcgaccggcgcggccacgtggccaagctgtgcgtcgtgctcctgccgctgctgctcgcggccatggtggcggtgtcgcgggtggacgactactggcaccactggcaggacgtgtttgccggtgggattcttgggttggtggttgcgtctttctgctaccttcagtttttcccaccgccatctggtgaacaaggattctggccccatgcgtactccgagcacattctcaacaaccctgagcgcgagggccgagcgcagtccacagcgagctcgaaccaccaccgacgcctgtccagccgaggccacgtggcagtggagatgagcaccgcgaccgcgagcgcgagccaggacgcatcgtcgttaggtcccatggaggagatggagatggaggaaggacgcggcggagcccggtacgaacagcgctagctgcagcttcagtcttcaaagtcgcttcgtttccttccttcattcctttctttttttcttcttcttcttctttttgctcgtttggttgatagatgtgtgtgtctatctagtagtaaggtgctgtttgttgtgtcggtcctgctgtaaattagatgtaggtaggtaggtaggtagccaggtaggtaggtgaaccatgcatgtttcatatgtttgatgcagtacgatgatgattagcacgtactgtacaacggaagcatgcgtgcgtgcgtgccccggttc

SEQ ID NO: 16734 - protein, 334 aa, Zea mays subsp. mays
  peptide (1)..(334): Ceres Seq. ID no. 12362495
MPAAPAIRLGPPHPYLKTHGGKVARLHRLDWAVLLLIAAADVGLNLVEPFHRFVGEDMLADLRYPLKSNTVPVWAVPVYAVIGPIVVFVGLYLKRRNVYDMHHAILGLLFSVLITGVLTDAIKDGVGRPRPNFFWRCFPDGVPKYDNITRGVLCDGVASVIKEGHKSFPSGHSSWSFAGLGFLSWYLAGKVKAFDRRGHVAKLCVVLLPLLLAAMVAVSRVDDYWHHWQDVFAGGILGLVVASFCYLQFFPPPSGEQGFWPHAYSEHILNNPEREGRAQSTASSNHHRRLSSRGHVAVEMSTATASASQDASSLGPMEEMEMEEGRGGARYEQR

SEQ ID NO: 16735 - protein, 277 aa, Zea mays subsp. mays
  peptide (1)..(277): Ceres Seq. ID no. 12362496
MLADLRYPLKSNTVPVWAVPVYAVIGPIVVFVGLYLKRRNVYDMHHAILGLLFSVLITGVLTDAIKDGVGRPRPNFFWRCFPDGVPKYDNITRGVLCDGVASVIKEGHKSFPSGHSSWSFAGLGFLSWYLAGKVKAFDRRGHVAKLCVVLLPLLLAAMVAVSRVDDYWHHWQDVFAGGILGLVVASFCYLQFFPPPSGEQGFWPHAYSEHILNNPEREGRAQSTASSNHHRRLSSRGHVAVEMSTATASASQDASSLGPMEEMEMEEGRGGARYEQR

SEQ ID NO: 16736 - protein, 234 aa, Zea mays subsp. mays
  peptide (1)..(234): Ceres Seq. ID no. 12362497
MHHAILGLLFSVLITGVLTDAIKDGVGRPRPNFFWRCFPDGVPKYDNITRGVLCDGVASVIKEGHKSFPSGHSSWSFAGLGFLSWYLAGKVKAFDRRGHVAKLCVVLLPLLLAAMVAVSRVDDYWHHWQDVFAGGILGLVVASFCYLQFFPPPSGEQGFWPHAYSEHILNNPEREGRAQSTASSNHHRRLSSRGHVAVEMSTATASASQDASSLGPMEEMEMEEGRGGARYEQR

SEQ ID NO: 16737 - DNA, 1826 bp, Zea mays subsp. mays
  misc_feature (1)..(1826): Ceres Seq. ID no. 12415154
  misc_feature (1)..(1826): Ortholog of  Ceres SEQ ID NO 15168378 as cited in SEQ ID NO 59129
  misc_feature (1)..(1826): Ortholog of  Ceres SEQ ID NO 13584744 as cited in SEQ ID NO 69137
gactcagtcaatctcgccttgctctcctcttcgacccatcgtcggttcctgggatcagcatcgacgagcaggatttttccggctgtggaggattactgctgcttgacaaatccgagcgcaaaggttgcttcctgacgcgttcccccatggcacgagcaggagcacgagcacgagcacgagcaggagaaggcggctagaaggttcctgctcccgggcgtgacctctcacacggcatggtcgttgcttcgccggggaggcgcagcggggatggtcgataggagcagggccgtgctcatcggggtcaccgccggcgtcgcggccgcgctggtcgcggcggcgggcgtgcttctggccgtctggctctaccgccggcgggccagcgtcgccgcacggacgcgctccccggagtcgccctcggcgacgctgcgggccggcggcgccggtcgcgccagcctcgactccagcgtctccgtctcggtggtctccgagagcgccgccgactggggccacccgccaccgcacaaacgcgccgcgttctgggcctggagaggcggcgccggccacaacggcagggaggcgccaccgctgtccgtctccgggatcccaaaataccattacaaggatctgcagaaggctaccagcaactttaccacaattcttgggcaaggatcgttcggccctgtgtacaaagctgtaatggccactggtgaagtggtagctgtaaaggtgctcgcgagtgattcaaggcaaggggaaagaaagttccagactgaggtagcattgcttagcaggttgcatcataggaatcttgttaatttggttgggtattgtgtagaaaaaggtcagcgcattctgatttatgagtacatgagcaatgggagtttggcaagacttttatatggcgacaataaacgaagtttgagctggcaagaaaggctgcaaattgctcacgatgtttctcatgggattgagtacctgcatgaaggggctgttccttctgttattcacagggacctaaagtctgataatatacttttggaccattcaatgagagccaaggttgcagactttggtctatcaaaggaggaagtgtatgatggaaggaagtctggccttaagggcacctatggctatatggatcctgattacatgtccacaaataagctaacaaagaagagcgacgtgtatagctttggcataatactttttgaactgataactgccataaatccacaacaaggtctgatggagtacattaatctggcagcgattggaggggaggggagggttgattgggacgagatactggacaaggacctcctagtagggaacatccctgaagaggttcggatgcttgctgatgttgcctaccgatgcgttaacaagaatccgaggaagcgcccctggatatcagaggtcacacaggccatctcaagactcagacagcaccagctgataaagcatgatgcgataactctgccgaggagtgagaccaggaccgtccttaggaggatagactaccagcacgtggagcttagtgacctcactagcatcaaagaacttacgccgataagggcatcatgaactcgtgagcttgttctagtatgtaggttgctttatagagttagatttggacttggttcggcgatgttgtagctgtttgatgaaagcatcaggtagctagatcgttgaaagatgtcttggctgcaatgagagctctccttaattggagttctgtactgacctgaggtttgaaatcgttgtaaaaaaatcaacagtagtagctgtagcatttgataaaaaaagactttataaactgcattttt

SEQ ID NO: 16738 - protein, 438 aa, Zea mays subsp. mays
  peptide (1)..(438): Ceres Seq. ID no. 12415155
MVDRSRAVLIGVTAGVAAALVAAAGVLLAVWLYRRRASVAARTRSPESPSATLRAGGAGRASLDSSVSVSVVSESAADWGHPPPHKRAAFWAWRGGAGHNGREAPPLSVSGIPKYHYKDLQKATSNFTTILGQGSFGPVYKAVMATGEVVAVKVLASDSRQGERKFQTEVALLSRLHHRNLVNLVGYCVEKGQRILIYEYMSNGSLARLLYGDNKRSLSWQERLQIAHDVSHGIEYLHEGAVPSVIHRDLKSDNILLDHSMRAKVADFGLSKEEVYDGRKSGLKGTYGYMDPDYMSTNKLTKKSDVYSFGIILFELITAINPQQGLMEYINLAAIGGEGRVDWDEILDKDLLVGNIPEEVRMLADVAYRCVNKNPRKRPWISEVTQAISRLRQHQLIKHDAITLPRSETRTVLRRIDYQHVELSDLTSIKELTPIRAS

SEQ ID NO: 16739 - protein, 295 aa, Zea mays subsp. mays
  peptide (1)..(295): Ceres Seq. ID no. 12415156
MATGEVVAVKVLASDSRQGERKFQTEVALLSRLHHRNLVNLVGYCVEKGQRILIYEYMSNGSLARLLYGDNKRSLSWQERLQIAHDVSHGIEYLHEGAVPSVIHRDLKSDNILLDHSMRAKVADFGLSKEEVYDGRKSGLKGTYGYMDPDYMSTNKLTKKSDVYSFGIILFELITAINPQQGLMEYINLAAIGGEGRVDWDEILDKDLLVGNIPEEVRMLADVAYRCVNKNPRKRPWISEVTQAISRLRQHQLIKHDAITLPRSETRTVLRRIDYQHVELSDLTSIKELTPIRAS

SEQ ID NO: 16740 - protein, 238 aa, Zea mays subsp. mays
  peptide (1)..(238): Ceres Seq. ID no. 12415157
MSNGSLARLLYGDNKRSLSWQERLQIAHDVSHGIEYLHEGAVPSVIHRDLKSDNILLDHSMRAKVADFGLSKEEVYDGRKSGLKGTYGYMDPDYMSTNKLTKKSDVYSFGIILFELITAINPQQGLMEYINLAAIGGEGRVDWDEILDKDLLVGNIPEEVRMLADVAYRCVNKNPRKRPWISEVTQAISRLRQHQLIKHDAITLPRSETRTVLRRIDYQHVELSDLTSIKELTPIRAS

SEQ ID NO: 16741 - DNA, 1386 bp, Zea mays subsp. mays; identical to SEQ ID NO: 6848
  misc_feature (1)..(1386): Ceres Seq. ID no. 13492826
  misc_feature (1)..(1386): Ortholog of  Ceres SEQ ID NO 14312320 as cited in SEQ ID NO 59385

SEQ ID NO: 16742 - protein, 342 aa, Zea mays subsp. mays; identical to SEQ ID NO: 6849
  peptide (1)..(342): Ceres Seq. ID no. 13492827

SEQ ID NO: 16743 - protein, 230 aa, Zea mays subsp. mays; identical to SEQ ID NO: 6850
  peptide (1)..(230): Ceres Seq. ID no. 13492828

SEQ ID NO: 16744 - protein, 216 aa, Zea mays subsp. mays; identical to SEQ ID NO: 6851
  peptide (1)..(216): Ceres Seq. ID no. 13492829

SEQ ID NO: 16745 - DNA, 1638 bp, Zea mays subsp. mays
  misc_feature (1)..(1638): Ceres Seq. ID no. 12369305
  misc_feature (1)..(1638): Ortholog of  Ceres SEQ ID NO 15177221 as cited in SEQ ID NO 53046
  misc_feature (1)..(1638): Ortholog of  Ceres SEQ ID NO 15170209 as cited in SEQ ID NO 58562
  misc_feature (1)..(1638): Ortholog of  Ceres SEQ ID NO 14315134 as cited in SEQ ID NO 59476
  misc_feature (1)..(1638): Ortholog of  Ceres SEQ ID NO 12616332 as cited in SEQ ID NO 63449
  misc_feature (1)..(1638): Ortholog of  Ceres SEQ ID NO 13597498 as cited in SEQ ID NO 64648
  misc_feature (1)..(1638): Ortholog of  Ceres SEQ ID NO 14308053 as cited in SEQ ID NO 67790
gggcgtccatgtcctgctgctgccgccgcgggacctgagaggagaaggacgaggacgaggtggtggttggcggcgtcgcgccgacggcggacatgggttggaggcggggaggaggcgcggatggcgtggccaggagatgggtgctgctgctatgcgtcgggagcttctgcctcggcctgctcttcaccgacaggatgtggagcttgccagaagcagatgaggtagcagtactcccaaatttaagaagagaggaagaggctgagcgcaagactggagactgtaatgtaggcaaagttcaaggaaaacacgattacaatgacatgttacgtgtctcagatgctcaccataattcacagactttggataaggcaatagcgaacttggagacagagctctctgcggcaagaactctacaagattctttcctcaatggatctccagtgcaagaagattacaaggcttcagagtctaccggtaggcgcaagtaccttatggtaataggtatcaacactgcttttagcagtcgcaagagaagggattctatccgcaacacctggatgcctacaggggaaataaggaaaaagctggaggaagaaagagggatcatagtttttgtaattggtcacagtgctatttcaggtggaattgtcgatagagcaattcaggcagaggataagaaacatggagacttcatgaggctggatcatgttgaaggataccttgagctgtcagggaaaaccaggacatactttgcaacagctgttgctttatgggatgctaacttctatgtgaaggttgacgacgatgtacatgttaatatagcaacacttggaaatatcttatccaaacatatttcaaagcccagggtatacattggatgcatgaagtctggccctgtcctctctgacaaggatgtgaggtactatgaaccagagcactggaaatttggggaagtgggtaataaatattttcggcatgccaccggtcaactgtacgctatttcaaaagatttggcagcctacatatcgctaaacaagcatgttttgcacaaatatatcaacgaggacgtgtctttgggagcttggttgatagggttagatgttgagcatattgatgaccgcagactatgctgcggcactccaccagattgcgaatggaaagctcaggctggtaacacctgcgctgcctcgttcgattggaaatgcagcggtatctgcaactctgtgcagaacatctggggggttcataagaagtgttcagaagatgaaaaggcgctgctgactgtttctttctaatcaaagtgcagtgctgtgtatctgtacattgtgcaaagaatgtgtccggttcataggtggctaaatggcttacaattagacaacaccactggagcaggccgcaattttactcagcgtccgctggtggcactctgaggatttaaggggtgtagagctgaccgattcttttagcaagttggccagttgggtggtcatacatgtattgacctgataaaacaaacactatccgacgagttcagccagggctgtctgagctaagacaggatgaataacggctggttgagctcatgcaagacatttatttggttgattgtacaaattaatgcagaccggtgtagatgct

SEQ ID NO: 16746 - protein, 400 aa, Zea mays subsp. mays
  peptide (1)..(400): Ceres Seq. ID no. 12369306
MGWRRGGGADGVARRWVLLLCVGSFCLGLLFTDRMWSLPEADEVAVLPNLRREEEAERKTGDCNVGKVQGKHDYNDMLRVSDAHHNSQTLDKAIANLETELSAARTLQDSFLNGSPVQEDYKASESTGRRKYLMVIGINTAFSSRKRRDSIRNTWMPTGEIRKKLEEERGIIVFVIGHSAISGGIVDRAIQAEDKKHGDFMRLDHVEGYLELSGKTRTYFATAVALWDANFYVKVDDDVHVNIATLGNILSKHISKPRVYIGCMKSGPVLSDKDVRYYEPEHWKFGEVGNKYFRHATGQLYAISKDLAAYISLNKHVLHKYINEDVSLGAWLIGLDVEHIDDRRLCCGTPPDCEWKAQAGNTCAASFDWKCSGICNSVQNIWGVHKKCSEDEKALLTVSF

SEQ ID NO: 16747 - protein, 366 aa, Zea mays subsp. mays
  peptide (1)..(366): Ceres Seq. ID no. 12369307
MWSLPEADEVAVLPNLRREEEAERKTGDCNVGKVQGKHDYNDMLRVSDAHHNSQTLDKAIANLETELSAARTLQDSFLNGSPVQEDYKASESTGRRKYLMVIGINTAFSSRKRRDSIRNTWMPTGEIRKKLEEERGIIVFVIGHSAISGGIVDRAIQAEDKKHGDFMRLDHVEGYLELSGKTRTYFATAVALWDANFYVKVDDDVHVNIATLGNILSKHISKPRVYIGCMKSGPVLSDKDVRYYEPEHWKFGEVGNKYFRHATGQLYAISKDLAAYISLNKHVLHKYINEDVSLGAWLIGLDVEHIDDRRLCCGTPPDCEWKAQAGNTCAASFDWKCSGICNSVQNIWGVHKKCSEDEKALLTVSF

SEQ ID NO: 16748 - protein, 324 aa, Zea mays subsp. mays
  peptide (1)..(324): Ceres Seq. ID no. 12369308
MLRVSDAHHNSQTLDKAIANLETELSAARTLQDSFLNGSPVQEDYKASESTGRRKYLMVIGINTAFSSRKRRDSIRNTWMPTGEIRKKLEEERGIIVFVIGHSAISGGIVDRAIQAEDKKHGDFMRLDHVEGYLELSGKTRTYFATAVALWDANFYVKVDDDVHVNIATLGNILSKHISKPRVYIGCMKSGPVLSDKDVRYYEPEHWKFGEVGNKYFRHATGQLYAISKDLAAYISLNKHVLHKYINEDVSLGAWLIGLDVEHIDDRRLCCGTPPDCEWKAQAGNTCAASFDWKCSGICNSVQNIWGVHKKCSEDEKALLTVSF

SEQ ID NO: 16749 - DNA, 1480 bp, Zea mays subsp. mays
  misc_feature (1)..(1480): Ceres Seq. ID no. 12368002
  misc_feature (1)..(1480): Ortholog of  Ceres SEQ ID NO 13639514 as cited in SEQ ID NO 55736
  misc_feature (1)..(1480): Ortholog of  Ceres SEQ ID NO 14312254 as cited in SEQ ID NO 59148
  misc_feature (1)..(1480): Ortholog of  Ceres SEQ ID NO 13662804 as cited in SEQ ID NO 65394
  misc_feature (1)..(1480): Ortholog of  Ceres SEQ ID NO 13656519 as cited in SEQ ID NO 69226
tgggccttgcagtttttggttgtgtatcggggaaatggcaatcgacgacgaatcgccgatcagagtcaacagcagaggcggcggcggcatggtaacctggatagcacaccttcttttgtactctcttcttgccttgttttttttcccctttcgatgccctgtttctttgctctctgttgggctttctttgctctctgttgggctggcgctaacatggcggcgccgcgccggatcgaatgcggcagggaggaggggagcgcgacggggcggagaaccagcggtggccgccgtggctcaagccgctgctggggacgagcttcttcggccaatgcaagctgcacgcggacgcgcacaagagcgagtgcaacatgtactgcctcgcctgcatgaacggcgcgctctgctcccagtgcctcgcctaccaccgcgaccaccacgccatccagatacggaggtcctcctaccacgacgtgatccgggtgtcggagatccagaaggtgctggacatctccggcgtgcagacgtacatcatcaacagcgcgcgcgtggtgttcctgaacgagcgcccgcagccgaggcccggcaagggcgtcaccaacacctgcgaggtctgccagcgcagcctcctcgacaccttccgcttctgctccctcgggtgcaagatcgtggggacctccggtgacttgcgcgtccggaagaagcaggccgtcgtcaagaagaacaagaagaagaagcaggcgcagcagcagcagcagcacaggggcgccgcgttggactcggaggacgactcttcgtccaccagcaccagccgcggcagcgacaggagcagcgtggtgcagagcttcaccccgtcgaccccgccggcgacgcccaacagcttccgaaccgggaagcggcgcaagggcgtgccgcaccggtcgccgttcggcagcctcgtgctggagttctagaaagcagcggttctataccatctataggtgttgccggatcggcctcggccggtctacatagttcatagccacccaagaaaaaaaaaacggagctagtagtagcaactatagcaagcaataaccaaggccccactgcacgcccgcgcttctggacgacgaggccggtgcaatgtggcacgtacgtcgtacggtacggttacctctacttccattccatagtactgtactactactgtagtttacatgcagtcgcagagctgtgctggtagtgacaacggtttgggttttggtgcctgtaaaaggaaacgaggtagttgtagcagttacccttgtcgtcaccactcatcagcagccagccactactgaattacatagtatataggtgtttcctagttttaccagcgcttgatatagatgtggatgtacatatatacatatactgtcacagatggggaacggtaggagtgttgttgttggtactggtgtttgcgtttgttgcctgtaataataaagaggataagaatgctgcg

SEQ ID NO: 16750 - protein, 237 aa, Zea mays subsp. mays
  peptide (1)..(237): Ceres Seq. ID no. 12368003
MRQGGGERDGAENQRWPPWLKPLLGTSFFGQCKLHADAHKSECNMYCLACMNGALCSQCLAYHRDHHAIQIRRSSYHDVIRVSEIQKVLDISGVQTYIINSARVVFLNERPQPRPGKGVTNTCEVCQRSLLDTFRFCSLGCKIVGTSGDLRVRKKQAVVKKNKKKKQAQQQQQHRGAALDSEDDSSSTSTSRGSDRSSVVQSFTPSTPPATPNSFRTGKRRKGVPHRSPFGSLVLEF

SEQ ID NO: 16751 - protein, 226 aa, Zea mays subsp. mays
  peptide (1)..(226): Ceres Seq. ID no. 12368004
GPCSFWLCIGEMAIDDESPIRVNSRGGGGMVTWIAHLLLYSLLALFFFPFRCPVSLLSVGLSLLSVGLALTWRRRAGSNAAGRRGARRGGEPAVAAVAQAAAGDELLRPMQAARGRAQERVQHVLPRLHERRALLPVPRLPPRPPRHPDTEVLLPRRDPGVGDPEGAGHLRRADVHHQQRARGVPERAPAAEARQGRHQHLRGLPAQPPRHLPLLLPRVQDRGDLR

SEQ ID NO: 16752 - protein, 215 aa, Zea mays subsp. mays
  peptide (1)..(215): Ceres Seq. ID no. 12368005
MAIDDESPIRVNSRGGGGMVTWIAHLLLYSLLALFFFPFRCPVSLLSVGLSLLSVGLALTWRRRAGSNAAGRRGARRGGEPAVAAVAQAAAGDELLRPMQAARGRAQERVQHVLPRLHERRALLPVPRLPPRPPRHPDTEVLLPRRDPGVGDPEGAGHLRRADVHHQQRARGVPERAPAAEARQGRHQHLRGLPAQPPRHLPLLLPRVQDRGDLR

SEQ ID NO: 16753 - DNA, 1363 bp, Zea mays subsp. mays
  misc_feature (1)..(1363): Ceres Seq. ID no. 12374769
  misc_feature (1)..(1363): Ortholog of  Ceres SEQ ID NO 12364737 as cited in SEQ ID NO 51089
  misc_feature (1)..(1363): Ortholog of  Ceres SEQ ID NO 14306553 as cited in SEQ ID NO 53121
  misc_feature (1)..(1363): Ortholog of  Ceres SEQ ID NO 13582301 as cited in SEQ ID NO 56509
  misc_feature (1)..(1363): Ortholog of  Ceres SEQ ID NO 13595567 as cited in SEQ ID NO 56760
  misc_feature (1)..(1363): Ortholog of  Ceres SEQ ID NO 13655302 as cited in SEQ ID NO 63307
  misc_feature (1)..(1363): Ortholog of  Ceres SEQ ID NO 13597380 as cited in SEQ ID NO 64054
  misc_feature (1)..(1363): Ortholog of  Ceres SEQ ID NO 12625474 as cited in SEQ ID NO 64169
  misc_feature (1)..(1363): Ortholog of  Ceres SEQ ID NO 13597502 as cited in SEQ ID NO 64681
atccattcatcacccatcgtgtgcttcagctactatgatataatagtgcagctaattaattaagcgcggacgacgacgtacgtaacagtatggctgctgctgctgctactgtcgtcacaccatcctcgcctcgctccatggctgttgccgccgccattgccttcttcttcgcggtgaccgcggcggcagcgtcgccggtgcccgcgatctacgtgctcggggactccctggcggacgtcgggaacaacaaccacctggtgacgctgctcaaggccgacttcccgcacaacggcatcgactacccgggccagaaggccaccggccgcttcagcaacggcaagaactccgtcgacttcctcgccgaaaacctggggctggcgacctcgccgccgtacctcgccttgtcgagcagcaaccccaactacgccaacggtgtcaacttcgcttccggtggcgccggagtctccaacctcacaaacaaggaccaatgtatcagcttcgacaagcagatcgactacttcgcgacggtgtacgcgtcgctggtgcagagcctggggcaggcgcaggccacggctcacctggccaagtccctcttcgccatcaccatcggcagcaacgacatcatccactacgccaaatccaactccgccgccaataccaagcaggccagtgccagtggcgccgccgccgacccatcgcagcagttcgtggacgcgctgatccacacgctcaccgggcagctgcagcgcctctacgccctgggcgcgcgcaaggtgctgttcctgggcacggggcccgtgggtgctgcccgtcgctgcgggagctcagccccgccaaggactgcagcgccgaggccaacggcatctccgtgcgctacaacgccggcgcggcgtccctcctcggcaccatggccgcgcgctacgcggacatgcactacgcgctcttcgactcctccgccgcgctgctccagtacatcgaccacccggcggcgcacgggttcaccgaggccaaggccgcctgctgcgggctcggggacatgaacgccaagatcgggtgcaccccgctaagcttctactgcgacaacaggaccagccacgtcttctgggacttctaccatcccacggagaccaccgcccggatgctcaccagcacggcgttcgacggctcggcgccgctcatcttccccatgaacataaggcagctcagcgccatatagctaggccaccagaattagagtgctgtccttctaccttgtatatgttgttgtgtatcacatagtggccttggacgtatgtacgtcgtcctagaagaaatcaaacgatatagcaaacatcatagaagcttgcattatattggcaatgct

SEQ ID NO: 16754 - protein, 316 aa, Zea mays subsp. mays
  peptide (1)..(316): Ceres Seq. ID no. 12374770
MAAAAATVVTPSSPRSMAVAAAIAFFFAVTAAAASPVPAIYVLGDSLADVGNNNHLVTLLKADFPHNGIDYPGQKATGRFSNGKNSVDFLAENLGLATSPPYLALSSSNPNYANGVNFASGGAGVSNLTNKDQCISFDKQIDYFATVYASLVQSLGQAQATAHLAKSLFAITIGSNDIIHYAKSNSAANTKQASASGAAADPSQQFVDALIHTLTGQLQRLYALGARKVLFLGTGPVGAARRCGSSAPPRTAAPRPTASPCATTPARRPSSAPWPRATRTCTTRSSTPPPRCSSTSTTRRRTGSPRPRPPAAGSGT

SEQ ID NO: 16755 - protein, 300 aa, Zea mays subsp. mays
  peptide (1)..(300): Ceres Seq. ID no. 12374771
MAVAAAIAFFFAVTAAAASPVPAIYVLGDSLADVGNNNHLVTLLKADFPHNGIDYPGQKATGRFSNGKNSVDFLAENLGLATSPPYLALSSSNPNYANGVNFASGGAGVSNLTNKDQCISFDKQIDYFATVYASLVQSLGQAQATAHLAKSLFAITIGSNDIIHYAKSNSAANTKQASASGAAADPSQQFVDALIHTLTGQLQRLYALGARKVLFLGTGPVGAARRCGSSAPPRTAAPRPTASPCATTPARRPSSAPWPRATRTCTTRSSTPPPRCSSTSTTRRRTGSPRPRPPAAGSGT

SEQ ID NO: 16756 - protein, 242 aa, Zea mays subsp. mays
  peptide (1)..(242): Ceres Seq. ID no. 12374772
MYQLRQADRLLRDGVRVAGAEPGAGAGHGSPGQVPLRHHHRQQRHHPLRQIQLRRQYQAGQCQWRRRRPIAAVRGRADPHAHRAAAAPLRPGRAQGAVPGHGARGCCPSLRELSPAKDCSAEANGISVRYNAGAASLLGTMAARYADMHYALFDSSAALLQYIDHPAAHGFTEAKAACCGLGDMNAKIGCTPLSFYCDNRTSHVFWDFYHPTETTARMLTSTAFDGSAPLIFPMNIRQLSAI

SEQ ID NO: 16757 - DNA, 1865 bp, Zea mays subsp. mays
  misc_feature (1)..(1865): Ceres Seq. ID no. 12415026
  misc_feature (1)..(1865): Ortholog of  Ceres SEQ ID NO 14312605 as cited in SEQ ID NO 0
  misc_feature (1)..(1865): Ortholog of  Ceres SEQ ID NO 15176145 as cited in SEQ ID NO 0
acgaaagctactagcaacatctggttccactctcgccggcatctcccccacccatccccaagtccagcacacacccgaagcgccgccgctagggtttggtccgacagccgcgaaacctagactttactgctccgacaggctgccattcactaatctagctagctccggttgggagctagggtttagctgagcttcgggtcgcggcggtgcggcatggcggggtacggggaagagaaccagaacaccatgagcgggtacgaggaagaggaggaagaagaggttgaagaagtcgaggaggtgtacgaggaggaggaggaggaggaggaggaggaggaggaggaggacggggagggggaagcggacgagggggctgtagcctccgagccagcggcgatggcggccgagacgagaagcgttgttggaggccggggcttagcgaaggccgttgggaatgttgataccggtggcgaggatgggagggatgcagattccagtggcggtgacgcctcggggaagattttcgtagggggtgtagcttgggagacaactgaagaaacattcacaaagcattttcagaagtatggagctataactgattctgtgatcatgaatgacaagcatactaggatgcctcgcggatttggatttgttacattttccgatccatctgtgcttgacagggttctagaggatgaacatgtcatagatggaagaacagttgaagtcaaaaggactgttccaaaagaggaaatgtcatcgaaagacggtcctaagacaaaaaagatctttgtgggtggtattccaccatctcttaccgaagataaattaaaggagcacttctcatcgtatgggaaggtggttgagcatcagattatgcttgaccatagcactggacgctcacgtggctttggatttgtcacatttgaaagcgaggatgctgttgaaagggttatgtcagaggggagaatcatgatcttggagggaaacaggttgaaattaagaaagctgaaccaaaaaaacctggtgtgggtgattcaagctcaaatggaagacacagtcgtggtggtggtcatcgtgattcataccgtggtagtggtggcaatggcttttctgggaacagcagtggtggtggctatggatacagtggtggctaccgatcaactgctgcagcacattatggcagcacagcatatggtgcctatggcagagggtatggatacggtggtactgctggctatggcttaggtatggctctgcatatggtggctccatgtatggaggtccatatggtgcctacgcggcatatggtggtgcctatggaggtgtgcatatggtgctccaggagggtatggcgcgggaggatatggcagctacggtggggctggaggcatgggtggtggtggcagcgctggtggtcggggctccagcagataccacccttatggaaaatgataatccattcactgcctttgccttcctctaggatctgataataaagctatacattcccaccgagaaaatggaacattccattcaccttgttgaatcagcggcatctgaacatttttttcctggaacaaagattctagtctgtagtcgctgaaccctgaactgcctcatcccacccccaccccctgagctttctgtagaaggtgcagctcaaattctcgtaggcatgagccttagaagacccttgaaactacaagctttgtggtaacaatatggtgtcatggaacatatgtattttgatgtaaaacattcgctcactgaccagtgacttcgccatctctgcttatgtatgtagagaagcttagcaaaggattggactgatactattgaattgtgtgggtttctatttgtctcct

SEQ ID NO: 16758 - protein, 343 aa, Zea mays subsp. mays
  peptide (1)..(343): Ceres Seq. ID no. 12415027
MAGYGEENQNTMSGYEEEEEEEVEEVEEVYEEEEEEEEEEEEEDGEGEADEGAVASEPAAMAAETRSVVGGRGLAKAVGNVDTGGEDGRDADSSGGDASGKIFVGGVAWETTEETFTKHFQKYGAITDSVIMNDKHTRMPRGFGFVTFSDPSVLDRVLEDEHVIDGRTVEVKRTVPKEEMSSKDGPKTKKIFVGGIPPSLTEDKLKEHFSSYGKVVEHQIMLDHSTGRSRGFGFVTFESEDAVERVMSEGRIMILEGNRLKLRKLNQKNLVWVIQAQMEDTVVVVVIVIHTVVVVAMAFLGTAVVVAMDTVVATDQLLQHIMAAQHMVPMAEGMDTVVLLAMA

SEQ ID NO: 16759 - protein, 332 aa, Zea mays subsp. mays
  peptide (1)..(332): Ceres Seq. ID no. 12415028
MSGYEEEEEEEVEEVEEVYEEEEEEEEEEEEEDGEGEADEGAVASEPAAMAAETRSVVGGRGLAKAVGNVDTGGEDGRDADSSGGDASGKIFVGGVAWETTEETFTKHFQKYGAITDSVIMNDKHTRMPRGFGFVTFSDPSVLDRVLEDEHVIDGRTVEVKRTVPKEEMSSKDGPKTKKIFVGGIPPSLTEDKLKEHFSSYGKVVEHQIMLDHSTGRSRGFGFVTFESEDAVERVMSEGRIMILEGNRLKLRKLNQKNLVWVIQAQMEDTVVVVVIVIHTVVVVAMAFLGTAVVVAMDTVVATDQLLQHIMAAQHMVPMAEGMDTVVLLAMA

SEQ ID NO: 16760 - protein, 283 aa, Zea mays subsp. mays
  peptide (1)..(283): Ceres Seq. ID no. 12415029
MAAETRSVVGGRGLAKAVGNVDTGGEDGRDADSSGGDASGKIFVGGVAWETTEETFTKHFQKYGAITDSVIMNDKHTRMPRGFGFVTFSDPSVLDRVLEDEHVIDGRTVEVKRTVPKEEMSSKDGPKTKKIFVGGIPPSLTEDKLKEHFSSYGKVVEHQIMLDHSTGRSRGFGFVTFESEDAVERVMSEGRIMILEGNRLKLRKLNQKNLVWVIQAQMEDTVVVVVIVIHTVVVVAMAFLGTAVVVAMDTVVATDQLLQHIMAAQHMVPMAEGMDTVVLLAMA

SEQ ID NO: 16761 - DNA, 1522 bp, Zea mays subsp. mays
  misc_feature (1)..(1522): Ceres Seq. ID no. 12415477
  misc_feature (1)..(1522): Ortholog of  Ceres SEQ ID NO 15180447 as cited in SEQ ID NO 0
acagtctccagggtagctagccaagctaccaagctcgtcaggagcgagagaaagaggccggcggtgcgcggggatgatgatgatgagcagcggccgggcgggcggcggggccaccgcggggcggtacccgttcacggcgtcgcagtggcaggagctggagcaccaggcgctcatctacaagtgcctggcgtccggcaagcccatcccgtcctacctcatgccgccgctccgccgcatcctcgactccgccctcgccacgtcgccgtccctcgcctacccgccgcaaccctcgctgggctggggctgcttcgggatgggcttcacccggaaggccgacgaggacccggagcccgggcggtgccggcgcacggacggcaagaagtggcgctgctccaaggaggcgtacccggactccaagtactgcgagaagcacatgcaccggggcaagaaccgttcaagaaagcctgtggaaatgtccttggccacgccggccccggcgccggcccccgccgccgccacaaccgccaccgccacctcatccccggcgccgtcctaccaccgcccggcccacgacgccacgccgtctccgtaccacgcgctgtatggaggcggcggcggcggcggtagcccttactcggcgtcggcacgcccaggagcaaccggaggcggcggcgcgtaccaccacgcgcagcatgtgagcccattccacctccacctcgagaccacccacccgcacccgccgccgccctacaactactccgccgaccagagggactacgcgtacgggcacgcggccgccaaggaggtcggcgagcacgccttcttctcggacggcgcgggcgagcgggtcgaccgccaggccgcggcggggcagtggcagttcaggcagctcggggtggagacgaagccgggccccacgccgctgttccccgtcgccgggtacgggcacggcgcggcgtcgccgtacggcgtggagatgggcaagtacgacgacgagcaggaggagaggcgccgccagcactgcttcgttcttggagccggcctgcggctggagcggccgtcgtcgggccatggccatggccatgaccatgacgacgccgccgccgcgcagaagccgctccggcccttcttcgacgagtggccgcaccagaagggggacaaggccggttcgtggatggggctcgacggcgagacgcagctctccatttccatccccatggccgctaccgacctccccgtcacctcccgcttccgtaacgacgagtgatgccacatcaaacctggcgctggaaactcggaacgcatggtgctgatgctgaccatgagatgtaccgtttcgctcaaggccggccgtcatcaccacggccacatcaaaccggtttgaagaacttgggaaggccgaatgaaacctccagaagaatgatctgtcctcttttttctgcatttctttttctcttagtattacgcagtattgcttcgcgtgtaatatgttttcctgtaatatcaagtgagggcgtttctg

SEQ ID NO: 16762 - protein, 397 aa, Zea mays subsp. mays
  peptide (1)..(397): Ceres Seq. ID no. 12415478
MMMMSSGRAGGGATAGRYPFTASQWQELEHQALIYKCLASGKPIPSYLMPPLRRILDSALATSPSLAYPPQPSLGWGCFGMGFTRKADEDPEPGRCRRTDGKKWRCSKEAYPDSKYCEKHMHRGKNRSRKPVEMSLATPAPAPAPAAATTATATSSPAPSYHRPAHDATPSPYHALYGGGGGGGSPYSASARPGATGGGGAYHHAQHVSPFHLHLETTHPHPPPPYNYSADQRDYAYGHAAAKEVGEHAFFSDGAGERVDRQAAAGQWQFRQLGVETKPGPTPLFPVAGYGHGAASPYGVEMGKYDDEQEERRRQHCFVLGAGLRLERPSSGHGHGHDHDDAAAAQKPLRPFFDEWPHQKGDKAGSWMGLDGETQLSISIPMAATDLPVTSRFRNDE

SEQ ID NO: 16763 - protein, 396 aa, Zea mays subsp. mays
  peptide (1)..(396): Ceres Seq. ID no. 12415479
MMMSSGRAGGGATAGRYPFTASQWQELEHQALIYKCLASGKPIPSYLMPPLRRILDSALATSPSLAYPPQPSLGWGCFGMGFTRKADEDPEPGRCRRTDGKKWRCSKEAYPDSKYCEKHMHRGKNRSRKPVEMSLATPAPAPAPAAATTATATSSPAPSYHRPAHDATPSPYHALYGGGGGGGSPYSASARPGATGGGGAYHHAQHVSPFHLHLETTHPHPPPPYNYSADQRDYAYGHAAAKEVGEHAFFSDGAGERVDRQAAAGQWQFRQLGVETKPGPTPLFPVAGYGHGAASPYGVEMGKYDDEQEERRRQHCFVLGAGLRLERPSSGHGHGHDHDDAAAAQKPLRPFFDEWPHQKGDKAGSWMGLDGETQLSISIPMAATDLPVTSRFRNDE

SEQ ID NO: 16764 - protein, 395 aa, Zea mays subsp. mays
  peptide (1)..(395): Ceres Seq. ID no. 12415480
MMSSGRAGGGATAGRYPFTASQWQELEHQALIYKCLASGKPIPSYLMPPLRRILDSALATSPSLAYPPQPSLGWGCFGMGFTRKADEDPEPGRCRRTDGKKWRCSKEAYPDSKYCEKHMHRGKNRSRKPVEMSLATPAPAPAPAAATTATATSSPAPSYHRPAHDATPSPYHALYGGGGGGGSPYSASARPGATGGGGAYHHAQHVSPFHLHLETTHPHPPPPYNYSADQRDYAYGHAAAKEVGEHAFFSDGAGERVDRQAAAGQWQFRQLGVETKPGPTPLFPVAGYGHGAASPYGVEMGKYDDEQEERRRQHCFVLGAGLRLERPSSGHGHGHDHDDAAAAQKPLRPFFDEWPHQKGDKAGSWMGLDGETQLSISIPMAATDLPVTSRFRNDE

SEQ ID NO: 16765 - DNA, 1306 bp, Zea mays subsp. mays
  misc_feature (1)..(1306): Ceres Seq. ID no. 12362545
  misc_feature (1)..(1306): Ortholog of  Ceres SEQ ID NO 13502952 as cited in SEQ ID NO 62271
  misc_feature (1)..(1306): Ortholog of  Ceres SEQ ID NO 13502973 as cited in SEQ ID NO 68052
  misc_feature (1)..(1306): Ortholog of  Ceres SEQ ID NO 13596000 as cited in SEQ ID NO 68188
aaatccagttgggaatcccacgaagattcaccggagctggtgaggttgtaagccgggactgccgccactgccaaattgcgtgggtgccgccgtttggggcctggaaccgtgccagggagcttcgcggtgtagtaaggatgctggacggttgatgcttcgggctcgggaccatgtggaacaacagcaatccctcgccggagcacttttgtcgggccagaaccgccgtgcgccgtggccatggtatttagctgcgcgatttctgcaaggttacgagtcacctgaagagcaagtttgtacctggaatctcaagtcccaggtgacaagaagagctatcggatggagctcaacgagttcgccgacatgaccaacgacgagttcatggccatgtacactggcttgagaccagtcccggcaggggcaaagaagatggccggtttcaagtacgggaacgtgactctttcagacgccgacgacgaccagcagacggttgactggcggcagaaaggcgcggtcaccggtatcaaggaccagcgccagtgtggttgttgctgggccttcgctgcggtggcggccgtggagggcatccaccagatcacgacgggcaacttggtgtccttatcggagcagcaggtgctggactgcgacaccgacgggaacaacggctgcaacggcggctacatcgacaacgccttccaatacatcgtcggcaacggcggcctcgccaccgaggacgcctacccgtacaccgccgcgcaggccatgtgccagtccgtgcagccggtggccgccatcagcggctaccaggacgtgccgagcggcgacgaggcagcgctcgccgcggccgtcgccaaccagccggtgtcggttgccatcgacgcacataacttccagctctacggtggcggggtgatgaccgcagccagctgcagcacgccaccgaacctgaaccacgccgtcacggcggtaggctacggcacggcggaggatgggaccccgtactggctgctcaagaaccagtggggccagaactggggagagggaggatacctcaggcttgagagaggcgcaaacgcctgtggggtcgcccagcaagcctcctacccagtcgcatgatgaatatatagataacgtacgggtcgaaacgaaaacatatatattctacatacacgaaggcatgcataagaatgactactaaggaataaagcatgtacacacattgatagtacatacatacatagcgtaaacttgtaacacaattgtcatgcaacattccaaatataatttatttctacttggccttcttttc

SEQ ID NO: 16766 - protein, 258 aa, Zea mays subsp. mays
  peptide (1)..(258): Ceres Seq. ID no. 12362546
MELNEFADMTNDEFMAMYTGLRPVPAGAKKMAGFKYGNVTLSDADDDQQTVDWRQKGAVTGIKDQRQCGCCWAFAAVAAVEGIHQITTGNLVSLSEQQVLDCDTDGNNGCNGGYIDNAFQYIVGNGGLATEDAYPYTAAQAMCQSVQPVAAISGYQDVPSGDEAALAAAVANQPVSVAIDAHNFQLYGGGVMTAASCSTPPNLNHAVTAVGYGTAEDGTPYWLLKNQWGQNWGEGGYLRLERGANACGVAQQASYPVA

SEQ ID NO: 16767 - protein, 250 aa, Zea mays subsp. mays
  peptide (1)..(250): Ceres Seq. ID no. 12362547
MTNDEFMAMYTGLRPVPAGAKKMAGFKYGNVTLSDADDDQQTVDWRQKGAVTGIKDQRQCGCCWAFAAVAAVEGIHQITTGNLVSLSEQQVLDCDTDGNNGCNGGYIDNAFQYIVGNGGLATEDAYPYTAAQAMCQSVQPVAAISGYQDVPSGDEAALAAAVANQPVSVAIDAHNFQLYGGGVMTAASCSTPPNLNHAVTAVGYGTAEDGTPYWLLKNQWGQNWGEGGYLRLERGANACGVAQQASYPVA

SEQ ID NO: 16768 - protein, 244 aa, Zea mays subsp. mays
  peptide (1)..(244): Ceres Seq. ID no. 12362548
MAMYTGLRPVPAGAKKMAGFKYGNVTLSDADDDQQTVDWRQKGAVTGIKDQRQCGCCWAFAAVAAVEGIHQITTGNLVSLSEQQVLDCDTDGNNGCNGGYIDNAFQYIVGNGGLATEDAYPYTAAQAMCQSVQPVAAISGYQDVPSGDEAALAAAVANQPVSVAIDAHNFQLYGGGVMTAASCSTPPNLNHAVTAVGYGTAEDGTPYWLLKNQWGQNWGEGGYLRLERGANACGVAQQASYPVA

SEQ ID NO: 16769 - DNA, 1374 bp, Zea mays subsp. mays
  misc_feature (1)..(1374): Ceres Seq. ID no. 12415396
  misc_feature (1)..(1374): Ortholog of  Ceres SEQ ID NO 15171289 as cited in SEQ ID NO 51570
acttgccagttcccactcctaactctctcttcgtttactcttcttcccacccccagcgttcgcttccatccaagctcatatcatcatagatcgacggactaggccacgcgccccaatactcagaactagtcttgagtaaagcatggcgtcgtcttctccgtcctgccgtggcagcggcggcaagtcggacgtggaccggatcaagggcccctggagccccgaggaggacgaggccctgcagcgcctggtggcccgccacggcgcccgcaactggtccctcatcagccggtccatcccgggccgctccggcaagtcgtgccgcctccggtggtgcaaccagctgtcgccgcaggtggagcaccggcccttcacggccgaggaggacgacaccatcctccgcgcgcacgccaggttcggcaacaagtgggccaccatcgcgcgcctcctctccggccgcaccgacaacgccatcaagaaccactggaactccacgctaaagcgcaagtactacgccgccagcgacgctgttgttgctgacgctgacgacgagcgcccgctgaagcgcacaagcagcgacggccacccagggctctgcttcagccccggaagcccatccgggtccgacctcagcgactctagcaaccacagccttccctccgtcatgccgtcagccgcttctgctgccgccgtcacctcccaccagcagcagcagcacgtgtaccgccccgtgccgcgcgcgggcggcgtggtcatgctaccggtggcgcctcttgcgccgccgccgccgccacagcctccggcgacctccttatcactgtccctctccctgcccgggctggacggccagaagcccgaagcatcccaagcggttctgacgccggcaccggcaccgcctcaacctcctcttcagatacagcagcagcagcctgctccacctcagatgccgccaccacaagcccaaccgagcttgccgttccagctgcaggcggccgcgacgaacctcacgtcgcagcagccggcagcagcgccgttcagctcggagttcctgttgttgatgcaggagatgatccggatcgaggtacggaactacatgtccgggtcggggctcgatccgcgcaccgacggcgccgccgtgcacgccgtgagcaagcgtatgatgggtatggccaagatcgagtagtttcagcgcgcatgcacacagcggcagcagcaggcgtggaagatacaaaagaaaacgaaccgccgatcgatccgcggcggccagcgcgtgtatgaagtagtaatgaaccagcaagaacggcgtggccttgaaccatacggaggccgtgtggtgcggcaagtgaacagctccaaccatcggctttttagctcatg

SEQ ID NO: 16770 - protein, 345 aa, Zea mays subsp. mays
  peptide (1)..(345): Ceres Seq. ID no. 12415397
MASSSPSCRGSGGKSDVDRIKGPWSPEEDEALQRLVARHGARNWSLISRSIPGRSGKSCRLRWCNQLSPQVEHRPFTAEEDDTILRAHARFGNKWATIARLLSGRTDNAIKNHWNSTLKRKYYAASDAVVADADDERPLKRTSSDGHPGLCFSPGSPSGSDLSDSSNHSLPSVMPSAASAAAVTSHQQQQHVYRPVPRAGGVVMLPVAPLAPPPPPQPPATSLSLSLSLPGLDGQKPEASQAVLTPAPAPPQPPLQIQQQQPAPPQMPPPQAQPSLPFQLQAAATNLTSQQPAAAPFSSEFLLLMQEMIRIEVRNYMSGSGLDPRTDGAAVHAVSKRMMGMAKIE

SEQ ID NO: 16771 - protein, 172 aa, Zea mays subsp. mays
  peptide (1)..(172): Ceres Seq. ID no. 12415398
MPSAASAAAVTSHQQQQHVYRPVPRAGGVVMLPVAPLAPPPPPQPPATSLSLSLSLPGLDGQKPEASQAVLTPAPAPPQPPLQIQQQQPAPPQMPPPQAQPSLPFQLQAAATNLTSQQPAAAPFSSEFLLLMQEMIRIEVRNYMSGSGLDPRTDGAAVHAVSKRMMGMAKIE

SEQ ID NO: 16772 - DNA, 2015 bp, Zea mays subsp. mays; identical to SEQ ID NO: 6065
  misc_feature (1)..(2015): Ceres Seq. ID no. 12594596
  misc_feature (1)..(2015): Ortholog of  Ceres SEQ ID NO 14310841 as cited in SEQ ID NO 53666
  misc_feature (1)..(2015): Ortholog of  Ceres SEQ ID NO 15178736 as cited in SEQ ID NO 56439
  misc_feature (1)..(2015): Ortholog of  Ceres SEQ ID NO 14308493 as cited in SEQ ID NO 60320

SEQ ID NO: 16773 - protein, 583 aa, Zea mays subsp. mays; identical to SEQ ID NO: 6066
  peptide (1)..(583): Ceres Seq. ID no. 12594597

SEQ ID NO: 16774 - protein, 545 aa, Zea mays subsp. mays; identical to SEQ ID NO: 6067
  peptide (1)..(545): Ceres Seq. ID no. 12594598

SEQ ID NO: 16775 - protein, 520 aa, Zea mays subsp. mays; identical to SEQ ID NO: 6068
  peptide (1)..(520): Ceres Seq. ID no. 12594599

SEQ ID NO: 16776 - DNA, 1859 bp, Zea mays subsp. mays
  misc_feature (1)..(1859): Ceres Seq. ID no. 13492557
  misc_feature (1)..(1859): Ortholog of  Ceres SEQ ID NO 13592961 as cited in SEQ ID NO 20522
  misc_feature (1)..(1859): Ortholog of  Ceres SEQ ID NO 12583469 as cited in SEQ ID NO 51031
  misc_feature (1)..(1859): Ortholog of  Ceres SEQ ID NO 13596527 as cited in SEQ ID NO 62582
  misc_feature (1)..(1859): Ortholog of  Ceres SEQ ID NO 15226378 as cited in SEQ ID NO 62741
  misc_feature (1)..(1859): Ortholog of  Ceres SEQ ID NO 15169639 as cited in SEQ ID NO 64624
  misc_feature (1)..(1859): Ortholog of  Ceres SEQ ID NO 14303071 as cited in SEQ ID NO 67114
  misc_feature (1)..(1859): Ortholog of  Ceres SEQ ID NO 13595998 as cited in SEQ ID NO 68161
  misc_feature (1)..(1859): Ortholog of  Ceres SEQ ID NO 14303635 as cited in SEQ ID NO 68503
aaaactttagtctactcgtcctcggtcctcctcttctcgcagcagccagcagaccaatcgggacaagcaaactcccccgattagtttaagcagcccgggcccggcgacgaccagctccgttccgcgcggggatttaaacgcgcgaagcgagaaggcacgcagcaggcggcagcggcaagcaacgaacgcgatcgcgcgccgacgacgacgcgcggtgccggcgcctggtggtgccgtgttgcggactccgctgcatcgtctcggtcggtcgtcgtcgttatcatgggtgtccggctgccggtggcgtggtccgccgtcctcgtcctcctcgtgcgggcggccgtggcgcgggagtacgcggccatcttcaacttcggggactccctggtggacgccggcaacctggtggtggacggcatcccggactacctggccacggcgcgcctgccctacggcatgacccacttcggctaccccaccggccgctgctccgacggccgcctcgtcgttgacttcatcgcgcaggagctgggcgtgccgctgctgccgccgtccaaggcgaagaacgcgacgttccaccgcggcgccaacttcgcgatcacgggcgccacgtcgctggacacgcccttcttcgtggagcgcgggctggggaagacggtctggaactcggggtccctgcacacgcagatccagtggttccaggacatgaagcccaagctgtgcgggcaggagcaggagtgccgggacctgttccggcggtcgctgttcatcgtgggcgagttcggcgggaacgactacaactcgccgctgttcgcgttccggccgctggcggaggcgcacgacatggtgccgcacgtggtggagtccatcgggcggggcgtggagcggctgatcgcggagggcgccgcggagctggtggtgcccggggtgctccccatcggctgcttccccgtctacctctccatcttccgcaggcagccggccggcggctacggcgcccgcagcggctgcgtcaaggagctgaacacgctgtcgtgggtgcacaacgccgcgctgcgccgcaaggtcgaggagctccgcgccaggcaccccggcgtgcgcatcgtgtacgccgactactacacgccggccatccagttcgtcctccacgccgagaaatacgggatgctgaagcagacgccgcgggcgtgctgcggcgcgccgggcgtgggcgagtacaacttcaacctgacgtccaagtgcggcgagccgggggcgtacgcgtgcccggacccctccaaccactggagttgggacggcatccacctcacggaggccgcctacggccacatcgccaggggctggctctacgggcccttcgccgacccgcccatcctcgacgccaagcacctcggctaacgtcgtccatccaccgtcttctccagcgccggccccgcccgcacggccagtacagactactcctccggctctgggcgccgtcgtatgtgcgtccttattaccgacctgcaaaattggattggttgcttgtagtagaagtgtagagagagcgagacagagatagatgacaaacacgaaacgaaccggaaggaggacgataaggcgcgcgtgccggccggtcttttactcctctctgttcatagctgtcccatatcgtagtcaagaaaactgagcagggaaacaaaccgggcgatatttctgttgcatcttgctttgtttgagagtgtgcgtgcgtgtgcggccagctcgatctgaactcgataggcaggtgcgtcgcgtcgtggatgaactggtccgtggacgtgatcttgtttatttttttaaggagcaggtgttgtcaaaagtccatcgctaagatgtgc

SEQ ID NO: 16777 - protein, 371 aa, Zea mays subsp. mays
  peptide (1)..(371): Ceres Seq. ID no. 13492558
MGVRLPVAWSAVLVLLVRAAVAREYAAIFNFGDSLVDAGNLVVDGIPDYLATARLPYGMTHFGYPTGRCSDGRLVVDFIAQELGVPLLPPSKAKNATFHRGANFAITGATSLDTPFFVERGLGKTVWNSGSLHTQIQWFQDMKPKLCGQEQECRDLFRRSLFIVGEFGGNDYNSPLFAFRPLAEAHDMVPHVVESIGRGVERLIAEGAAELVVPGVLPIGCFPVYLSIFRRQPAGGYGARSGCVKELNTLSWVHNAALRRKVEELRARHPGVRIVYADYYTPAIQFVLHAEKYGMLKQTPRACCGAPGVGEYNFNLTSKCGEPGAYACPDPSNHWSWDGIHLTEAAYGHIARGWLYGPFADPPILDAKHLG

SEQ ID NO: 16778 - protein, 313 aa, Zea mays subsp. mays
  peptide (1)..(313): Ceres Seq. ID no. 13492559
MTHFGYPTGRCSDGRLVVDFIAQELGVPLLPPSKAKNATFHRGANFAITGATSLDTPFFVERGLGKTVWNSGSLHTQIQWFQDMKPKLCGQEQECRDLFRRSLFIVGEFGGNDYNSPLFAFRPLAEAHDMVPHVVESIGRGVERLIAEGAAELVVPGVLPIGCFPVYLSIFRRQPAGGYGARSGCVKELNTLSWVHNAALRRKVEELRARHPGVRIVYADYYTPAIQFVLHAEKYGMLKQTPRACCGAPGVGEYNFNLTSKCGEPGAYACPDPSNHWSWDGIHLTEAAYGHIARGWLYGPFADPPILDAKHLG

SEQ ID NO: 16779 - protein, 230 aa, Zea mays subsp. mays
  peptide (1)..(230): Ceres Seq. ID no. 13492560
MKPKLCGQEQECRDLFRRSLFIVGEFGGNDYNSPLFAFRPLAEAHDMVPHVVESIGRGVERLIAEGAAELVVPGVLPIGCFPVYLSIFRRQPAGGYGARSGCVKELNTLSWVHNAALRRKVEELRARHPGVRIVYADYYTPAIQFVLHAEKYGMLKQTPRACCGAPGVGEYNFNLTSKCGEPGAYACPDPSNHWSWDGIHLTEAAYGHIARGWLYGPFADPPILDAKHLG

SEQ ID NO: 16780 - DNA, 2177 bp, Zea mays subsp. mays
  misc_feature (1)..(2177): Ceres Seq. ID no. 13492553
  misc_feature (1)..(2177): Ortholog of  Ceres SEQ ID NO 13596816 as cited in SEQ ID NO 62287
cttcccactccactccgcgttttcaaaaatcaaaaccccagccggaacagcgaaaccccttccaccatagcccgtaggaaacggagcagcggttgcggtttctctctccgtcgctctcaccgctcgccgccgtctccgtatccggtccgcaaggcgggcctggcgtcaaggtcctccgctccgtccccttcactcgcgaccggagtcccctcttcgttggttcgccaatctacttcgtcggcccaccccttttcccccgatcgatctctccttctcgctaagcgaactatcttgacctccctccctcgtgcgagattagccagtagaaagttccccgcttttcacccaggcacacttccaccacctcgctttgctgcttcactgcttgcttctgttgggcggagtgctaagaggacggcacgggagtcaagattcctcctccttaacctgccctttcgtgttgccgttgttggtggtttggtttgtgattgcggtggcgctggagttgcggtgtgtgtgaagcgagggatccgagattcttgtggattctgttctacttttcgattgctgctgatcctctctcccgtgcgacggcacaagcggcggtgtggggagagcatccgccgttgcccggccttggagggccccggtccgtctatggaacttgccgccccggtgccacgccccggcccggaactgaagtgctcagcaaggcgcttcttgcctgccactctcacgctgctggtgcctactgtggcagtcccctgtttggttcctgctcctcactgaccggctacggggctgcgataatggtgcctcagatggtgctgctcctttgctgctgccttctggcgttcccgccacatggtccgttagtcgttgaggcttttgtaggcggttatggagtaaactatgggagaatagcaaacaacatcccttcccctgacaaagtggtggagctcctgaggagagcaaagataaggaatgttaagatatacgactctgaccacagcgttctcgatgcgttcaaagggtctgggatcaatctggtcatcgcaatccccaatgagctcgtcaaggatatggctgcaaacacgagccgttcaatggactggctaaatcaaaatgtgcagccttatctccctcagacgcgcatcgttgggatcactgtgggaaatgaggtgctcggaggccaagatcaaagcttgtatcagccacttgttgatgctgtgaagaatgtgtatgatgggctcaagaggctccacttggagagaaaaattgagcttttcacacctcattcggaagctgtttttgctacttcttatccaccctccgcatgtgtgttcaaggaggaactcatgccatacatgaaacctcttctcgacttctttgcaatgattggctcacctttctatgtcaacgcatacccctttttggcttacataagtgatcctgaacatatcgatatcaattatgctctctttaaacccaacaaaggaataattgatccaaataatagcctgcactatgacaatatgtttgatgctcaggtagatgcagcttatgctgctctacatgctgctggttatgataacatggaggttcgtgtggcagagactggttgggcttctagtggggatcaaaatgaagcaggagcttcatctgagaatgcaaggacgtacaatttcaatcttcgtaaacggctatttctgaggaccggaactcctctgaagccaaagagaccagtcaaagcgtatatatttgcattgtttaatgagaatcagaagcctggagctggctctgagaggcattatgggctgttccttcctgatgggaggatttcatatgacatcggtgtctcaggtctactaccttcatctgcatcctcatccgtgctgtccattaagaatgttcaagctgggggttggattttacagcattgggctacagttcttttatgttgttttcattttttgggggccatagtgacttgaggacggcataacacatccgtagtaaagggtgcaattgagcaagttagaatgttgctattgggaaattcacaatgaaaatccaaataatagtaccgctgcaataatctcttctcctgaggctgtcctgctttgctgcttaaaaccgtactcagttattgttctaaaaaatgattcatacctgct

SEQ ID NO: 16781 - protein, 394 aa, Zea mays subsp. mays
  peptide (1)..(394): Ceres Seq. ID no. 13492554
MVPQMVLLLCCCLLAFPPHGPLVVEAFVGGYGVNYGRIANNIPSPDKVVELLRRAKIRNVKIYDSDHSVLDAFKGSGINLVIAIPNELVKDMAANTSRSMDWLNQNVQPYLPQTRIVGITVGNEVLGGQDQSLYQPLVDAVKNVYDGLKRLHLERKIELFTPHSEAVFATSYPPSACVFKEELMPYMKPLLDFFAMIGSPFYVNAYPFLAYISDPEHIDINYALFKPNKGIIDPNNSLHYDNMFDAQVDAAYAALHAAGYDNMEVRVAETGWASSGDQNEAGASSENARTYNFNLRKRLFLRTGTPLKPKRPVKAYIFALFNENQKPGAGSERHYGLFLPDGRISYDIGVSGLLPSSASSSVLSIKNVQAGGWILQHWATVLLCCFHFLGAIVT

SEQ ID NO: 16782 - protein, 390 aa, Zea mays subsp. mays
  peptide (1)..(390): Ceres Seq. ID no. 13492555
MVLLLCCCLLAFPPHGPLVVEAFVGGYGVNYGRIANNIPSPDKVVELLRRAKIRNVKIYDSDHSVLDAFKGSGINLVIAIPNELVKDMAANTSRSMDWLNQNVQPYLPQTRIVGITVGNEVLGGQDQSLYQPLVDAVKNVYDGLKRLHLERKIELFTPHSEAVFATSYPPSACVFKEELMPYMKPLLDFFAMIGSPFYVNAYPFLAYISDPEHIDINYALFKPNKGIIDPNNSLHYDNMFDAQVDAAYAALHAAGYDNMEVRVAETGWASSGDQNEAGASSENARTYNFNLRKRLFLRTGTPLKPKRPVKAYIFALFNENQKPGAGSERHYGLFLPDGRISYDIGVSGLLPSSASSSVLSIKNVQAGGWILQHWATVLLCCFHFLGAIVT

SEQ ID NO: 16783 - protein, 303 aa, Zea mays subsp. mays
  peptide (1)..(303): Ceres Seq. ID no. 13492556
MAANTSRSMDWLNQNVQPYLPQTRIVGITVGNEVLGGQDQSLYQPLVDAVKNVYDGLKRLHLERKIELFTPHSEAVFATSYPPSACVFKEELMPYMKPLLDFFAMIGSPFYVNAYPFLAYISDPEHIDINYALFKPNKGIIDPNNSLHYDNMFDAQVDAAYAALHAAGYDNMEVRVAETGWASSGDQNEAGASSENARTYNFNLRKRLFLRTGTPLKPKRPVKAYIFALFNENQKPGAGSERHYGLFLPDGRISYDIGVSGLLPSSASSSVLSIKNVQAGGWILQHWATVLLCCFHFLGAIVT

SEQ ID NO: 16784 - DNA, 1994 bp, Zea mays subsp. mays
  misc_feature (1)..(1994): Ceres Seq. ID no. 12368255
  misc_feature (1)..(1994): Ortholog of  Ceres SEQ ID NO 14313228 as cited in SEQ ID NO 67057
aacccacccaccgcgaaaccttcctccctctccttctctgtccccttctctcccctcctctcctccgccgctcgacagcctactctccaagccaggagaacccaacccggccagccccacacgcacacgcccacgcccacgcccacgcagccgcggcggaggccatccggcgggcgtccatgggctgctgcggctcctcgctacgggcggggacgcagccggagaagaagccggcggcgggggcgctgcccccgcgccgcccctcctactcgctgagccagaaccagaaccaggcgccgccggcagcccgcgcgggcgcccaccaggtgccgccgctcagggagttctcgctggcggagctgcgcgccgccacggccggcttcgcgccggacaacatcgtgtccgagagcggcgacaaggcgccgaatttcgtgtacaggggccgcctcgagcccagccgccgcgcgatcgccgtcaagaagttcgccaagatggcgtggcccgaccccaagcagttcgcggaggaggccaagggggtcgggaagctgcgccaccgccgcctggccaacctgatcggctactgctgcgacggcgaggagcgcctgctcgtcgccgagttcatgcccaacgacacgctcgccaagcacctcttccactgggaaaaccagacaattgaatgggctatgcgcctgagagttgcatactacatcgctgaagcactggaatattgtagcaccgaaggaaggcctttgtatcatgacctaaatgcatatagggtcctctttgatgagaatggtgatcctcgtctttcatgctttggcctgatgaaaaacagcagggatgggaaaagctatagcacaaaccttgcatatacacctccagaatatttgagaaatggaagagtaacatcagaaagtgtcatattcagctttggcactatactgctggacctcctaagtggaaaacgtatacctccatcccgtgctcttgatatgataaaaggcaacaatatccaagtactgatggattcacatctggagggaaactactcaacagaagaggcaaccacattggttgaccttgcctctcagtgcctacagtacgaacctagggatcgtcccaacactaaaaagctggtttccgtacttgagcccttgcaaataaaatcagaggtaccatcctacgagatgcttggcattccgaagcatgaagaagaagcacctccccctccacaaccgcaacaccctctttctcccatgggcgaggcctgttccaggatggatctgactgccatccatcagattctagtgaacacgcattacagggatgatgaagggagcaacgagctatcgttccaggaatggacgcagcagatgagggacatgctggaagctaggaaacgtgggtactttgctttccgtgacaaagatttcaaggcagccatagactgctacacgcagttcgtcgacgtggggacgatggtgtcgccaacagtgtacgcgaggcggagcttgtgccacctcatgtgcgaccagcctgacgccgccctccgtgacgccatgcaagcgcagtgcgcgtacccagattggccaaccgcgttctacatgcaggccgtcgcgctctcgaagctgaacatgcagagcgacgctacggacatgctgaacgaggcgtcgcagctcgaagagaagcggcagaagaacacgaaaccttgatgaaagaccagacccctctctctcgtcccggggttacggtccttctgcggctcaaataggtttgtgttgagacatgctgctcggtccttccgaaacattgtggttagttcctggtgcaagggttgggttgggacttgggaatgttaactggggggaatgtgctgtagagtaactacctggtttggcatttctgtgatgcatttttttggggcccgtgtacatgttacactgacaaaagtagtcgaaacagccagaatgcaagggaatttaattctggttatc

SEQ ID NO: 16785 - protein, 569 aa, Zea mays subsp. mays
  peptide (1)..(569): Ceres Seq. ID no. 12368256
PTHRETFLPLLLCPLLSPPLLRRSTAYSPSQENPTRPAPHAHAHAHAHAAAAEAIRRASMGCCGSSLRAGTQPEKKPAAGALPPRRPSYSLSQNQNQAPPAARAGAHQVPPLREFSLAELRAATAGFAPDNIVSESGDKAPNFVYRGRLEPSRRAIAVKKFAKMAWPDPKQFAEEAKGVGKLRHRRLANLIGYCCDGEERLLVAEFMPNDTLAKHLFHWENQTIEWAMRLRVAYYIAEALEYCSTEGRPLYHDLNAYRVLFDENGDPRLSCFGLMKNSRDGKSYSTNLAYTPPEYLRNGRVTSESVIFSFGTILLDLLSGKRIPPSRALDMIKGNNIQVLMDSHLEGNYSTEEATTLVDLASQCLQYEPRDRPNTKKLVSVLEPLQIKSEVPSYEMLGIPKHEEEAPPPPQPQHPLSPMGEACSRMDLTAIHQILVNTHYRDDEGSNELSFQEWTQQMRDMLEARKRGYFAFRDKDFKAAIDCYTQFVDVGTMVSPTVYARRSLCHLMCDQPDAALRDAMQAQCAYPDWPTAFYMQAVALSKLNMQSDATDMLNEASQLEEKRQKNTKP

SEQ ID NO: 16786 - protein, 510 aa, Zea mays subsp. mays
  peptide (1)..(510): Ceres Seq. ID no. 12368257
MGCCGSSLRAGTQPEKKPAAGALPPRRPSYSLSQNQNQAPPAARAGAHQVPPLREFSLAELRAATAGFAPDNIVSESGDKAPNFVYRGRLEPSRRAIAVKKFAKMAWPDPKQFAEEAKGVGKLRHRRLANLIGYCCDGEERLLVAEFMPNDTLAKHLFHWENQTIEWAMRLRVAYYIAEALEYCSTEGRPLYHDLNAYRVLFDENGDPRLSCFGLMKNSRDGKSYSTNLAYTPPEYLRNGRVTSESVIFSFGTILLDLLSGKRIPPSRALDMIKGNNIQVLMDSHLEGNYSTEEATTLVDLASQCLQYEPRDRPNTKKLVSVLEPLQIKSEVPSYEMLGIPKHEEEAPPPPQPQHPLSPMGEACSRMDLTAIHQILVNTHYRDDEGSNELSFQEWTQQMRDMLEARKRGYFAFRDKDFKAAIDCYTQFVDVGTMVSPTVYARRSLCHLMCDQPDAALRDAMQAQCAYPDWPTAFYMQAVALSKLNMQSDATDMLNEASQLEEKRQKNTKP

SEQ ID NO: 16787 - protein, 406 aa, Zea mays subsp. mays
  peptide (1)..(406): Ceres Seq. ID no. 12368258
MAWPDPKQFAEEAKGVGKLRHRRLANLIGYCCDGEERLLVAEFMPNDTLAKHLFHWENQTIEWAMRLRVAYYIAEALEYCSTEGRPLYHDLNAYRVLFDENGDPRLSCFGLMKNSRDGKSYSTNLAYTPPEYLRNGRVTSESVIFSFGTILLDLLSGKRIPPSRALDMIKGNNIQVLMDSHLEGNYSTEEATTLVDLASQCLQYEPRDRPNTKKLVSVLEPLQIKSEVPSYEMLGIPKHEEEAPPPPQPQHPLSPMGEACSRMDLTAIHQILVNTHYRDDEGSNELSFQEWTQQMRDMLEARKRGYFAFRDKDFKAAIDCYTQFVDVGTMVSPTVYARRSLCHLMCDQPDAALRDAMQAQCAYPDWPTAFYMQAVALSKLNMQSDATDMLNEASQLEEKRQKNTKP

SEQ ID NO: 16788 - DNA, 1252 bp, Zea mays subsp. mays
  misc_feature (1)..(1252): Ceres Seq. ID no. 12368639
  misc_feature (1)..(1252): Ortholog of  Ceres SEQ ID NO 13586619 as cited in SEQ ID NO 0
acgacggcacccgttcccatctcaattgataacgcatctccaatctccaagcgcagacgccggaggaagaaagcttgaagcagccacggcaatggcgtcccggcagttcttcacctacgacccctacgagttcgcgtacgaccagtactacaacctttacgaaccttactacctgcggcagtccgcgcccacccatcgagctagggacatctttgcgggtgccgagccggcggccgcgaaagcgagatccgcgcccagggcaaaggagtcggagacgcagacgtcgttctcaatcccagtcaacgggcctgactcgccggagagggctccctctccggtggcggaagctcgcgcgggaccgatggcgccggcgatgtcggcagaggacgccgcggcgcggatgcaggcagtggtgcgagggttcctcgcgaggaagtcggtgcgggcggtacgccaggtggatcaggaggcggagcaagtcgcgggaaagatggcgtgcgaggcggaggccctgctagcggaccccagggcacgcgtcgccgtctgggaggcgctcatgaggatgctgctgcgtctcgacgcggtgcgcggagcgcgggactaccggaggagggtcaccaagcgggtcgtcgcgctgcaggacgccgtcgacgcgctcgtcgctaagccggcaccggcaaccgtcgagattgctgaggagatcgccatagcgccggagctgccggacgctgaagatgaaaaggaagacgaagaggcagagacacacgaggcggcggccgtcgagatagcagaggagagcaataccaatgttggtgtcgacgagccctgagggttcggagatattggctgaagaaaacgaacacacctcaccggccctgactgcagttgctggcgccgcctccgacgttgtggacgcgaggaagttgatgcagatggtggcgacgctgtgcgagcagagcgcgcagcagtgcgcgttgatcgaagtgctggccgagcgtgtggacatgctggagcgtaccgtgcggcggatgcaagacgccgacagcgccggcggcggccagccaagaagctgagcacggagggcaactgaaggagcaacagcaagctttacagcggttgacgacgaaatctattaatagagatttaaatagttatgtatttttccattgcttttaatctcgagatttattattatagacactagattatttatattcattattttataataaagttcctcgtatttattgtt

SEQ ID NO: 16789 - protein, 275 aa, Zea mays subsp. mays
  peptide (1)..(275): Ceres Seq. ID no. 12368640
RRHPFPSQLITHLQSPSADAGGRKLEAATAMASRQFFTYDPYEFAYDQYYNLYEPYYLRQSAPTHRARDIFAGAEPAAAKARSAPRAKESETQTSFSIPVNGPDSPERAPSPVAEARAGPMAPAMSAEDAAARMQAVVRGFLARKSVRAVRQVDQEAEQVAGKMACEAEALLADPRARVAVWEALMRMLLRLDAVRGARDYRRRVTKRVVALQDAVDALVAKPAPATVEIAEEIAIAPELPDAEDEKEDEEAETHEAAAVEIAEESNTNVGVDEP

SEQ ID NO: 16790 - protein, 245 aa, Zea mays subsp. mays
  peptide (1)..(245): Ceres Seq. ID no. 12368641
MASRQFFTYDPYEFAYDQYYNLYEPYYLRQSAPTHRARDIFAGAEPAAAKARSAPRAKESETQTSFSIPVNGPDSPERAPSPVAEARAGPMAPAMSAEDAAARMQAVVRGFLARKSVRAVRQVDQEAEQVAGKMACEAEALLADPRARVAVWEALMRMLLRLDAVRGARDYRRRVTKRVVALQDAVDALVAKPAPATVEIAEEIAIAPELPDAEDEKEDEEAETHEAAAVEIAEESNTNVGVDEP

SEQ ID NO: 16791 - protein, 155 aa, Zea mays subsp. mays
  peptide (1)..(155): Ceres Seq. ID no. 12368642
MAPAMSAEDAAARMQAVVRGFLARKSVRAVRQVDQEAEQVAGKMACEAEALLADPRARVAVWEALMRMLLRLDAVRGARDYRRRVTKRVVALQDAVDALVAKPAPATVEIAEEIAIAPELPDAEDEKEDEEAETHEAAAVEIAEESNTNVGVDEP

SEQ ID NO: 16792 - DNA, 1479 bp, Zea mays subsp. mays
  misc_feature (1)..(1479): Ceres Seq. ID no. 12415392
  misc_feature (1)..(1479): Ortholog of  Ceres SEQ ID NO 14302255 as cited in SEQ ID NO 65021
cccaagtcccggcccaacccatctgtagcactaggcaacagcgaagctgagcagagagctgtcactgcatctgcctcatctaccagtacgatggtgatgatgtcgggacttgctgcctactgttcactaagtatgacaacgaccgggactgcgccgttatcatggaatacacgggcaccgccggcgcgactcgctttccagaggcggcggcgcatgagtacgatcacggccacggtcacgtgcaggcgcgaatcggcgatgacggccccggagaaggccgacgtgctgcggtcgctagacgggtgggcggagtcgaacctgctgccgctgctgaagccggtggagcgggcatggcagccgcacgacctgctgccggactcggcgtcgccggggttccgcgaggcggtggacgagctgcgggcgcgggcgcgagagatccccgacgactactacgtgtgcctggtgggcaacatggtgacggaggaggccctcccccacgtaccacgccgccctcaacagcttcgtgggctacgacagcccctccagcgccgatgcctgggcgcgctggtcccgcggctggaccgccgaggagaaccgccacggcgacctgctgaaccgctatctctacctgtgcggccgcgtcgacgtccggcgcgtggagcagaccatccaccacctcatcaacgccgggatgcgcctcgcctccgacaagtgcccctacaggggcttcatctacacggcgttccaggagcgcgccaccgccgtctcgcacggcaacacggcgcggcgcgccatggcgctgggcgacgccagcctggccaggatctgcggcgccatcgcgagcgacgagaagcggcacgaggcggcctacacccgggtggtggaccagctgttcgcgctcacgcccgacgccgccgtgcgcgcgctcgagtacatgatgagggagaggatcctcatgccggcctactacatgttcgacggccgggacccggacctgttccgccactacgccgccgtcgcgcagaggctcggcgtctacaccaccgccgactacgccgacctcgtccagttcttcgtcgacaggtggggcgtggcggacctaggccccggcctcaccggcgaggggaggcaggcgcaggactacgtctgccggttgcctgagagggtgcgcaggatggaccagctggacgcgcgacgaaggctgcagccccagactcgtcaggtccccttctcttggctgttcgacaggcacgtggagctgctgacctgacttgattgatcggcagtctgcagcccagctagcggtccttttgccccctttggcagagcccagagctatcaattctgttactgcgtctccttctcctctacttctacttcttcctcgttggccactccgtagttccgtatgtgtctaccgtcaagtgactgactggaaccatgtactgtgtgtcagtcatcattcaatccatttggtgc

SEQ ID NO: 16793 - protein, 386 aa, Zea mays subsp. mays
  peptide (1)..(386): Ceres Seq. ID no. 12415393
PKSRPNPSVALGNSEAEQRAVTASASSTSTMVMMSGLAAYCSLSMTTTGTAPLSWNTRAPPARLAFQRRRRMSTITATVTCRRESAMTAPEKADVLRSLDGWAESNLLPLLKPVERAWQPHDLLPDSASPGFREAVDELRARAREIPDDYYVCLVGNMVTEEALPHVPRRPQQLRGLRQPLQRRCLGALVPRLDRRGEPPRRPAEPLSLPVRPRRRPARGADHPPPHQRRDAPRLRQVPLQGLHLHGVPGARHRRLARQHGAARHGAGRRQPGQDLRRHRERREAARGGLHPGGGPAVRAHARRRRARARVHDEGEDPHAGLLHVRRPGPGPVPPLRRRRAEARRLHHRRLRRPRPVLRRQVGRGGPRPRPHRRGEAGAGLRLPVA

SEQ ID NO: 16794 - protein, 356 aa, Zea mays subsp. mays
  peptide (1)..(356): Ceres Seq. ID no. 12415394
MVMMSGLAAYCSLSMTTTGTAPLSWNTRAPPARLAFQRRRRMSTITATVTCRRESAMTAPEKADVLRSLDGWAESNLLPLLKPVERAWQPHDLLPDSASPGFREAVDELRARAREIPDDYYVCLVGNMVTEEALPHVPRRPQQLRGLRQPLQRRCLGALVPRLDRRGEPPRRPAEPLSLPVRPRRRPARGADHPPPHQRRDAPRLRQVPLQGLHLHGVPGARHRRLARQHGAARHGAGRRQPGQDLRRHRERREAARGGLHPGGGPAVRAHARRRRARARVHDEGEDPHAGLLHVRRPGPGPVPPLRRRRAEARRLHHRRLRRPRPVLRRQVGRGGPRPRPHRRGEAGAGLRLPVA

SEQ ID NO: 16795 - protein, 354 aa, Zea mays subsp. mays
  peptide (1)..(354): Ceres Seq. ID no. 12415395
MMSGLAAYCSLSMTTTGTAPLSWNTRAPPARLAFQRRRRMSTITATVTCRRESAMTAPEKADVLRSLDGWAESNLLPLLKPVERAWQPHDLLPDSASPGFREAVDELRARAREIPDDYYVCLVGNMVTEEALPHVPRRPQQLRGLRQPLQRRCLGALVPRLDRRGEPPRRPAEPLSLPVRPRRRPARGADHPPPHQRRDAPRLRQVPLQGLHLHGVPGARHRRLARQHGAARHGAGRRQPGQDLRRHRERREAARGGLHPGGGPAVRAHARRRRARARVHDEGEDPHAGLLHVRRPGPGPVPPLRRRRAEARRLHHRRLRRPRPVLRRQVGRGGPRPRPHRRGEAGAGLRLPVA

SEQ ID NO: 16796 - DNA, 1686 bp, Zea mays subsp. mays
  misc_feature (1)..(1686): Ceres Seq. ID no. 12387379
  misc_feature (1)..(1686): Ortholog of  Ceres SEQ ID NO 13594345 as cited in SEQ ID NO 58043
  misc_feature (1)..(1686): Ortholog of  Ceres SEQ ID NO 13597574 as cited in SEQ ID NO 64677
  misc_feature (1)..(1686): Ortholog of  Ceres SEQ ID NO 13597678 as cited in SEQ ID NO 65375
  misc_feature (1)..(1686): Ortholog of  Ceres SEQ ID NO 13591190 as cited in SEQ ID NO 68044
aaaaggtggagggggtgtgaggtgtgtggttggagttggcctaacaattgagcctgccgcgcacaatcaatggccgcgctcgagtccaacaagaagctgcgcctccttctcgtgcccttcttcgccactagtcacataggcccgttcaccgacctcgccgtccgtctagccacagccaacccggacgccgtcgagctcactctcgccgtcaccccagcgaacgtccacgtggttcgctcggccctcgggcggtacggcgccgaggcgggcggcgtgatcaagattgccacctacccgttccccgcgtggacggcctcgctccgggcgtggagaacctctcggccgccggggacgacgggtggcgcattgatgccgtcgccgtcgacgaggcctcgacgcgaccggcgcaggaggcgctcatcagggaacagtcccctgacgccgtcatcaccgacgtccacttcatctggaacaacgccgtggccggcgagctcggcgtgccgtgcgttacgttcagcgtcgttggcatcttctcgacgctcgtcatgtaccacctcggccgtgacgtcgtcatcagagatggccaggaggtgaccgtccctgggttgccggggccggagatacggatccccgtatccgagttgccggagttcctgagacgccggcaggagcacgacggggtcaggcggtgccatgtggagatgggcaggtgcttcggcgtcaccctcaactcgttcgtggatctggagcagccataccgggacatgtgcgtgcgcagcggatacctgaagcgcgcctacttcgtcgggcccctctcgctgccgttaccaccggccggagcaagcaccagagattcgccgtgcctcgcgtggctcggcaccaagccgaggttttcagtggtgtacgtatgcttcggcaccttcgctgccatctcggaggaccagctccgggaactggcgcttgggctagaagcttcagagaagccattcctgtgggtagtgagggcggacggatggacgccgccggagggctgggaggagcgcgtcggagagagggggatgctagtgagagggtgggcgccgcagacggcgatactgtcccatccagcagttggcgcgttcctgacgcactgcgggtcgagctcgctgctggaggcggcggcggccggcgtgccgatgctgacgtggccgctggtgttcgaccagttcatcgaggagaggctggtgaccgaggtcctcaagatcggggagagggtgtggagcgggacacggagcacgagatacgaggagcaaaaggtcgtggcagcagaggtggtggcgcgagcggtggcaaggttcctggagccgggtggcaccggcgaggcggcgaggagcaaggcgggggtgctcgctgcgaaggcgcgctcggctgtggcggagggtggctcgtcattctgtgatctgcgccgtctcgtcaatgacctgatcgaagcaagaacggctgccggaaccaacgcctgagttacaaaaatcacgagtacgtgttgaattgctctatgtgttttcctttttttccagctgtttgtcgtttctttgggcagcagtttgtgtataggagggtaccaaatatttttaagagaaagaggtatttgtatttccttgtgaatagtagagaaacagacatttttggctagcagccaaatctgcg

SEQ ID NO: 16797 - protein, 317 aa, Zea mays subsp. mays
  peptide (1)..(317): Ceres Seq. ID no. 12387380
MYHLGRDVVIRDGQEVTVPGLPGPEIRIPVSELPEFLRRRQEHDGVRRCHVEMGRCFGVTLNSFVDLEQPYRDMCVRSGYLKRAYFVGPLSLPLPPAGASTRDSPCLAWLGTKPRFSVVYVCFGTFAAISEDQLRELALGLEASEKPFLWVVRADGWTPPEGWEERVGERGMLVRGWAPQTAILSHPAVGAFLTHCGSSSLLEAAAAGVPMLTWPLVFDQFIEERLVTEVLKIGERVWSGTRSTRYEEQKVVAAEVVARAVARFLEPGGTGEAARSKAGVLAAKARSAVAEGGSSFCDLRRLVNDLIEARTAAGTNA

SEQ ID NO: 16798 - protein, 265 aa, Zea mays subsp. mays
  peptide (1)..(265): Ceres Seq. ID no. 12387381
MGRCFGVTLNSFVDLEQPYRDMCVRSGYLKRAYFVGPLSLPLPPAGASTRDSPCLAWLGTKPRFSVVYVCFGTFAAISEDQLRELALGLEASEKPFLWVVRADGWTPPEGWEERVGERGMLVRGWAPQTAILSHPAVGAFLTHCGSSSLLEAAAAGVPMLTWPLVFDQFIEERLVTEVLKIGERVWSGTRSTRYEEQKVVAAEVVARAVARFLEPGGTGEAARSKAGVLAAKARSAVAEGGSSFCDLRRLVNDLIEARTAAGTNA

SEQ ID NO: 16799 - protein, 244 aa, Zea mays subsp. mays
  peptide (1)..(244): Ceres Seq. ID no. 12387382
MCVRSGYLKRAYFVGPLSLPLPPAGASTRDSPCLAWLGTKPRFSVVYVCFGTFAAISEDQLRELALGLEASEKPFLWVVRADGWTPPEGWEERVGERGMLVRGWAPQTAILSHPAVGAFLTHCGSSSLLEAAAAGVPMLTWPLVFDQFIEERLVTEVLKIGERVWSGTRSTRYEEQKVVAAEVVARAVARFLEPGGTGEAARSKAGVLAAKARSAVAEGGSSFCDLRRLVNDLIEARTAAGTNA

SEQ ID NO: 16800 - DNA, 1728 bp, Zea mays subsp. mays
  misc_feature (1)..(1728): Ceres Seq. ID no. 12367809
  misc_feature (1)..(1728): Ortholog of  Ceres SEQ ID NO 13594345 as cited in SEQ ID NO 58043
  misc_feature (1)..(1728): Ortholog of  Ceres SEQ ID NO 12614112 as cited in SEQ ID NO 60891
  misc_feature (1)..(1728): Ortholog of  Ceres SEQ ID NO 13662880 as cited in SEQ ID NO 65422
gcacgagaccattacctagaacatcctaatcaaaaaaaggagtgaggaaccagatccttgcttgcattggcggagcagcatcatgccttccacgacagcgcagcagaagccccacgtcgtgctggtgccgttcccggcgcacggccacatcgcgccgcacgtgcagctggcgcgcgccctccgcgcccgcggcgtccacgccacgctcgtccacaccgagctgtaccaccgccgcctgctgcgcaccaagcagcagcaggccacgggcggcgacgacgccctggacccggacgagggcttctccgtcgaggtcatcccggacgggctatcgctggaggacccaccgcgcacgctgcgtgcgtaccacgaggcgatggagcgcaactgcctcgagccgttcaaggcgctgctgcgggacctgctgttgccgcccaccggcgtgccgccggtcagctgcgtcgtggccgacaccccgatgccgttcgcggccgtggcggcgcgcgaggttggcgtcccggacgtgcagttcttcacggcgtccgcgtgcggcctcatgggctacctccagttccaggagctcttggcgagggaggtcatccctcttagacccacctacgagaccgacggctccctcgacgccccgctggactgggtgcccgggatgaaggccgtgcgcctaagggacctgccgacgttctgccacaccacggacgccgacgactggcttgtgcacttccacgtccaccagatgaagacggccgccgcctccaaggccgtcgtcctcaacactctctacgacatggagaaggacgtcgtcgacgcgctcgcgccgcacttgccgcccatctacaccgtcggcccgctcgcaagcgtcgtcaaagcgtccttgcccgctccgcgcggcgccggcgacgacaccagcgtccccgccgccggctcggtgaggagcagcgccatgcttggcgtgttacaggaagacagggagtgcatggcgtggctcgacgacggcaaggcggcgcgctccgtcgtgtacttgagcttcggcagccacgccagcatgagcgacgcgcggctcaaggagatcgcgtccgggctagcacgctgtggctctccctacctctgggtcctcaggccagaaatggccgccgcggtcgaggtcggcgagaacggcctcgtcgtgccgtggtgcgcgcaggaggcggtgctgagccacccggccgtggggctgttcgtcacccactgtgggtggaactccattctggagagcgtcgtcgccggcgtgccggtgcttggatgccccgtgctgtctgagcagaccacgaactgccgccaggtgtgcaccgcgtggggcatcggcgccgagctgccgcaggaagctggcagcgacgaggttgcggcgctcgtgagggagatgatgaccgggaggaaggggaaggacgcaagggagaagacgctgcagtggaagaggctggctcaagtcagtgcacaaccaggggggctatcttacaataatattggtcggatggtggagaatatcctactcaaacacatctgacttcaaatcatggtcatgtttttgtcatagcgactgaggggagaaagatcgtcaataaccaacagctcaaccgtatctccctgatcctatagcactattaaattaaattctgtacctagcattaaaatatctcataccatatagtccaatataaataaatcagttcatattcc

SEQ ID NO: 16801 - protein, 490 aa, Zea mays subsp. mays
  peptide (1)..(490): Ceres Seq. ID no. 12367810
MPSTTAQQKPHVVLVPFPAHGHIAPHVQLARALRARGVHATLVHTELYHRRLLRTKQQQATGGDDALDPDEGFSVEVIPDGLSLEDPPRTLRAYHEAMERNCLEPFKALLRDLLLPPTGVPPVSCVVADTPMPFAAVAAREVGVPDVQFFTASACGLMGYLQFQELLAREVIPLRPTYETDGSLDAPLDWVPGMKAVRLRDLPTFCHTTDADDWLVHFHVHQMKTAAASKAVVLNTLYDMEKDVVDALAPHLPPIYTVGPLASVVKASLPAPRGAGDDTSVPAAGSVRSSAMLGVLQEDRECMAWLDDGKAARSVVYLSFGSHASMSDARLKEIASGLARCGSPYLWVLRPEMAAAVEVGENGLVVPWCAQEAVLSHPAVGLFVTHCGWNSILESVVAGVPVLGCPVLSEQTTNCRQVCTAWGIGAELPQEAGSDEVAALVREMMTGRKGKDAREKTLQWKRLAQVSAQPGGLSYNNIGRMVENILLKHI

SEQ ID NO: 16802 - protein, 393 aa, Zea mays subsp. mays
  peptide (1)..(393): Ceres Seq. ID no. 12367811
MERNCLEPFKALLRDLLLPPTGVPPVSCVVADTPMPFAAVAAREVGVPDVQFFTASACGLMGYLQFQELLAREVIPLRPTYETDGSLDAPLDWVPGMKAVRLRDLPTFCHTTDADDWLVHFHVHQMKTAAASKAVVLNTLYDMEKDVVDALAPHLPPIYTVGPLASVVKASLPAPRGAGDDTSVPAAGSVRSSAMLGVLQEDRECMAWLDDGKAARSVVYLSFGSHASMSDARLKEIASGLARCGSPYLWVLRPEMAAAVEVGENGLVVPWCAQEAVLSHPAVGLFVTHCGWNSILESVVAGVPVLGCPVLSEQTTNCRQVCTAWGIGAELPQEAGSDEVAALVREMMTGRKGKDAREKTLQWKRLAQVSAQPGGLSYNNIGRMVENILLKHI

SEQ ID NO: 16803 - protein, 359 aa, Zea mays subsp. mays
  peptide (1)..(359): Ceres Seq. ID no. 12367812
MPFAAVAAREVGVPDVQFFTASACGLMGYLQFQELLAREVIPLRPTYETDGSLDAPLDWVPGMKAVRLRDLPTFCHTTDADDWLVHFHVHQMKTAAASKAVVLNTLYDMEKDVVDALAPHLPPIYTVGPLASVVKASLPAPRGAGDDTSVPAAGSVRSSAMLGVLQEDRECMAWLDDGKAARSVVYLSFGSHASMSDARLKEIASGLARCGSPYLWVLRPEMAAAVEVGENGLVVPWCAQEAVLSHPAVGLFVTHCGWNSILESVVAGVPVLGCPVLSEQTTNCRQVCTAWGIGAELPQEAGSDEVAALVREMMTGRKGKDAREKTLQWKRLAQVSAQPGGLSYNNIGRMVENILLKHI

SEQ ID NO: 16804 - DNA, 1533 bp, Zea mays subsp. mays
  misc_feature (1)..(1533): Ceres Seq. ID no. 12350231
  misc_feature (1)..(1533): Ortholog of  Ceres SEQ ID NO 13595932 as cited in SEQ ID NO 67810
aaaaaccaccaccgcccccagcttccctaccgccctcgttccggagcctagggtttgggaagtcgaaggcctcggcgcttcgtttgccagcgcaatgccggatacgggagcgagaggccgcggcgatgagccggagcctgtgacgccgcagcagcaggcggaggagacccaggcggtggacgatcggcggttgctgcgctcgcagtacctcgccgtgaagggccttatcagcgacgagaaggatgaaatggcgagcgcggactctgataagttctgctccattatcaacagagtggagagcctgcaccagcttgttcagaggcccagggagcaaatagctgacgcagaaaccctgctggaccttactgctagtttggtagcatcagtaaggtcccaatcagttctgggaatcacaccttctgattttattgctggactgctgaagaaattttaaagaaaggaggttccaatgataatgtttcattggactgggctcgtcttgggcttgctacctcacgtgttttcttgtctgcatctggatgtgccaccatgattggtcccatgacgacagaagtgaagccacgaagagtttgtattaggaagaagaggactgcgaggccacatggaaacgcttgccctgaacagcttgctgatccatctgagaaaacaaagtctgatactgacaagaacatgtctgctatatttgatctcctgaggaggaggaaaagtgcaaggctggaacacattattttgaacaggacatcatttgctcaaacagtggagaacatatttgccttgtcattccttgtgaaagatggaagagttgaaatcaaagtgaatgaccagggacatcattttgtctatccaaggaatgcaccagtggcaagtgctgttgcctcaggagatgtggtctataaccactttgtcttccgatttgattttaaagactggaagctcatgaaaggggttgttccagagggagaagagcttatgccgcacaggtcctctcagaccatagccaacacaggaggaaacaatcctacccagtctgaggcacctttggccacaccaagcacaacgatcaggaagctttgcaggaaccgtggcctcatcttgcaagatgagttgatcgcgacaggtgcatatggagtcatggaacaggagatgttagccatgggcacgaacgacgccatggaagatgagatggtagctgccatgggtgtgacggaagctatgggagagaagaggaagtacaagcgcaagcgtctgttccaggacgtctgatgcgttgatccagctgaccgttgctgatggtgtacatgtctaggtagtaggtagagatgccaacccggctcacttcagcttagcttaccttagatgcatttgggtcaaagcaccccatttggtatgggttatggtggctcttggaatggctgagcgtcacgttattttggatgtgttcttaatgttagtttctggcgtacttaagactgaagtaaccatagtgaaggtgttggatgcttgggttgaatt

SEQ ID NO: 16805 - protein, 244 aa, Zea mays subsp. mays
  peptide (1)..(244): Ceres Seq. ID no. 12350232
MIGPMTTEVKPRRVCIRKKRTARPHGNACPEQLADPSEKTKSDTDKNMSAIFDLLRRRKSARLEHIILNRTSFAQTVENIFALSFLVKDGRVEIKVNDQGHHFVYPRNAPVASAVASGDVVYNHFVFRFDFKDWKLMKGVVPEGEELMPHRSSQTIANTGGNNPTQSEAPLATPSTTIRKLCRNRGLILQDELIATGAYGVMEQEMLAMGTNDAMEDEMVAAMGVTEAMGEKRKYKRKRLFQDV

SEQ ID NO: 16806 - protein, 240 aa, Zea mays subsp. mays
  peptide (1)..(240): Ceres Seq. ID no. 12350233
MTTEVKPRRVCIRKKRTARPHGNACPEQLADPSEKTKSDTDKNMSAIFDLLRRRKSARLEHIILNRTSFAQTVENIFALSFLVKDGRVEIKVNDQGHHFVYPRNAPVASAVASGDVVYNHFVFRFDFKDWKLMKGVVPEGEELMPHRSSQTIANTGGNNPTQSEAPLATPSTTIRKLCRNRGLILQDELIATGAYGVMEQEMLAMGTNDAMEDEMVAAMGVTEAMGEKRKYKRKRLFQDV

SEQ ID NO: 16807 - protein, 197 aa, Zea mays subsp. mays
  peptide (1)..(197): Ceres Seq. ID no. 12350234
MSAIFDLLRRRKSARLEHIILNRTSFAQTVENIFALSFLVKDGRVEIKVNDQGHHFVYPRNAPVASAVASGDVVYNHFVFRFDFKDWKLMKGVVPEGEELMPHRSSQTIANTGGNNPTQSEAPLATPSTTIRKLCRNRGLILQDELIATGAYGVMEQEMLAMGTNDAMEDEMVAAMGVTEAMGEKRKYKRKRLFQDV

SEQ ID NO: 16808 - DNA, 1657 bp, Zea mays subsp. mays
  misc_feature (1)..(1657): Ceres Seq. ID no. 12415416
  misc_feature (1)..(1657): Ortholog of  Ceres SEQ ID NO 14307288 as cited in SEQ ID NO 54318
  misc_feature (1)..(1657): Ortholog of  Ceres SEQ ID NO 13597393 as cited in SEQ ID NO 63453
aaaaccaagcaatccgcctcatcccagctcgtcacgatgctcgcgaccgcctcgccgcaccttcaggcggccgcgcgccgcctcttcctggctgtacccgtgaatcagggctgcagtagcatccgcctcccgcgcagatgcttcggccggtacgcgtcggtgcgcgcggcgtcggtgaccgccccgcccgcgaaggagggggcggacgacctggggttcctggagatgtcgtccgggacgcggcgacggtactacatgcttgggggcaagggtggggtcgggaagacgagctgcgcggcgtcgttggccgtgcggttcgccaacaacggccacccgaccctcgtcgtctccaccgaccctgcgcactcgctcagcgattccttcgcacaggatttgagtggcgggacgctcgtgcaggtcgagggccctgattcacctctgtttgcgcttgagataaatcctgaaaaggcccgggaggagtttcggacagtaagtcaaaaaaatggaggaacaggagtaaaagatttcatggatagcatgggccttggggtgcttgttgagcagcttggagagttaaaattgggggaattgttggacacaccaccacctggcttggatgaagcaattgcaatttctaaggttatgcaattccttgaagcacaagaatacagcatgtttagtcgcattgtatttgacactgcccctacgggccatacactccggttattatccttgccagatttcttggatgcgtccattgggaaaatcttgaagctgaggagtaagattgcttctgcaacatcagctattaaatcagtatttggacaagaggtccaacagcaggatgcagcgaacaaattagagcaactcagagaaaggatggtcaaagtaagaaagcttttccgcgacacggaatcaacagagtttataatcgtgacaatcccaacggtgatggcaatcagtgagtcatcaagactgcattcttcgttgcaaaaggaaagtgttcctgtaaggagactcattgtgaaccaagttctgccaccttcaacatcggactgtaaattctgttctataaaaagaaaggatcaaacgcgtgcattggatatgatacggactgacccagagttaaaaggtttgaacattatccaagcacctcttgtggacatggagattagaggtgttccggctctcaattttttgggtgatatactgtggaagtaacttcagttatgggaaacatgatcgcttataagggtgcttaattggccaatatcactgttagcctgctgcacaattgcactgctctgcaactagcaatctgtgggctcttctggttgtttccagctaacaattgcacaataagcttaagttgtttccagctacaatacagcacaacacattctccatggtgcgttaaatctgagtagaaagcaccaaattggagggttttgctgcactcctgcactagcatttgatgacctgttactcttggcagtgatgcagattggatttagccccaaattaggctaattgaagtgaaatgctgtaatatttatccttttatcaattatccccaagattaatagcaacacttgtggccttttggttcggcgactttgtaaaactcttcgtttcttatgtgccatctcaattttgt

SEQ ID NO: 16809 - protein, 406 aa, Zea mays subsp. mays
  peptide (1)..(406): Ceres Seq. ID no. 12415417
KTKQSASSQLVTMLATASPHLQAAARRLFLAVPVNQGCSSIRLPRRCFGRYASVRAASVTAPPAKEGADDLGFLEMSSGTRRRYYMLGGKGGVGKTSCAASLAVRFANNGHPTLVVSTDPAHSLSDSFAQDLSGGTLVQVEGPDSPLFALEINPEKAREEFRTVSQKNGGTGVKDFMDSMGLGVLVEQLGELKLGELLDTPPPGLDEAIAISKVMQFLEAQEYSMFSRIVFDTAPTGHTLRLLSLPDFLDASIGKILKLRSKIASATSAIKSVFGQEVQQQDAANKLEQLRERMVKVRKLFRDTESTEFIIVTIPTVMAISESSRLHSSLQKESVPVRRLIVNQVLPPSTSDCKFCSIKRKDQTRALDMIRTDPELKGLNIIQAPLVDMEIRGVPALNFLGDILWK

SEQ ID NO: 16810 - protein, 394 aa, Zea mays subsp. mays
  peptide (1)..(394): Ceres Seq. ID no. 12415418
MLATASPHLQAAARRLFLAVPVNQGCSSIRLPRRCFGRYASVRAASVTAPPAKEGADDLGFLEMSSGTRRRYYMLGGKGGVGKTSCAASLAVRFANNGHPTLVVSTDPAHSLSDSFAQDLSGGTLVQVEGPDSPLFALEINPEKAREEFRTVSQKNGGTGVKDFMDSMGLGVLVEQLGELKLGELLDTPPPGLDEAIAISKVMQFLEAQEYSMFSRIVFDTAPTGHTLRLLSLPDFLDASIGKILKLRSKIASATSAIKSVFGQEVQQQDAANKLEQLRERMVKVRKLFRDTESTEFIIVTIPTVMAISESSRLHSSLQKESVPVRRLIVNQVLPPSTSDCKFCSIKRKDQTRALDMIRTDPELKGLNIIQAPLVDMEIRGVPALNFLGDILWK

SEQ ID NO: 16811 - protein, 331 aa, Zea mays subsp. mays
  peptide (1)..(331): Ceres Seq. ID no. 12415419
MSSGTRRRYYMLGGKGGVGKTSCAASLAVRFANNGHPTLVVSTDPAHSLSDSFAQDLSGGTLVQVEGPDSPLFALEINPEKAREEFRTVSQKNGGTGVKDFMDSMGLGVLVEQLGELKLGELLDTPPPGLDEAIAISKVMQFLEAQEYSMFSRIVFDTAPTGHTLRLLSLPDFLDASIGKILKLRSKIASATSAIKSVFGQEVQQQDAANKLEQLRERMVKVRKLFRDTESTEFIIVTIPTVMAISESSRLHSSLQKESVPVRRLIVNQVLPPSTSDCKFCSIKRKDQTRALDMIRTDPELKGLNIIQAPLVDMEIRGVPALNFLGDILWK

SEQ ID NO: 16812 - DNA, 1761 bp, Zea mays subsp. mays; identical to SEQ ID NO: 6671
  misc_feature (1)..(1761): Ceres Seq. ID no. 12382163
  misc_feature (1)..(1761): Ortholog of  Ceres SEQ ID NO 13599900 as cited in SEQ ID NO 531
  misc_feature (1)..(1761): Ortholog of  Ceres SEQ ID NO 14310498 as cited in SEQ ID NO 55066
  misc_feature (1)..(1761): Ortholog of  Ceres SEQ ID NO 13596509 as cited in SEQ ID NO 62004
  misc_feature (1)..(1761): Ortholog of  Ceres SEQ ID NO 13659971 as cited in SEQ ID NO 67565
  misc_feature (1)..(1761): Ortholog of  Ceres SEQ ID NO 13500385 as cited in SEQ ID NO 67583

SEQ ID NO: 16813 - protein, 443 aa, Zea mays subsp. mays; identical to SEQ ID NO: 6672
  peptide (1)..(443): Ceres Seq. ID no. 12382164

SEQ ID NO: 16814 - protein, 439 aa, Zea mays subsp. mays; identical to SEQ ID NO: 6673
  peptide (1)..(439): Ceres Seq. ID no. 12382165

SEQ ID NO: 16815 - protein, 386 aa, Zea mays subsp. mays; identical to SEQ ID NO: 6674
  peptide (1)..(386): Ceres Seq. ID no. 12382166

SEQ ID NO: 16816 - DNA, 1405 bp, Zea mays subsp. mays
  misc_feature (1)..(1405): Ceres Seq. ID no. 12367813
  misc_feature (1)..(1405): Ortholog of  Ceres SEQ ID NO 14302306 as cited in SEQ ID NO 62834
  misc_feature (1)..(1405): Ortholog of  Ceres SEQ ID NO 14303305 as cited in SEQ ID NO 0
aaaacgaagcaaaagcaaccgtcgagcttgcaacgccttacgcctccacactcaacagtcatggtcgtcatgggcaaggagcagcaacaacacgaggaggaggaggtgcaagggaaggtcgtccaagaagaagtgcaagtcgttcaagagacggtggtgccggtgccgtcggaggaggacaaggaggccgaggcggcgctggtgcacaagatctccagcctggccgccgccatcgcgaagctgccatccctgagcccgtcgccggaggtgaacgcgctcttcaccgagctcgtgacggcgtgcatcccgcgcagcagcgtggacgtggagcggctgggcccggagctgcaggagatgcgcggcgggctgatccgcctctgcgccgacgcggaggcgctgctggaggcgcactactccgacctgctggcctccttcggacaacccgctggagcacctgtcgctcttcccgtacatcaacaactacatcctgctgagccagctggagcacggcctgctggcgcggcacgtgccgggcccagcgccggcgcgcgtggccttcgtcggctccggcccgctcccgctgagctccctggtgctcgcggcgcgccaccttccgggcgcctccttcgacaactacgacatctgcggggaggccaacgaccgggcgcggcgcctggtgcgcggcgacggcgcgctccaggcgcgcatggcgttccgcacctcggacgtggcggacgtgacccgggagctggcgtcgtacgacgccgtgttcctggcggcgctggtgggcatggcggccgaggagaaggcccgcgtggtggcgcacctcgggaggcacatggcccccggcgccgcgctggtggtgcggagcgcgcacggcgcgcgcgggttcctgtaccccgtggtggaccccgaggagatccggcgcggcggattcgacgtgctcgccgtgcaccacccggagggggaggtgatcaactccgtgatcatcgcgcgcaagcccgttgccgtcgacgcgcacgccaccggcggggtggggcacgcgcacgcgcacgcgcacggcgccgtgctcagccggccctgcctctgctgcgagatggaggcccgggcgcaccagaagatggaggaggtggccgtcgagcagctgccgtcctaggcaggcgcacaccggcgtcctcgctttcttgtccgtccggccgcccatttgattttcggagttgcatctatctcatctaatatccatccatccatccatccatctatagcagtattatgtatgcatccacatggtaataatctggctgaccgcatccgcatatggtcgtctcatcgtccatctataccttgaaagctactaattaattactgagttattattactactgtttttactactactacgtac

SEQ ID NO: 16817 - protein, 411 aa, Zea mays subsp. mays
  peptide (1)..(411): Ceres Seq. ID no. 12367814
KTKQKQPSSLQRLTPPHSTVMVVMGKEQQQHEEEEVQGKVVQEEVQVVQETVVPVPSEEDKEAEAALVHKISSLAAAIAKLPSLSPSPEVNALFTELVTACIPRSSVDVERLGPELQEMRGGLIRLCADAEALLEAHYSDLLASFGQPAGAPVALPVHQQLHPAEPAGARPAGAARAGPSAGARGLRRLRPAPAELPGARGAPPSGRLLRQLRHLRGGQRPGAAPGARRRRAPGAHGVPHLGRGGRDPGAGVVRRRVPGGAGGHGGRGEGPRGGAPREAHGPRRRAGGAERARRARVPVPRGGPRGDPARRIRRARRAPPGGGGDQLRDHRAQARCRRRARHRRGGARARARARRRAQPALPLLRDGGPGAPEDGGGGRRAAAVLGRRTPASSLSCPSGRPFDFRSCIYLI

SEQ ID NO: 16818 - protein, 391 aa, Zea mays subsp. mays
  peptide (1)..(391): Ceres Seq. ID no. 12367815
MVVMGKEQQQHEEEEVQGKVVQEEVQVVQETVVPVPSEEDKEAEAALVHKISSLAAAIAKLPSLSPSPEVNALFTELVTACIPRSSVDVERLGPELQEMRGGLIRLCADAEALLEAHYSDLLASFGQPAGAPVALPVHQQLHPAEPAGARPAGAARAGPSAGARGLRRLRPAPAELPGARGAPPSGRLLRQLRHLRGGQRPGAAPGARRRRAPGAHGVPHLGRGGRDPGAGVVRRRVPGGAGGHGGRGEGPRGGAPREAHGPRRRAGGAERARRARVPVPRGGPRGDPARRIRRARRAPPGGGGDQLRDHRAQARCRRRARHRRGGARARARARRRAQPALPLLRDGGPGAPEDGGGGRRAAAVLGRRTPASSLSCPSGRPFDFRSCIYLI

SEQ ID NO: 16819 - protein, 388 aa, Zea mays subsp. mays
  peptide (1)..(388): Ceres Seq. ID no. 12367816
MGKEQQQHEEEEVQGKVVQEEVQVVQETVVPVPSEEDKEAEAALVHKISSLAAAIAKLPSLSPSPEVNALFTELVTACIPRSSVDVERLGPELQEMRGGLIRLCADAEALLEAHYSDLLASFGQPAGAPVALPVHQQLHPAEPAGARPAGAARAGPSAGARGLRRLRPAPAELPGARGAPPSGRLLRQLRHLRGGQRPGAAPGARRRRAPGAHGVPHLGRGGRDPGAGVVRRRVPGGAGGHGGRGEGPRGGAPREAHGPRRRAGGAERARRARVPVPRGGPRGDPARRIRRARRAPPGGGGDQLRDHRAQARCRRRARHRRGGARARARARRRAQPALPLLRDGGPGAPEDGGGGRRAAAVLGRRTPASSLSCPSGRPFDFRSCIYLI

SEQ ID NO: 16820 - DNA, 1258 bp, Zea mays subsp. mays
  misc_feature (1)..(1258): Ceres Seq. ID no. 12355337
  misc_feature (1)..(1258): Ortholog of  Ceres SEQ ID NO 15179055 as cited in SEQ ID NO 0
ctgtcagtgctcgccgcgcggatctagggggaggggggccgtgcccggcgcggacgccgggatgccgatctgcgcgccgtcgtccgactcctcggcctcggcctcgtcgggcttgggcgcccgcgtctgggtgctccacgggctagcgctcggcgcggcggccgcggccgctgccgttgcgtacctgtaccggcggccgaccgggttccgcagccgcgcggtggggatcatacccgcgcgcttcgcctccacgcgcttcgagggcaagccgctcgttcccatcctcggcaagcccatgatccagagaacatgggaaagagttatgctagcttcttcgttggaccatgttgttgtggcaacggatgatgagagaattgcagaatgctgtcgaggatttggagctgatgttataatgacatcagcatcttgcaaaaacggatctgaacgctgctgtgaggcactaaagaagcttgataagcactatgatattgttgtcaatattcaaggagatgagcctctcattgaaccagagataatagatggtgtagttatgtcactgcagcgagctcctgatgcagtcttcagcacagctgttacttcactgaaaccagaagatgcattcgatacaaacagggtgaagtgttttgtggataatctgggctacgcaatatacttttcaagagggctgattccattcaataaatcagggaacgccaatccaaaatatccatatcttcttcatcttggaatcgcgggctttgattcaaaatttttgaagatatatccagaacttccaccaacaccattacaaatggaagaggacctagagcaactaaaagttcttgaaaatggctataggatgaaggtgatcaaagtggaccatgatgcccatggtgtggatgcacccgaggacgttgagaaaatcgaagcactgatgcgaacgagaaacattcagtagaaaacgaagagaaagcaagtgctttgcattgctatcggcgttggcttggtgggatacttttggttgtgctttcccgtcttctgaatagcatgataccaagtgaagttggtgcatcacttcttgaagttttgtgcttgctaaaacgttcagtgattggatatgtcacttgcattagtcctcaatcagcagttcagcgcgcaggtggattgtatctgtacttcagtagttagtagcattactttcagtcttctttacattgaaaaacaaatcgtttctggagatgaagcaattggacagtgc

SEQ ID NO: 16821 - protein, 318 aa, Zea mays subsp. mays
  peptide (1)..(318): Ceres Seq. ID no. 12355338
CQCSPRGSRGRGAVPGADAGMPICAPSSDSSASASSGLGARVWVLHGLALGAAAAAAAVAYLYRRPTGFRSRAVGIIPARFASTRFEGKPLVPILGKPMIQRTWERVMLASSLDHVVVATDDERIAECCRGFGADVIMTSASCKNGSERCCEALKKLDKHYDIVVNIQGDEPLIEPEIIDGVVMSLQRAPDAVFSTAVTSLKPEDAFDTNRVKCFVDNLGYAIYFSRGLIPFNKSGNANPKYPYLLHLGIAGFDSKFLKIYPELPPTPLQMEEDLEQLKVLENGYRMKVIKVDHDAHGVDAPEDVEKIEALMRTRNIQ

SEQ ID NO: 16822 - protein, 298 aa, Zea mays subsp. mays
  peptide (1)..(298): Ceres Seq. ID no. 12355339
MPICAPSSDSSASASSGLGARVWVLHGLALGAAAAAAAVAYLYRRPTGFRSRAVGIIPARFASTRFEGKPLVPILGKPMIQRTWERVMLASSLDHVVVATDDERIAECCRGFGADVIMTSASCKNGSERCCEALKKLDKHYDIVVNIQGDEPLIEPEIIDGVVMSLQRAPDAVFSTAVTSLKPEDAFDTNRVKCFVDNLGYAIYFSRGLIPFNKSGNANPKYPYLLHLGIAGFDSKFLKIYPELPPTPLQMEEDLEQLKVLENGYRMKVIKVDHDAHGVDAPEDVEKIEALMRTRNIQ

SEQ ID NO: 16823 - protein, 220 aa, Zea mays subsp. mays
  peptide (1)..(220): Ceres Seq. ID no. 12355340
MIQRTWERVMLASSLDHVVVATDDERIAECCRGFGADVIMTSASCKNGSERCCEALKKLDKHYDIVVNIQGDEPLIEPEIIDGVVMSLQRAPDAVFSTAVTSLKPEDAFDTNRVKCFVDNLGYAIYFSRGLIPFNKSGNANPKYPYLLHLGIAGFDSKFLKIYPELPPTPLQMEEDLEQLKVLENGYRMKVIKVDHDAHGVDAPEDVEKIEALMRTRNIQ

SEQ ID NO: 16824 - DNA, 1517 bp, Zea mays subsp. mays
  misc_feature (1)..(1517): Ceres Seq. ID no. 12357252
  misc_feature (1)..(1517): Ortholog of  Ceres SEQ ID NO 13599900 as cited in SEQ ID NO 531
  misc_feature (1)..(1517): Ortholog of  Ceres SEQ ID NO 13659971 as cited in SEQ ID NO 67565
  misc_feature (1)..(1517): Ortholog of  Ceres SEQ ID NO 13500385 as cited in SEQ ID NO 67583
aaactctgtgcgccttggtgtgaccggtggtctctgtgctcccaagctgagcagcagcaatcgccgttccggaggccggagcacagagacgagacccgccgagcagtttgggtttttttttttttttgatgatttggtgcacctacctaaagaagcctttggcatcgagtacgcctagtaccaccaccaccaccaaagaagccttgagcatgcagggttgctgccagtaaaacgaagatctacatggtgcttgagtttgtcaacggcggcgagctcttcgacaagatcgctatcaaggggaaactgtccgaacacgagggcaggaggctcttccagcagctaatcgacggcgtcagctattgccatgacagaggtgtctaccaccgagacctcaagccagagaatgtccttgttgatcggaagggcaccatcaagatctctgacttcggcctcagcgctctacctcaacatctcgggagtgacggacttctgcacacaacatgtggcagccccaactacatagctcctgaggttctgcaaaacagaggctatgacggctccttgtcagatctctggtcgtgtggggtgatcctctacgtgatgcttgttggctgccttcccttcgacgacaggaacctcgtcgttctttatcagaagattttcaagggagactgtcagatccccaagtggctttcgcctgccgcgcaggaccttctcaagaggatcctccaaccgaatccgatgaagaggatcaacgtcgcggggatcagggagcacgagtggttcaagaaggactacgtgcctgctgttccgcacgatgatgacgaagacgtccttcctagtccagctccctcgataaagccaatcgatgagccgggcgcaagagaagtgttctcctatcaacgcttttcagttgatcgggatggcctcttcccttgacctttctggtttcttcgaggaagaggatgcagcgcaaagaaagattcggttcacttcgacgcacccacccaaggatctatttgacaagatcgagagcgttgtcatggagatgggattcaaagtccataggggggcaggcaagctcaaggtcttgaagaatagcaagtgttccaggaacccgtcatcattgttggtgtgcaccgaggtgtttgagctcggtccatcattatatgtcgtagagcttaggaaatcccacggagactctacgttgtatagacagctgtgcgaaaggctctccgatgagctaggtgcctgcaagacagaccagatcgcgaggactgaatcatcgagtgacgacctctcgagcgtcgatggcgaagcgttccctctatctgggttctgatcatattgctttccctgtgttgttttgggaacaggggatgaggaacatgctcgttcctgatgcaattctagattaggatcatgaatatagtgtacaaagccagcggcggcggcggtgcaaattagccaccgggttgaatataaataatatatatatatgatatgttgcatcttcg

SEQ ID NO: 16825 - protein, 231 aa, Zea mays subsp. mays
  peptide (1)..(231): Ceres Seq. ID no. 12357253
MVLEFVNGGELFDKIAIKGKLSEHEGRRLFQQLIDGVSYCHDRGVYHRDLKPENVLVDRKGTIKISDFGLSALPQHLGSDGLLHTTCGSPNYIAPEVLQNRGYDGSLSDLWSCGVILYVMLVGCLPFDDRNLVVLYQKIFKGDCQIPKWLSPAAQDLLKRILQPNPMKRINVAGIREHEWFKKDYVPAVPHDDDEDVLPSPAPSIKPIDEPGAREVFSYQRFSVDRDGLFP

SEQ ID NO: 16826 - protein, 157 aa, Zea mays subsp. mays
  peptide (1)..(157): Ceres Seq. ID no. 12357254
MSRAQEKCSPINAFQLIGMASSLDLSGFFEEEDAAQRKIRFTSTHPPKDLFDKIESVVMEMGFKVHRGAGKLKVLKNSKCSRNPSSLLVCTEVFELGPSLYVVELRKSHGDSTLYRQLCERLSDELGACKTDQIARTESSSDDLSSVDGEAFPLSGF

SEQ ID NO: 16827 - protein, 139 aa, Zea mays subsp. mays
  peptide (1)..(139): Ceres Seq. ID no. 12357255
MASSLDLSGFFEEEDAAQRKIRFTSTHPPKDLFDKIESVVMEMGFKVHRGAGKLKVLKNSKCSRNPSSLLVCTEVFELGPSLYVVELRKSHGDSTLYRQLCERLSDELGACKTDQIARTESSSDDLSSVDGEAFPLSGF

SEQ ID NO: 16828 - DNA, 1393 bp, Zea mays subsp. mays
  misc_feature (1)..(1393): Ceres Seq. ID no. 12357291
  misc_feature (1)..(1393): Ortholog of  Ceres SEQ ID NO 14314015 as cited in SEQ ID NO 56942
  misc_feature (1)..(1393): Ortholog of  Ceres SEQ ID NO 13596745 as cited in SEQ ID NO 60636
ctgccacctgaaatcccccgaacctatacttttccttcccccgatccaggcggttctcttcccagaagccagcccagaatggcggcatccgacgcgctgcagtccatcgtttacagccgtgggtcgctccgcctcctcgatcagaggaagctgccgctcgagatggagtacatcgacgtcaagagttccgccgatggctggaatgcaataagagacatggttgtccgtggtgctccagcaatagccatagcagcggcactagcattagccgttgaagtttctgatttagattttattggtacgcctgaagaagcagcttcttttgtttcaaagaaattggaataccttgtatccagccgaccaactgcagtgaacctatctgatgctgcaacaaagctccaaactttggtatcaaaggcagctgaaactgcaaaagattccaagtctatctttcaggtctacattgaggccgcagagacgatgcttgttgatgatgtggcagataataaagctattggctcacatggagctgtatttcttcaaaggcagcttgcaaattcaaaaaagatatctgttctaacccattgtaatactggcagtcttgcaactgctggttatggaactgcccttggggttatacgcgctcttcattcggggggagttttagagaaggccttttgcaccgaaactcgtccatttaaccagggatccagacttacagctttcgagttagttcatgaaaaaatacctgcaacactgatagcagattctgctgctgctgcgttgatgaaacaagggcatgttcaggctgtcattgttggtgctgatcgaatagcagcaaatggtgacacagccaacaagattggcacatacaacctcgccatctccgcgaagcatcatagtgtccagttctatgtgtcagcgccggtaacttccattgatctctccctcccatctggggatgagatagtcatagaagaaagatcaccaaaggagttgctgaactctgaaggtggtctgggaaagcaagttgctgcatccggtatatcagtctggaacccagctttcgatgttactccagcaaatctgatcactgcaatcataacagaaaagggtgtgatcacaaaaactgatgctgatggatctttcgacatcaaaggattccttctgcccgcaaaataatactctagcgtggcttccattctgaatgacaaatgtctggatcgacactgttgtattctgttttctctattatacacaataataaagtcatgtcctcataggattttggtgtaagttttatggataggagatcgacgctagggtgtgtacccatagcggcgcgtatgagccgtgttttcacacgagtgggcaagtgaaaaagagatgtggc

SEQ ID NO: 16829 - protein, 393 aa, Zea mays subsp. mays
  peptide (1)..(393): Ceres Seq. ID no. 12357292
LPPEIPRTYTFPSPDPGGSLPRSQPRMAASDALQSIVYSRGSLRLLDQRKLPLEMEYIDVKSSADGWNAIRDMVVRGAPAIAIAAALALAVEVSDLDFIGTPEEAASFVSKKLEYLVSSRPTAVNLSDAATKLQTLVSKAAETAKDSKSIFQVYIEAAETMLVDDVADNKAIGSHGAVFLQRQLANSKKISVLTHCNTGSLATAGYGTALGVIRALHSGGVLEKAFCTETRPFNQGSRLTAFELVHEKIPATLIADSAAAALMKQGHVQAVIVGADRIAANGDTANKIGTYNLAISAKHHSVQFYVSAPVTSIDLSLPSGDEIVIEERSPKELLNSEGGLGKQVAASGISVWNPAFDVTPANLITAIITEKGVITKTDADGSFDIKGFLLPAK

SEQ ID NO: 16830 - protein, 367 aa, Zea mays subsp. mays
  peptide (1)..(367): Ceres Seq. ID no. 12357293
MAASDALQSIVYSRGSLRLLDQRKLPLEMEYIDVKSSADGWNAIRDMVVRGAPAIAIAAALALAVEVSDLDFIGTPEEAASFVSKKLEYLVSSRPTAVNLSDAATKLQTLVSKAAETAKDSKSIFQVYIEAAETMLVDDVADNKAIGSHGAVFLQRQLANSKKISVLTHCNTGSLATAGYGTALGVIRALHSGGVLEKAFCTETRPFNQGSRLTAFELVHEKIPATLIADSAAAALMKQGHVQAVIVGADRIAANGDTANKIGTYNLAISAKHHSVQFYVSAPVTSIDLSLPSGDEIVIEERSPKELLNSEGGLGKQVAASGISVWNPAFDVTPANLITAIITEKGVITKTDADGSFDIKGFLLPAK

SEQ ID NO: 16831 - protein, 339 aa, Zea mays subsp. mays
  peptide (1)..(339): Ceres Seq. ID no. 12357294
MEYIDVKSSADGWNAIRDMVVRGAPAIAIAAALALAVEVSDLDFIGTPEEAASFVSKKLEYLVSSRPTAVNLSDAATKLQTLVSKAAETAKDSKSIFQVYIEAAETMLVDDVADNKAIGSHGAVFLQRQLANSKKISVLTHCNTGSLATAGYGTALGVIRALHSGGVLEKAFCTETRPFNQGSRLTAFELVHEKIPATLIADSAAAALMKQGHVQAVIVGADRIAANGDTANKIGTYNLAISAKHHSVQFYVSAPVTSIDLSLPSGDEIVIEERSPKELLNSEGGLGKQVAASGISVWNPAFDVTPANLITAIITEKGVITKTDADGSFDIKGFLLPAK

SEQ ID NO: 16832 - DNA, 1352 bp, Zea mays subsp. mays
  misc_feature (1)..(1352): Ceres Seq. ID no. 12415473
  misc_feature (1)..(1352): Ortholog of  Ceres SEQ ID NO 15171708 as cited in SEQ ID NO 60063
aggcaggcaggcagccaagaggcaagaggcaagaggtccctcagtcgctaggcgctagctcccggcttaactagtaggcagccatgaatttcggtgggaatggcaacgcgacgatccggtgcaagtactgcagggccagcctgagcgtgatccccggcgagcgcgccatccagtgcgcgcaatgcaactgcgtgacgcgcatccggcgggccgaccgcatcccgctggcgcggccggcgcacgtgccgccggcgttccagcgcgcccggggcaagaagcgcgccgtcctggtcggcatcacgtacgccggcatgcgccaaggctgtggcgacctgaggggccccgtcaacgacgtcaagtgcatgaggaacctcctctgccagcgcttcggcttccccggcgaatgcatcatcatgctcactgacgaccagagggacccgttcaggctgcccacgaaggagaacatccggatggcgatgcactggctggtgcagggctgcagctacggcgactccctggtgttccacttctcgggcatcggcgcgcaggtggcggacgacgacggcgacgaggcggacgggtacgacgaggccatctgcccgctggacgcgttccagagcgggcccatcctggacgacgagatcaacgaggtcatcgtgcgcccgctggtgcacggcgccaggctgcacgccgtggtggacgcctgctacagcgccacggtcctggacctcccctacctgtgccgcatgtccaggaacgggttctggcagtgggaggacgagtgcccgccgtcgggcgcctggaagggcaccagcggaggccacgccgtgctcatcagcggatacagcgagggcaaaggcaacttcgccatgatgcccgacgcccacgcgtcggtcgtcggggccatgacgcacagcttcgtccggacgctggagtgccagccgcgcggggtcacctacggccacctgctcagctccatgagggccatcatgaagaaccgcggcgggggctgcgatctgcagggggccatcggcgcacccatccgcaccgtcgccaacttcagcggcgtgcaggagcctaacctgtcctcttcggagacgtttgacatttaccgcaagcagttcgtcctgtagacaccacgccacaccagtgtttgccccgccggccgcttgtaatgaattgccgtcgtagtatcagaataatcaattatctatcggccatgatatgatatgatatatcaagaaagaaggaactaatacctagagtacttcgttcatctgtattagcagtgaacctctcaatgaaataactaagcatgttcaatgtcctctttttattagagagagacaggg

SEQ ID NO: 16833 - protein, 349 aa, Zea mays subsp. mays
  peptide (1)..(349): Ceres Seq. ID no. 12415474
MNFGGNGNATIRCKYCRASLSVIPGERAIQCAQCNCVTRIRRADRIPLARPAHVPPAFQRARGKKRAVLVGITYAGMRQGCGDLRGPVNDVKCMRNLLCQRFGFPGECIIMLTDDQRDPFRLPTKENIRMAMHWLVQGCSYGDSLVFHFSGIGAQVADDDGDEADGYDEAICPLDAFQSGPILDDEINEVIVRPLVHGARLHAVVDACYSATVLDLPYLCRMSRNGFWQWEDECPPSGAWKGTSGGHAVLISGYSEGKGNFAMMPDAHASVVGAMTHSFVRTLECQPRGVTYGHLLSSMRAIMKNRGGGCDLQGAIGAPIRTVANFSGVQEPNLSSSETFDIYRKQFVL

SEQ ID NO: 16834 - protein, 273 aa, Zea mays subsp. mays
  peptide (1)..(273): Ceres Seq. ID no. 12415475
MRQGCGDLRGPVNDVKCMRNLLCQRFGFPGECIIMLTDDQRDPFRLPTKENIRMAMHWLVQGCSYGDSLVFHFSGIGAQVADDDGDEADGYDEAICPLDAFQSGPILDDEINEVIVRPLVHGARLHAVVDACYSATVLDLPYLCRMSRNGFWQWEDECPPSGAWKGTSGGHAVLISGYSEGKGNFAMMPDAHASVVGAMTHSFVRTLECQPRGVTYGHLLSSMRAIMKNRGGGCDLQGAIGAPIRTVANFSGVQEPNLSSSETFDIYRKQFVL

SEQ ID NO: 16835 - protein, 256 aa, Zea mays subsp. mays
  peptide (1)..(256): Ceres Seq. ID no. 12415476
MRNLLCQRFGFPGECIIMLTDDQRDPFRLPTKENIRMAMHWLVQGCSYGDSLVFHFSGIGAQVADDDGDEADGYDEAICPLDAFQSGPILDDEINEVIVRPLVHGARLHAVVDACYSATVLDLPYLCRMSRNGFWQWEDECPPSGAWKGTSGGHAVLISGYSEGKGNFAMMPDAHASVVGAMTHSFVRTLECQPRGVTYGHLLSSMRAIMKNRGGGCDLQGAIGAPIRTVANFSGVQEPNLSSSETFDIYRKQFVL

SEQ ID NO: 16836 - DNA, 931 bp, Zea mays subsp. mays
  misc_feature (1)..(931): Ceres Seq. ID no. 12415503
  misc_feature (1)..(931): Ortholog of  Ceres SEQ ID NO 12618524 as cited in SEQ ID NO 64447
gttctggtgttccgctctgccgagtcgatgagaaatagccgccgggttcacagttcacttgcagtcgcagtcgcagtcgcagttgctggttgctttgctccccacatttgtcgacggtcgccgtcgccggttcctcgtgcaacgcaccgcgctaacgatggccgagacggtgggcttcgcgagcggcgacgcggcggcgtggcgcgcagcgctggccgcgtacgaccgccgtctcgcggccctagacaaacccgacctcgtggccgtggactccttttaccgccacgacctgcccgcgctcctgcgctgccgtgacccggatcctttcctcgccaagcccgagctggtgcgcctcctccagtggaagctctctcgcggcaagtggagaccgaggctgatggatttcgtcaagggcttggacgacgccgtggtggagtcggcgtcgcgcaaggcgttcgcggctttgcccgacctcagaagggccatcaccgagcttaccgtgctcaagggagtcggacccgccactgcgtccgccgtgctcgctgcgtatgcacctgatgtcgcaccgttcatgtctgacgagccttgggcaattcaaaggagtacactctgaagcagtaccttgcatttgctgataaattgcaggcaaaagcgaaggaactgagcataggagaagaaagtttcacaccctcagatgtcgagagagcactgtggagctcggcaattgcgtccaagtcaccaccaagcggtaacccaaagagggaatcaaagatgcatggcaagaggaaaagatgatttacaccgcgcttctttattgaggctaaaagggttttagtagctgcgggtcttagattcttagttgaacacttgtttttgtaacctgcggaatggaatcctttggtggagtataatttgaaatccttagttgacc

SEQ ID NO: 16837 - protein, 151 aa, Zea mays subsp. mays
  peptide (1)..(151): Ceres Seq. ID no. 12415504
MAETVGFASGDAAAWRAALAAYDRRLAALDKPDLVAVDSFYRHDLPALLRCRDPDPFLAKPELVRLLQWKLSRGKWRPRLMDFVKGLDDAVVESASRKAFAALPDLRRAITELTVLKGVGPATASAVLAAYAPDVAPFMSDEPWAIQRSTL

SEQ ID NO: 16838 - protein, 104 aa, Zea mays subsp. mays
  peptide (1)..(104): Ceres Seq. ID no. 12415505
VLVFRSAESMRNSRRVHSSLAVAVAVAVAGCFAPHICRRSPSPVPRATHRANDGRDGGLRERRRGGVARSAGRVRPPSRGPRQTRPRGRGLLLPPRPARAPALP

SEQ ID NO: 16839 - protein, 95 aa, Zea mays subsp. mays
  peptide (1)..(95): Ceres Seq. ID no. 12415506
MRNSRRVHSSLAVAVAVAVAGCFAPHICRRSPSPVPRATHRANDGRDGGLRERRRGGVARSAGRVRPPSRGPRQTRPRGRGLLLPPRPARAPALP

SEQ ID NO: 16840 - DNA, 1522 bp, Zea mays subsp. mays; identical to SEQ ID NO: 4590
  misc_feature (1)..(1522): Ceres Seq. ID no. 12341968
  misc_feature (1)..(1522): Ortholog of  Ceres SEQ ID NO 13659759 as cited in SEQ ID NO 67663

SEQ ID NO: 16841 - protein, 466 aa, Zea mays subsp. mays; identical to SEQ ID NO: 4591
  peptide (1)..(466): Ceres Seq. ID no. 12341969

SEQ ID NO: 16842 - protein, 422 aa, Zea mays subsp. mays; identical to SEQ ID NO: 4592
  peptide (1)..(422): Ceres Seq. ID no. 12341970

SEQ ID NO: 16843 - protein, 393 aa, Zea mays subsp. mays; identical to SEQ ID NO: 4593
  peptide (1)..(393): Ceres Seq. ID no. 12341971

SEQ ID NO: 16844 - DNA, 1795 bp, Zea mays subsp. mays
  misc_feature (1)..(1795): Ceres Seq. ID no. 12358446
  misc_feature (1)..(1795): Ortholog of  Ceres SEQ ID NO 13663329 as cited in SEQ ID NO 61080
atctggtcggcgtggatcggatcttcggtggtgtttctcgtcttcacggcgattagtggcggcgagccgaccacgtccccgcagcagcagtcagcggcggcttgacgcggtcggacgggtacctctagttggcatcagcgagtgggcgcggggcgccgcaagtctcaccgtccgctggtgtagaggccccgagtctcggcgctatggagtgtaggccgcgtgtctccgcttagggagggccaggggtcaacaaagggacttgtcaagtgacaacatcgcggccttcgggtgttggagcctgcttggaggtgtccggcctattggtgccgtaccacaggattggttcattatttgtgggagatctatatttgtcttaccattttgttcccgcttctagtccccaaatcttcacgggctttgccagatcgctggccatctccttggcagccgcttccgctgtcgccagccatcaccaacctgcgcctcatagtggagcccaggaaaggcggtgggactgagcgagggaagaggagatgactagcttgtcgatcacggtgatgacgctaacctgcatgaaggcgaacagccgagcgagagccccaacagctgggagaagcgccgggacatctgcgtcagcgtcatcaccagctactctcccaccatcctttgcacccagcaaggcttaagatggcaactggactacctacaacagtgcttgccgggttatgaacagtttggaatctcaagaaaaggctcacaggacaacactgatgaatactgcacaatattctatgaaaaggagaaggtggagcttactgaaggtggcactttttggttgtcggaatcaccatcggttccaggaagcatttcatggggagcaaaggcaccctgcattgcaacatgggcaacgtttcaactcaaaagactagaaccacctggattcagtttccagatcgtaaatacaaatcttgatgaagttagccctcgtgctcgacgaagaagtgctttacttacatggcaacatatagcatcgctgccacccaatttgcctgttatctattgtggaggcttcaatacacagaaggaatctatgactgggcggtttttgcttggcagatccagagaacatggtgttgttggtgatatgagagatgcttggccaaatgctcgagtgcgaaaaaatgtttcactaatacacacatatcatggatttaaaggggagaaacaaggtgccctggaatttcttaaattgatatttagagctctttgcctctgctgggatcgacagacacaggacttgcatatcgactggatcttgtttagaggacgcccattggttcctgcactttgtgaggtcattaatgacaatatagatggtgtttatccgtcgtcgcacttccctatctttgccgagtttttgcttccacgctcagtccgcctagctgagacaccttcatagctattgtgtcaattttttgttctatttttcccaatcttattttgattacggctgattgtttctttcgaccacttcaccatgatcttgcggtaacccccctttacaaccattgttgggtttctttctgttatcccattccgcaaaacaagacaatgcacatgtgcatccttgtatgtttcctgtcactagtccctattatgtgttcgccttagctttgttatcttcttaaagttcactttttccttatgtcattgatttttagactgtcatatataccgtgtatatatatggtatgaatatgttgtcatgtatagtcggccgatccttgtatatgtt

SEQ ID NO: 16845 - protein, 122 aa, Zea mays subsp. mays
  peptide (1)..(122): Ceres Seq. ID no. 12358447
MTGRFLLGRSREHGVVGDMRDAWPNARVRKNVSLIHTYHGFKGEKQGALEFLKLIFRALCLCWDRQTQDLHIDWILFRGRPLVPALCEVINDNIDGVYPSSHFPIFAEFLLPRSVRLAETPS

SEQ ID NO: 16846 - protein, 104 aa, Zea mays subsp. mays
  peptide (1)..(104): Ceres Seq. ID no. 12358448
MRDAWPNARVRKNVSLIHTYHGFKGEKQGALEFLKLIFRALCLCWDRQTQDLHIDWILFRGRPLVPALCEVINDNIDGVYPSSHFPIFAEFLLPRSVRLAETPS

SEQ ID NO: 16847 - protein, 70 aa, Zea mays subsp. mays
  peptide (1)..(70): Ceres Seq. ID no. 12358449
SGRRGSDLRWCFSSSRRLVAASRPRPRSSSQRRLDAVGRVPLVGISEWARGAASLTVRWCRGPESRRYGV

SEQ ID NO: 16848 - DNA, 1173 bp, Zea mays subsp. mays
  misc_feature (1)..(1173): Ceres Seq. ID no. 12566291
  misc_feature (1)..(1173): Ortholog of  Ceres SEQ ID NO 13596762 as cited in SEQ ID NO 63019
gtgaccacgtcccacgccgagttccgctggccgctgtcgccgaaacacggcagcaggagcagtagcgtccgtcctgtccgcgcgcgttcccctccccgaccggcaggttccccggccattcatccgtttcccactgctcctccgtggctcagctctgctccctgtatcggtctgcccctctgccctcccggtctctcctcttcccgtcccgcccagcgcgtcccccaaggaagccccgacgccgcggcatggggatcgtggaggaggcgcacaacctgcgcgtggtgggcgaggggaagcgcggggtcatcgtgctggcgcacggcttcggcaccgaccagtccgtctggaagcatctggtgccgcacctcgtcgccgactaccgcgtcgtgctcttcgacaccatgggcgccggccccaccaacccggactacttcgacttctcccgctacgccacgctcgagggctacgcgctcgacctcctcgccatcctccaggagctcggcgtccagtcctgcatctacgtcggccactccgtctccgcgatcatcggcgcgctcgcgtccatctccaggcccgacctcttcaccaagctcgtgctcctctccgcgtccccaaggtacctcaacgatgtggactactatggcgggttcgagcaagatgagctggatgagctgtttgaggcgatgcaatcaaactacaaggcctggtgcttaggttttgcacccctgtgtgtcggaggagatatggaatcagtggcagttcaggagtttagcaggacactcttcaatatacgtccggacattgcacttaatgttgcccagacgatcttccagagcgatgtgcgcagcctcctcccgcacgttagtgtcccatgccacattgttcagagcaccaaggatctcgcggtgccagttgtggtgtctgagtacctgcacaggcaccttggtggcgactccatcgtggaggtgatgccctctgaaggccatcttccccagcttagctctccagacattgtaacccctgtcttactccggcacatccagcatgacatcgcaatctaggttggccagtcgttccaacaagacaatgagcactcgaagctgtctactgcctgtttgtatgatatcccgcttaattgttcaacgtaggattgcatctatttgatgctct

SEQ ID NO: 16849 - protein, 271 aa, Zea mays subsp. mays
  peptide (1)..(271): Ceres Seq. ID no. 12566292
MGIVEEAHNLRVVGEGKRGVIVLAHGFGTDQSVWKHLVPHLVADYRVVLFDTMGAGPTNPDYFDFSRYATLEGYALDLLAILQELGVQSCIYVGHSVSAIIGALASISRPDLFTKLVLLSASPRYLNDVDYYGGFEQDELDELFEAMQSNYKAWCLGFAPLCVGGDMESVAVQEFSRTLFNIRPDIALNVAQTIFQSDVRSLLPHVSVPCHIVQSTKDLAVPVVVSEYLHRHLGGDSIVEVMPSEGHLPQLSSPDIVTPVLLRHIQHDIAI

SEQ ID NO: 16850 - protein, 238 aa, Zea mays subsp. mays
  peptide (1)..(238): Ceres Seq. ID no. 12566293
VTTSHAEFRWPLSPKHGSRSSSVRPVRARSPPRPAGSPAIHPFPTAPPWLSSAPCIGLPLCPPGLSSSRPAQRVPQGSPDAAAWGSWRRRTTCAWWARGSAGSSCWRTASAPTSPSGSIWCRTSSPTTASCSSTPWAPAPPTRTTSTSPATPRSRATRSTSSPSSRSSASSPASTSATPSPRSSARSRPSPGPTSSPSSCSSPRPQGTSTMWTTMAGSSKMSWMSCLRRCNQTTRPGA

SEQ ID NO: 16851 - protein, 219 aa, Zea mays subsp. mays
  peptide (1)..(219): Ceres Seq. ID no. 12566294
MGAGPTNPDYFDFSRYATLEGYALDLLAILQELGVQSCIYVGHSVSAIIGALASISRPDLFTKLVLLSASPRYLNDVDYYGGFEQDELDELFEAMQSNYKAWCLGFAPLCVGGDMESVAVQEFSRTLFNIRPDIALNVAQTIFQSDVRSLLPHVSVPCHIVQSTKDLAVPVVVSEYLHRHLGGDSIVEVMPSEGHLPQLSSPDIVTPVLLRHIQHDIAI

SEQ ID NO: 16852 - DNA, 1470 bp, Zea mays subsp. mays
  misc_feature (1)..(1470): Ceres Seq. ID no. 12354613
  misc_feature (1)..(1470): Ortholog of  Ceres SEQ ID NO 14311131 as cited in SEQ ID NO 53729
  misc_feature (1)..(1470): Ortholog of  Ceres SEQ ID NO 13594037 as cited in SEQ ID NO 55666
  misc_feature (1)..(1470): Ortholog of  Ceres SEQ ID NO 15171501 as cited in SEQ ID NO 58322
agaaaatgttcctcgcaaagtttggctgacggcacccaccgcccacagaagcgcacctctgttctttggtgtgtggccgtgtggattcaaaaccgctgaccggccgcttatttaagcccttgccccgccggttttctcttctcccgtcggcgctggtccacgcggctccaacacctgcctgcctgcctgattcttacaccaaccaaccacgcgcgccaagccgaattcgtcttccaccgatccgccccgcccgtttcccattgcttagcttgctatggcgcagcagcagccggtgcggcggattctgaaggtggcaccgccggggaagggggacggggaatccttccccacggtgcaggcggcggtcgacgcggtgccgctgggcaaccgggcgcgcgtcgtcatccgcctcgcgccgggggtctacagggagcctgtctacgtcgccaagaccaagaacttcatcaccgtcgcgggggcctcgcccgaggccaccgtcgtgtcatgggacaacaccgccacgcgcatcaggcactcgcagtcatccagggttataggaactggaacattcggctgtggtacgttcatcattgagggggaagatttcattgcagagaatatcacgtttgagaactcagctccccagggctctgggcaggccgttgcagtccgggtaaccgcagataggtgtgctttctacaactgccggttcctcggttggcaagacacattatacttacactacgggaaacagtacttaagagactgttatattgaaggccattgtgacttcatctttggtaactctgtcgcccttatggagcattgccatatccattgcaaagcagcgggatacatcactgctcatagccggaagtccacatcagaatctactggctatgtgttcttgaggtgtactattactggacatggagaagctggatacatgttcctaggtcggccatgggggccctttggaagggttgtctttgcgtacactttcatggatcgatgcatcaagccttctgggtggcacaactgggacaaatccgagaacgagcgaactgcttgcttttatgagtacaggtgctcagggccaggcgccctcccatcgaaccgggtcacatggtgtagacagttgctggatgttgaagcagagcagttccttgcgcacacttttatcgacccagacgtcgataggccatggctcctccagatgatggcgataagaataccagcctcagcatagtttgatcccggcagccgcaggtcctgcatggttcatgcctcctttctagcctatttaaataaactaagttggaggatgcattatatttgcataagtttgtaacgtttggtgaattagtatccactttcatctcactgtgggcggtggggatagggaatgagagagcttctcttgtaacgaaccccagcactaggctgaaatatatgcagattttattttgc

SEQ ID NO: 16853 - protein, 324 aa, Zea mays subsp. mays
  peptide (1)..(324): Ceres Seq. ID no. 12354614
MAQQQPVRRILKVAPPGKGDGESFPTVQAAVDAVPLGNRARVVIRLAPGVYREPVYVAKTKNFITVAGASPEATVVSWDNTATRIRHSQSSRVIGTGTFGCGTFIIEGEDFIAENITFENSAPQGSGQAVAVRVTADRCAFYNCRFLGWQDTLYLHYGKQYLRDCYIEGHCDFIFGNSVALMEHCHIHCKAAGYITAHSRKSTSESTGYVFLRCTITGHGEAGYMFLGRPWGPFGRVVFAYTFMDRCIKPSGWHNWDKSENERTACFYEYRCSGPGALPSNRVTWCRQLLDVEAEQFLAHTFIDPDVDRPWLLQMMAIRIPASA

SEQ ID NO: 16854 - DNA, 1673 bp, Zea mays subsp. mays
  misc_feature (1)..(1673): Ceres Seq. ID no. 12349655
  misc_feature (1)..(1673): Ortholog of  Ceres SEQ ID NO 14314108 as cited in SEQ ID NO 63184
  misc_feature (1)..(1673): Ortholog of  Ceres SEQ ID NO 13658253 as cited in SEQ ID NO 66650
atatatgcacatacatgcatggttaattaagttgcaacgacgacgacgaccatggagactgtgttcaagtggagagcaagaacaggaggcggagtctcgctgatccatctccttgtccggtgttttgcagtggcagctgccatcttgctgctggcagatgggaggcatgctcatgcagtagatcatcccgcacccgtggaggtacagacaggcagctgcagcgaggtggccgacgagcagcagtggcggatggtgaagaccaggggaaaccagttcgtcgtcggcgacgaccacgacgacaggccgttctacgtgaacggcttcaacacgtactggctgatgatcctcgccgtcgacccgtccaccaggggcaaggtcacggaggtgttccagcaggcggtggcggccggcctcacggtgtgccgcacctgggccttcaacgacggcggctggagggcgcttcagaagtcgccgtctgtctacgacgaggatgtcttcaaggcgctggatttcgtggtgagcgaggcgaggaagtacaggatcaggcttatactgtcactgatcaacaactgggacagctacggcggcaaggcgcagtacgtcaaatgggccggggacgacgccgccgccgacggcggccgcctcaacatcaccgcctccgttgacgatgacttcttttccgaccaaaccgtgaaggtctacttcaagaaccacgtcaagaacatgctgacgagggtgaacacgtacaccagtgtgatgtacaaggacgacccgaccatcttcgcgtgggagctcatgaatgagccgcgctgcacgtcggatccagccgggaacaagctgcaggagtggatccaagagatggcgttccatgtgaagtccatcgacccggaccacctgctggaagttggcggcttggcgcagagggcttctacgggccctcgtcgccgtcacggcttccggccaacccgaacgcctatgctggccaggtcggcaccgacttcatccgcaaccaccgcgtcctgggcgtcgacttcgcctccgtccacatctacccagacacctggatgccgggcgcgactctggaggcacggctctggttcgtggactcgtggatggaggcgcacatcgccgacgccgacggcacgctgggcatgccggtggtgttcacggagttcggggcgtccaccaccaaggcccggagcggctgcttcaacgcgaccacgagagaccagttcatccaggcggtgtacgcgcggctcctcaactccacgcggcgtggcggcgccggagcgggggctttgctctggcagatgctcccgctggggaccgactacatggacgatggctacggcgtcgtgcttcccagggcggcggccactgcccggatcatctcggcgcactccagggacctggccattttcaactcgaggtgcgcctggagctgccgctgggggtgcaggaggcgggggcacaagtcggaggatcctgatgttgatgatgacctgccgctcgtcgaggataaacaacgagaagcatagaattaatactactaatgagagataaatggccgtgcattgctacggagcaaaaatatttaaaaatgttgatagaaaaggcatatagataactctatttcatcatacaattgatacaaaagtagcagttaaattgcc

SEQ ID NO: 16855 - protein, 503 aa, Zea mays subsp. mays
  peptide (1)..(503): Ceres Seq. ID no. 12349656
METVFKWRARTGGGVSLIHLLVRCFAVAAAILLLADGRHAHAVDHPAPVEVQTGSCSEVADEQQWRMVKTRGNQFVVGDDHDDRPFYVNGFNTYWLMILAVDPSTRGKVTEVFQQAVAAGLTVCRTWAFNDGGWRALQKSPSVYDEDVFKALDFVVSEARKYRIRLILSLINNWDSYGGKAQYVKWAGDDAAADGGRLNITASVDDDFFSDQTVKVYFKNHVKNMLTRVNTYTSVMYKDDPTIFAWELMNEPRCTSDPAGNKLQEWIQEMAFHVKSIDPDHLLEVGGLAQRASTGPRRRHGFRPTRTPMLARSAPTSSATTASWASTSPPSTSTQTPGCRARLWRHGSGSWTRGWRRTSPTPTARWACRWCSRSSGRPPPRPGAAASTRPRETSSSRRCTRGSSTPRGVAAPERGLCSGRCSRWGPTTWTMATASCFPGRRPLPGSSRRTPGTWPFSTRGAPGAAAGGAGGGGTSRRILMLMMTCRSSRINNEKHRINTTNER

SEQ ID NO: 16856 - protein, 437 aa, Zea mays subsp. mays
  peptide (1)..(437): Ceres Seq. ID no. 12349657
MVKTRGNQFVVGDDHDDRPFYVNGFNTYWLMILAVDPSTRGKVTEVFQQAVAAGLTVCRTWAFNDGGWRALQKSPSVYDEDVFKALDFVVSEARKYRIRLILSLINNWDSYGGKAQYVKWAGDDAAADGGRLNITASVDDDFFSDQTVKVYFKNHVKNMLTRVNTYTSVMYKDDPTIFAWELMNEPRCTSDPAGNKLQEWIQEMAFHVKSIDPDHLLEVGGLAQRASTGPRRRHGFRPTRTPMLARSAPTSSATTASWASTSPPSTSTQTPGCRARLWRHGSGSWTRGWRRTSPTPTARWACRWCSRSSGRPPPRPGAAASTRPRETSSSRRCTRGSSTPRGVAAPERGLCSGRCSRWGPTTWTMATASCFPGRRPLPGSSRRTPGTWPFSTRGAPGAAAGGAGGGGTSRRILMLMMTCRSSRINNEKHRINTTNER

SEQ ID NO: 16857 - protein, 407 aa, Zea mays subsp. mays
  peptide (1)..(407): Ceres Seq. ID no. 12349658
MILAVDPSTRGKVTEVFQQAVAAGLTVCRTWAFNDGGWRALQKSPSVYDEDVFKALDFVVSEARKYRIRLILSLINNWDSYGGKAQYVKWAGDDAAADGGRLNITASVDDDFFSDQTVKVYFKNHVKNMLTRVNTYTSVMYKDDPTIFAWELMNEPRCTSDPAGNKLQEWIQEMAFHVKSIDPDHLLEVGGLAQRASTGPRRRHGFRPTRTPMLARSAPTSSATTASWASTSPPSTSTQTPGCRARLWRHGSGSWTRGWRRTSPTPTARWACRWCSRSSGRPPPRPGAAASTRPRETSSSRRCTRGSSTPRGVAAPERGLCSGRCSRWGPTTWTMATASCFPGRRPLPGSSRRTPGTWPFSTRGAPGAAAGGAGGGGTSRRILMLMMTCRSSRINNEKHRINTTNER

SEQ ID NO: 16858 - DNA, 1026 bp, Zea mays subsp. mays
  misc_feature (1)..(1026): Ceres Seq. ID no. 12367960
  misc_feature (1)..(1026): Ortholog of  Ceres SEQ ID NO 15178228 as cited in SEQ ID NO 58330
  misc_feature (1)..(1026): Ortholog of  Ceres SEQ ID NO 13596635 as cited in SEQ ID NO 62488
ttatcttcctcacggcgcttgagacaaccaaagcagcctctctcaagcttgttgagcccttcaagctgtcagagccggtgcaggccgcctttgccaatggccttgccggtctgtcggcatccacatgttcgcaggctatttttgtcccaattgatgtgatcagccagaaattgatggttcaagggtattctggtaatgtcagatacaaaggtggagtagatgttgctcgcaaggtcataaaggctgatggcattaaggggctctacagaggatttggactgtctgttatgacctatgcaccatcgagtgctgtgtggtgggcgagttatggttctagccagcgcataatttggagtgcccttggccatttgcataacaaagaagaggctcctagccaattgaaaatagttggtgttcaagcatcaggggggatttttgctggtgctgtgacctcttttgttacgactcccatagatacaatcaagaccaggctgcaggttatggataatgaaaataagccaaaagctggggaagttgttaaaagattgatcgctgaagatggatggaaaggtttgtacagagggttgggtccaagatttttcagctcatcagcttggggtacctcaatgatagtatgctacgagtacctgaagcgcttgtgtgctaaagttgaagaggtctgacttctgttcttactattctggaagttttgtattagaagaagtgaaataatgctgtatgtctacaacattgacaccaccggaagcttcagttcttgctgacgtaggtgaaagcattcaacatggatgtttgatggtgtacttcatttggtgctagacaatagtctttacaaactttgcttctctgggctatatctcaaaaaatgtaggggcctatatttttttgctcatatgatgaatatgggtttggcggattattttaggtgagtataaacgatatcagatgtacacacttctcattcttttatacatgaaggctattttagcgaggctgtatgactgaagg

SEQ ID NO: 16859 - protein, 226 aa, Zea mays subsp. mays
  peptide (1)..(226): Ceres Seq. ID no. 12367961
IFLTALETTKAASLKLVEPFKLSEPVQAAFANGLAGLSASTCSQAIFVPIDVISQKLMVQGYSGNVRYKGGVDVARKVIKADGIKGLYRGFGLSVMTYAPSSAVWWASYGSSQRIIWSALGHLHNKEEAPSQLKIVGVQASGGIFAGAVTSFVTTPIDTIKTRLQVMDNENKPKAGEVVKRLIAEDGWKGLYRGLGPRFFSSSAWGTSMIVCYEYLKRLCAKVEEV

SEQ ID NO: 16860 - protein, 169 aa, Zea mays subsp. mays
  peptide (1)..(169): Ceres Seq. ID no. 12367962
MVQGYSGNVRYKGGVDVARKVIKADGIKGLYRGFGLSVMTYAPSSAVWWASYGSSQRIIWSALGHLHNKEEAPSQLKIVGVQASGGIFAGAVTSFVTTPIDTIKTRLQVMDNENKPKAGEVVKRLIAEDGWKGLYRGLGPRFFSSSAWGTSMIVCYEYLKRLCAKVEEV

SEQ ID NO: 16861 - protein, 131 aa, Zea mays subsp. mays
  peptide (1)..(131): Ceres Seq. ID no. 12367963
MTYAPSSAVWWASYGSSQRIIWSALGHLHNKEEAPSQLKIVGVQASGGIFAGAVTSFVTTPIDTIKTRLQVMDNENKPKAGEVVKRLIAEDGWKGLYRGLGPRFFSSSAWGTSMIVCYEYLKRLCAKVEEV

SEQ ID NO: 16862 - DNA, 1046 bp, Zea mays subsp. mays
  misc_feature (1)..(1046): Ceres Seq. ID no. 12349639
  misc_feature (1)..(1046): Ortholog of  Ceres SEQ ID NO 14304124 as cited in SEQ ID NO 56378
  misc_feature (1)..(1046): Ortholog of  Ceres SEQ ID NO 12585331 as cited in SEQ ID NO 62912
  misc_feature (1)..(1046): Ortholog of  Ceres SEQ ID NO 13654964 as cited in SEQ ID NO 63176
cattcaccgcaacaacacacaacggcagagaccaagaagccgtgaccgtgggagagctccgagcgccagccgcgtgcggcgtgtccatactccatacacggaggaagaggaacagaggaagagcaggaggagatgtacttccgtccgccgcccaagggcccggagtggtacgccagcgatgcggagacggggcaggcggcgcggccgctgtacccaatgatgctggaggacccgcgtctgcggtgggcctttatccggaaggtctacagcatcctctccatccagatgctgctcaccgtcgccgtagctgccgtcgtcgtgttcgttcgccccgtcgctctcttcttcgtctccacgcccggcggcttcgggctctacatcttcctcctcatcctcccgttcatagtgctttgccctctgtactactactaccagcaccacccggtgaacctgctgctgctcggcctcttcaccgtggccatcagcttcgccgtcggcctcacctgcgccttcaccaaaggggaggtgatcctcgagtcggcggtcctcacggcggcggtggtgctgagcctcacggcgtacacgttctgggcggcgaagcgcggccacgacttcagcttcctgggcccgttcctgttcgccgccgtcatgatcctcatgctgttcgcgctcatccagctcttcttcccgctcggccgcatctcgctcatgatatacgggggactggcggcgctcgtcttctgcggctacatcatctacgacaccgacaacctcatcaagcgctactcctacgacgagtacgtctgggccgccgtcgcgctctacctcgacgtcatcaacctcttcctctccctcctcacgctcttccgggcggcggattcgtgagcacggctacctgccagctcgcgtaggcgcggcgacaggatcttggaatgtgccttgccttgccccgcctccggtgctgtctgccgaaattcctctgtaaaaagactaaagagaaataattgttttggttttgtgctttgcttcgcttgcgaagattgttc

SEQ ID NO: 16863 - protein, 302 aa, Zea mays subsp. mays
  peptide (1)..(302): Ceres Seq. ID no. 12349640
FTATTHNGRDQEAVTVGELRAPAACGVSILHTRRKRNRGRAGGDVLPSAAQGPGVVRQRCGDGAGGAAAVPNDAGGPASAVGLYPEGLQHPLHPDAAHRRRSCRRRVRSPRRSLLRLHARRLRALHLPPHPPVHSALPSVLLLPAPPGEPAAARPLHRGHQLRRRPHLRLHQRGGDPRVGGPHGGGGAEPHGVHVLGGEARPRLQLPGPVPVRRRHDPHAVRAHPALLPARPHLAHDIRGTGGARLLRLHHLRHRQPHQALLLRRVRLGRRRALPRRHQPLPLPPHALPGGGFVSTATCQLA

SEQ ID NO: 16864 - protein, 250 aa, Zea mays subsp. mays
  peptide (1)..(250): Ceres Seq. ID no. 12349641
MYFRPPPKGPEWYASDAETGQAARPLYPMMLEDPRLRWAFIRKVYSILSIQMLLTVAVAAVVVFVRPVALFFVSTPGGFGLYIFLLILPFIVLCPLYYYYQHHPVNLLLLGLFTVAISFAVGLTCAFTKGEVILESAVLTAAVVLSLTAYTFWAAKRGHDFSFLGPFLFAAVMILMLFALIQLFFPLGRISLMIYGGLAALVFCGYIIYDTDNLIKRYSYDEYVWAAVALYLDVINLFLSLLTLFRAADS

SEQ ID NO: 16865 - protein, 222 aa, Zea mays subsp. mays
  peptide (1)..(222): Ceres Seq. ID no. 12349642
MMLEDPRLRWAFIRKVYSILSIQMLLTVAVAAVVVFVRPVALFFVSTPGGFGLYIFLLILPFIVLCPLYYYYQHHPVNLLLLGLFTVAISFAVGLTCAFTKGEVILESAVLTAAVVLSLTAYTFWAAKRGHDFSFLGPFLFAAVMILMLFALIQLFFPLGRISLMIYGGLAALVFCGYIIYDTDNLIKRYSYDEYVWAAVALYLDVINLFLSLLTLFRAADS

SEQ ID NO: 16866 - DNA, 2058 bp, Zea mays subsp. mays
  misc_feature (1)..(2058): Ceres Seq. ID no. 12359829
  misc_feature (1)..(2058): Ortholog of  Ceres SEQ ID NO 15177414 as cited in SEQ ID NO 57242
  misc_feature (1)..(2058): Ortholog of  Ceres SEQ ID NO 13594151 as cited in SEQ ID NO 58886
ttcctcctttcctactcccacactcccccaccctccactagtactagtactagtaccacaaccaccccaccgggaaaaaacccaacaaggggtagggccgccgccgccgccagcgccgccgtgcagatcgcggccggatctacggcgctggggcacgggggtccccggatcgacgacgcctcccccgcgggttcggatggctatgcgaaaagaaaaccctgtgcttaatgcttgtcaagcatccaatggccggatcacgcgagctcaagctgctgcaaatcgccgaagctttggagctttcccttctgttccattgcctgcaaaaaccgaacgaaaacagactgcacaagggaaggcaaaacgaggttcttcatatgacaacaccagtgcaagtgttgcactttcaggcccccagcctaaaaggcgcacagtactcagggatgtgaccaatttgagcaatgctaactctaacaaaagttttgctgctgcaccgaagcttcagacaaagccctctctaaggactggaagaaccgtgagcaaaagcaagccgtgcgcaaaaaagattcctaaaaaaccaccaccagctggtaatggaagtgcattgactaatgttttgaacattgctgaagaaacacaagcggagaagattttggcagagagagtggaacccgttctgttgcttgagaacagggggccactgtcattgcagaatgttgaaaggaacagggacagtgcttgtcatgaggtattctttgaggaaagaaacctcagggataaatgtgaaccttctgtgtcaaagaatggggactcttatgtgttagacattgtagatatcgacaaagataatggcaatcctcaaatgtgtgcttcctacgttgtggagatatactcaaacctaatggcttcagagcttatgagaagaccaagtccaaattacatggagggtttgcaacgggacatcacaaagggcatgagagaaatactcattgattggcttgtggaggtttctgaagaatacaagcttgttccagacacgctgtacctaactgtataccttattgaccggtttctttctcggaactacattgaaagacagagactacaacttgtgggaataacaagcatgcttgttgcctcgaaatatgaagagatatgtgctcctcgagtagaagagttctgtttcataaccgacaatacatacacaaaagcagaggtgctgaaaatggagagccagctgcttaatgacctgggatttaacctttctgttccaacaacaaaaacatttctcaggagattccttagagcggcacaagcatctcgtaaaactccttctatgactttaggatttctggccaattatctcgcggagttgactttgaccgaatatgagttcttgaaatttcttccgtcgttggtggcagcatcggccgtgtttcttgctagatggacgcttgaccaatccgatctcccatggaaccagactctagagcactacacgtcttacaaatgctctgacattcaattgtgtgtctgtgctctacgggaactccagcataacaccagtaactgccctcttaacgccatccgcgagaagtacaggcatcaaaagtttgaatgcgtagcgaacctaacttcaccggagttccctcggtcgttcttcagctgacacgccaatggcaccgattgatgagcaacgttagcagcagccgtagcgcaggttgcgttaacattattgtagcatccccttttaccccccaatgtctgatttggatgtgtttgttatcgagctgctgtgtcccggcctggcctttttcgagtcgcaagtgagatgaagaaggacagagagatggctccttggcttttcttttgtttgtttgacgtaaaaggttcacccggttgtaaacaacactgtgtgtagggctctttgcttgggctgttgttaattaactgtaaggggagatggtccggctggcttgtatgacgacaaacgacgggatgatgtttttgttgacacaattcgttcattggtagcttcggaatggaaattagtttattgcc

SEQ ID NO: 16867 - protein, 554 aa, Zea mays subsp. mays
  peptide (1)..(554): Ceres Seq. ID no. 12359830
SSFPTPTLPHPPLVLVLVPQPPHREKTQQGVGPPPPPAPPCRSRPDLRRWGTGVPGSTTPPPRVRMAMRKENPVLNACQASNGRITRAQAAANRRSFGAFPSVPLPAKTERKQTAQGKAKRGSSYDNTSASVALSGPQPKRRTVLRDVTNLSNANSNKSFAAAPKLQTKPSLRTGRTVSKSKPCAKKIPKKPPPAGNGSALTNVLNIAEETQAEKILAERVEPVLLLENRGPLSLQNVERNRDSACHEVFFEERNLRDKCEPSVSKNGDSYVLDIVDIDKDNGNPQMCASYVVEIYSNLMASELMRRPSPNYMEGLQRDITKGMREILIDWLVEVSEEYKLVPDTLYLTVYLIDRFLSRNYIERQRLQLVGITSMLVASKYEEICAPRVEEFCFITDNTYTKAEVLKMESQLLNDLGFNLSVPTTKTFLRRFLRAAQASRKTPSMTLGFLANYLAELTLTEYEFLKFLPSLVAASAVFLARWTLDQSDLPWNQTLEHYTSYKCSDIQLCVCALRELQHNTSNCPLNAIREKYRHQKFECVANLTSPEFPRSFFS

SEQ ID NO: 16868 - protein, 489 aa, Zea mays subsp. mays
  peptide (1)..(489): Ceres Seq. ID no. 12359831
MAMRKENPVLNACQASNGRITRAQAAANRRSFGAFPSVPLPAKTERKQTAQGKAKRGSSYDNTSASVALSGPQPKRRTVLRDVTNLSNANSNKSFAAAPKLQTKPSLRTGRTVSKSKPCAKKIPKKPPPAGNGSALTNVLNIAEETQAEKILAERVEPVLLLENRGPLSLQNVERNRDSACHEVFFEERNLRDKCEPSVSKNGDSYVLDIVDIDKDNGNPQMCASYVVEIYSNLMASELMRRPSPNYMEGLQRDITKGMREILIDWLVEVSEEYKLVPDTLYLTVYLIDRFLSRNYIERQRLQLVGITSMLVASKYEEICAPRVEEFCFITDNTYTKAEVLKMESQLLNDLGFNLSVPTTKTFLRRFLRAAQASRKTPSMTLGFLANYLAELTLTEYEFLKFLPSLVAASAVFLARWTLDQSDLPWNQTLEHYTSYKCSDIQLCVCALRELQHNTSNCPLNAIREKYRHQKFECVANLTSPEFPRSFFS

SEQ ID NO: 16869 - protein, 487 aa, Zea mays subsp. mays
  peptide (1)..(487): Ceres Seq. ID no. 12359832
MRKENPVLNACQASNGRITRAQAAANRRSFGAFPSVPLPAKTERKQTAQGKAKRGSSYDNTSASVALSGPQPKRRTVLRDVTNLSNANSNKSFAAAPKLQTKPSLRTGRTVSKSKPCAKKIPKKPPPAGNGSALTNVLNIAEETQAEKILAERVEPVLLLENRGPLSLQNVERNRDSACHEVFFEERNLRDKCEPSVSKNGDSYVLDIVDIDKDNGNPQMCASYVVEIYSNLMASELMRRPSPNYMEGLQRDITKGMREILIDWLVEVSEEYKLVPDTLYLTVYLIDRFLSRNYIERQRLQLVGITSMLVASKYEEICAPRVEEFCFITDNTYTKAEVLKMESQLLNDLGFNLSVPTTKTFLRRFLRAAQASRKTPSMTLGFLANYLAELTLTEYEFLKFLPSLVAASAVFLARWTLDQSDLPWNQTLEHYTSYKCSDIQLCVCALRELQHNTSNCPLNAIREKYRHQKFECVANLTSPEFPRSFFS

SEQ ID NO: 16870 - DNA, 1133 bp, Zea mays subsp. mays
  misc_feature (1)..(1133): Ceres Seq. ID no. 12415469
  misc_feature (1)..(1133): Ortholog of  Ceres SEQ ID NO 14301994 as cited in SEQ ID NO 56653
  misc_feature (1)..(1133): Ortholog of  Ceres SEQ ID NO 13661330 as cited in SEQ ID NO 61614
  misc_feature (1)..(1133): Ortholog of  Ceres SEQ ID NO 13596025 as cited in SEQ ID NO 62024
  misc_feature (1)..(1133): Ortholog of  Ceres SEQ ID NO 13662324 as cited in SEQ ID NO 62162
  misc_feature (1)..(1133): Ortholog of  Ceres SEQ ID NO 12625713 as cited in SEQ ID NO 64160
  misc_feature (1)..(1133): Ortholog of  Ceres SEQ ID NO 14301782 as cited in SEQ ID NO 66788
  misc_feature (1)..(1133): Ortholog of  Ceres SEQ ID NO 14302860 as cited in SEQ ID NO 67667
  misc_feature (1)..(1133): Ortholog of  Ceres SEQ ID NO 15174373 as cited in SEQ ID NO 0
atctcgcgggctttcccgcagcaagatcaacgtcgtcgttcaagccagcggtagtagagactacgaccgaggctagctaagctaagagatggcggatcaccagtactcggcgtggacgacttccgctgctcgtcatcgggtcttctcctgtgcgctcatggctcttgttagttttgtggctgcaggacgacccatggtgctcgccgacgccatcgtctttcacgtggcgaacaggtgcccgttcccggtgtggccggcgtccgcccctaacaccggccacccagtgctcgccggcggcggcttctacgtcccgcagggcaagtcgaggcgcgtcgtcgcgccggccaactggaacgggcgcttctgggcccgcaccggttgcaacttcaccgcgaacggcatgggcgtagcgggctgcctcaccggcgactgcgagggccggctcgcctgtaacgggtccgtgggcgccccgcccgccacgctagtcgaggtgagcctgcacgaggacgccccgaaagggagctcctacgacgtgagcctggtggacgggtacaacctccccgtcgccgtctccgccaagcccgccacgggcggcgcggacccgaacaagtgcgccattgccggctgcgccaagaacgtgaacgcggtgtgcccgccggagctgcaggtgaccgctaccggcagcggcggcggcaagacggtggtggcgtgcaagagcgcgtgcctagcgttcgggctcgacgccttctgctgccgcggcgcgtacgcgacgccggccacgtgccgagggaccgtgtactcgcgcctcttcaaggacgcctgcccggcatactacagctatgcctacgacatcgccgccacgacggccagcgggtgctacgcgcaggagtacatcatcacgttctgcccgtccagatggggcgacgagcccggggatcgtgctgctcagatttgaatttggtgtcgtcatcgtcagtcaggcaattaccaatcaccattgcgtcgagcttttcgcacgtctttatgtatgtgtgtacgcttgtgtctgcttctagtgggctttcacataaatttctacatacatatacacatacaacaataaaaaataaggtagtgctatttatcggccgcgt

SEQ ID NO: 16871 - protein, 288 aa, Zea mays subsp. mays
  peptide (1)..(288): Ceres Seq. ID no. 12415470
MADHQYSAWTTSAARHRVFSCALMALVSFVAAGRPMVLADAIVFHVANRCPFPVWPASAPNTGHPVLAGGGFYVPQGKSRRVVAPANWNGRFWARTGCNFTANGMGVAGCLTGDCEGRLACNGSVGAPPATLVEVSLHEDAPKGSSYDVSLVDGYNLPVAVSAKPATGGADPNKCAIAGCAKNVNAVCPPELQVTATGSGGGKTVVACKSACLAFGLDAFCCRGAYATPATCRGTVYSRLFKDACPAYYSYAYDIAATTASGCYAQEYIITFCPSRWGDEPGDRAAQI

SEQ ID NO: 16872 - protein, 265 aa, Zea mays subsp. mays
  peptide (1)..(265): Ceres Seq. ID no. 12415471
MALVSFVAAGRPMVLADAIVFHVANRCPFPVWPASAPNTGHPVLAGGGFYVPQGKSRRVVAPANWNGRFWARTGCNFTANGMGVAGCLTGDCEGRLACNGSVGAPPATLVEVSLHEDAPKGSSYDVSLVDGYNLPVAVSAKPATGGADPNKCAIAGCAKNVNAVCPPELQVTATGSGGGKTVVACKSACLAFGLDAFCCRGAYATPATCRGTVYSRLFKDACPAYYSYAYDIAATTASGCYAQEYIITFCPSRWGDEPGDRAAQI

SEQ ID NO: 16873 - protein, 253 aa, Zea mays subsp. mays
  peptide (1)..(253): Ceres Seq. ID no. 12415472
MVLADAIVFHVANRCPFPVWPASAPNTGHPVLAGGGFYVPQGKSRRVVAPANWNGRFWARTGCNFTANGMGVAGCLTGDCEGRLACNGSVGAPPATLVEVSLHEDAPKGSSYDVSLVDGYNLPVAVSAKPATGGADPNKCAIAGCAKNVNAVCPPELQVTATGSGGGKTVVACKSACLAFGLDAFCCRGAYATPATCRGTVYSRLFKDACPAYYSYAYDIAATTASGCYAQEYIITFCPSRWGDEPGDRAAQI

SEQ ID NO: 16874 - DNA, 1005 bp, Zea mays subsp. mays
  misc_feature (1)..(1005): Ceres Seq. ID no. 12357150
  misc_feature (1)..(1005): Ortholog of  Ceres SEQ ID NO 12781940 as cited in SEQ ID NO 56324
  misc_feature (1)..(1005): Ortholog of  Ceres SEQ ID NO 15174247 as cited in SEQ ID NO 61869
agcatccatcaactgctaccgagttaagtatattctgagctcgtctgcagccaaaagcttccatttgcattgcgatgggggctctgcctcgtggcctgctagctggcatctgcgccgtcttgttagcagcagtggttgcccttgcccatggtgcggaacaggaaacagcgtcaatggtggtcggcttggccaagtgcgccgactgcaccaggaagaacatgaaagctgatgcggcattcaacggccttcaagtggctgtcaagtgcaagaacgccaacggcgtcttcgagaccaaggccctcggtgaggttgacaagtccggcagcttcagcgttcccctcccggctgacctcctccgcgaggatggcgagctgaagcaagactgcttctcgcagctccacagcgcggccaacaagccatgccccggacaggagccgtcttggatcgtccggccaaccaccgacaacgacgacgacgacaagatgaagaataccttcgtcgcagtcgccggcaaggtgcactacccatcaaaggagtgcgcctctgctttcctcttctaccatttgttcaagaagcacctgttgcacaagaagcccatggtgatcatccctcacatccacaagaagcccatggtgccgatgtaccgccactcgcccgtgccggagtacaagccacctcacccgacgcccaccccgatctaccatgctgcagctgagcacaagacacagaaccccgagacggaccctgaaaagttcaagaagctgctccccttcataaaaaagaaccccttctttcccaagttccccaagtttcctcccgtcaaggaggagaacaaggcgtaaaaatatgagggcgagataccaagtgtacccctttcctctgcatccactcttacgtagtgtctgttgcatcttgcatggaccgtcattacctcctgtttcttgacagtgtttgtaacctctcaccggccagggctcccactaatagaaataaaacttttgttct

SEQ ID NO: 16875 - protein, 255 aa, Zea mays subsp. mays
  peptide (1)..(255): Ceres Seq. ID no. 12357151
MGALPRGLLAGICAVLLAAVVALAHGAEQETASMVVGLAKCADCTRKNMKADAAFNGLQVAVKCKNANGVFETKALGEVDKSGSFSVPLPADLLREDGELKQDCFSQLHSAANKPCPGQEPSWIVRPTTDNDDDDKMKNTFVAVAGKVHYPSKECASAFLFYHLFKKHLLHKKPMVIIPHIHKKPMVPMYRHSPVPEYKPPHPTPTPIYHAAAEHKTQNPETDPEKFKKLLPFIKKNPFFPKFPKFPPVKEENKA

SEQ ID NO: 16876 - protein, 222 aa, Zea mays subsp. mays
  peptide (1)..(222): Ceres Seq. ID no. 12357152
MVVGLAKCADCTRKNMKADAAFNGLQVAVKCKNANGVFETKALGEVDKSGSFSVPLPADLLREDGELKQDCFSQLHSAANKPCPGQEPSWIVRPTTDNDDDDKMKNTFVAVAGKVHYPSKECASAFLFYHLFKKHLLHKKPMVIIPHIHKKPMVPMYRHSPVPEYKPPHPTPTPIYHAAAEHKTQNPETDPEKFKKLLPFIKKNPFFPKFPKFPPVKEENKA

SEQ ID NO: 16877 - protein, 207 aa, Zea mays subsp. mays
  peptide (1)..(207): Ceres Seq. ID no. 12357153
MKADAAFNGLQVAVKCKNANGVFETKALGEVDKSGSFSVPLPADLLREDGELKQDCFSQLHSAANKPCPGQEPSWIVRPTTDNDDDDKMKNTFVAVAGKVHYPSKECASAFLFYHLFKKHLLHKKPMVIIPHIHKKPMVPMYRHSPVPEYKPPHPTPTPIYHAAAEHKTQNPETDPEKFKKLLPFIKKNPFFPKFPKFPPVKEENKA

SEQ ID NO: 16878 - DNA, 1092 bp, Zea mays subsp. mays
  misc_feature (1)..(1092): Ceres Seq. ID no. 12355020
  misc_feature (1)..(1092): Ortholog of  Ceres SEQ ID NO 12614195 as cited in SEQ ID NO 68460
acggccagggaccaagctactcgtaaacaccatcagagtgtacacaagaacacgtacgcggcgcacggcgtcgttagtcaccaagcgggccatcggcaatggcgagcacgcaagctccagcggcggccgacaacgtggaccccgtctacgagtggctcgacgatggcgccagctaccttctccgcctcgacctcccagggttcaagaaggaggactttcgggtgcacgtggacggcgagggccggctcaccgtcatcggcaatcgcaaacccacgcccggcggcggcggcaaggcgctgcggctccacaagacgttccagctgcccaatacggccaaccttgataccatcacgggccgcttcgacggcaacgtgctcacgctcaccgtgcccaaactgctcgccggtgctgatgcccccacaacgccaccaccgcagtccaaggaggaggcgcgagtcgccggcgataagccagatcaggcggacaagctgcccgccagggttggccgtggccgtgaggagacgacggaggagcggaggaccaccgagaccgagaggactagcttggcggcgagaagcaaagaggaagacgaggagaaggccaagcccatggtggcgctgccgccgcagtcgagcgagaaggcgagcggagaccatcaacgagatgaccagcaggatggcaaggcgcaggccgaccacagggagatggtcgctcgcgaggccgcgcgcaggatcgaggcggcgcgggcgagggtggcggaggccaaggccaaggcagagcgggagaggaagtgtgagcactggaaggagcgcgccgtggaggagggcctcaagttggcggaggcggtcaataacaagaaggaggtgatcgccacggccgtcgccgccttcacacttggcgtcttcgtctcgagtaggctcttctccaggacttaatcaacccatgcgtaatcatggaccagacatattcacgtatatgagcatgagaacatgagcagcatcgccaggttatattgattcgtagacttgtacatgcatgatgcagcactaatattcacattatgtattaattattgctccctattgagcactc

SEQ ID NO: 16879 - protein, 288 aa, Zea mays subsp. mays
  peptide (1)..(288): Ceres Seq. ID no. 12355021
TARDQATRKHHQSVHKNTYAAHGVVSHQAGHRQWRARKLQRRPTTWTPSTSGSTMAPATFSASTSQGSRRRTFGCTWTARAGSPSSAIANPRPAAAARRCGSTRRSSCPIRPTLIPSRAASTATCSRSPCPNCSPVLMPPQRHHRSPRRRRESPAISQIRRTSCPPGLAVAVRRRRRSGGPPRPRGLAWRREAKRKTRRRPSPWWRCRRSRARRRAETINEMTSRMARRRPTTGRWSLARPRAGSRRRGRGWRRPRPRQSGRGSVSTGRSAPWRRASSWRRRSITRRR

SEQ ID NO: 16880 - protein, 278 aa, Zea mays subsp. mays
  peptide (1)..(278): Ceres Seq. ID no. 12355022
MASTQAPAAADNVDPVYEWLDDGASYLLRLDLPGFKKEDFRVHVDGEGRLTVIGNRKPTPGGGGKALRLHKTFQLPNTANLDTITGRFDGNVLTLTVPKLLAGADAPTTPPPQSKEEARVAGDKPDQADKLPARVGRGREETTEERRTTETERTSLAARSKEEDEEKAKPMVALPPQSSEKASGDHQRDDQQDGKAQADHREMVAREAARRIEAARARVAEAKAKAERERKCEHWKERAVEEGLKLAEAVNNKKEVIATAVAAFTLGVFVSSRLFSRT

SEQ ID NO: 16881 - protein, 234 aa, Zea mays subsp. mays
  peptide (1)..(234): Ceres Seq. ID no. 12355023
MAPATFSASTSQGSRRRTFGCTWTARAGSPSSAIANPRPAAAARRCGSTRRSSCPIRPTLIPSRAASTATCSRSPCPNCSPVLMPPQRHHRSPRRRRESPAISQIRRTSCPPGLAVAVRRRRRSGGPPRPRGLAWRREAKRKTRRRPSPWWRCRRSRARRRAETINEMTSRMARRRPTTGRWSLARPRAGSRRRGRGWRRPRPRQSGRGSVSTGRSAPWRRASSWRRRSITRRR

SEQ ID NO: 16882 - DNA, 1087 bp, Zea mays subsp. mays
  misc_feature (1)..(1087): Ceres Seq. ID no. 12400968
  misc_feature (1)..(1087): Ortholog of  Ceres SEQ ID NO 14306565 as cited in SEQ ID NO 53000
  misc_feature (1)..(1087): Ortholog of  Ceres SEQ ID NO 14312192 as cited in SEQ ID NO 59249
gcgtcgattgcttgcccagctcgcttcgtcttcgtcttccttctcccccttctcctcgcctccggttaaccgccacagcctggattcgccatctcccgcggcggcgcggcggccgctgctgctgcgtcggcgcgtgagatggatgattgcggcggcggcggcggcaagaggccgttccagctggcgcggtcgctgacgtaccaccagccacccggggcaccggccggcggctgcgtccaggtggcggcggcagcaccagcagcatcagctcgcggacgagccgcgcgcgccccggcgcaggcggtggtgctgtacacgacgtcgctgcgcggggtgcggcgcacgttcgcggactgcgccgcggtgcgcgccatcctgcgcggcttccgcgtggccgttgacgagcgggacgtgtccatggacgcggcgctccggcgggaggtccaggcgctgctggccgccgcgcggccgcgnnttcgcgctcccgcagctgctcatcgtgcgnccgcctcgtcggcggcgcggacgaggtgcggcagctgaacgagaccggccagctccggcgcctcctnnacggcgcggccgggcaggacccggccttcgtntgcgacgcctgtggcggcgtccggttcgtcccgtgcgccggatgcggcggcggccgcaaggtgttcgtcgaggaggagggccgcgtcgttcgctgcgtcgagtgcaacgagaacgggctggtacgctgccttaactgctgctcttgatcgccgacggcggcggcggtcgnnngccgttccattcgtgctgctaatccaancggtagaggttgtggtagatatcaacaaaaggaagaagaanaagagggggctttcggtttcccggcgtggggttcgtgtgtgtccgatccgatcattttgaggatcggatttgctgctagtcggtggacaagaacagattgttcttggctccttgctgcaaaattgccatatggtgatggcgattggagaataagaactgggcttgtttgtatatgcatctgatgtatcaaagattgatactgctgctagttcaactaatgtaaatacttcagtttggtgtc

SEQ ID NO: 16883 - protein, 134 aa, Zea mays subsp. mays
  peptide (1)..(134): Ceres Seq. ID no. 12400969
  misc_feature (112)..(112): Xaa is any aa, unknown or other
  misc_feature (113)..(113): Xaa is any aa, unknown or other
  misc_feature (123)..(123): Xaa is any aa, unknown or other
MDDCGGGGGKRPFQLARSLTYHQPPGAPAGGCVQVAAAAPAASARGRAARAPAQAVVLYTTSLRGVRRTFADCAAVRAILRGFRVAVDERDVSMDAALRREVQALLAAARPXXRAPAAAHRAXASSAARTRCGS

SEQ ID NO: 16884 - DNA, 1286 bp, Zea mays subsp. mays
  misc_feature (1)..(1286): Ceres Seq. ID no. 13494497
  misc_feature (1)..(1286): Ortholog of  Ceres SEQ ID NO 13597533 as cited in SEQ ID NO 64942
gcacgagaccattacctagaacatcctaatcaaaaaaccaaacaaactgaaccactgtccgctgcgtgctttccttcctctcaacgccagccttgccgagagcccgagaccaatcgccgccatctcccggaatgacggggtgacgaaaccgcgccgcaccagacaagacagaggagccgccgccgcgacccacaggccaccgggtcgccgaggaggggatccagcgagccatgtcgaccgacgtgcccatgagccccgagctcgagcaggtggacggcgagatccaggacatcttccgcgcgctccagaatgggttccagaagatggacaagatcaaggactccagcaggcagtccaagcagctggaggatctcacggccaagatgagagagtgcaagcgcttgatcaaagagtttgaccgtatactcaaggatgaggagaaaaagaacacccctgatgtcaacaagcagctcaatgacaagaagcagttcatgatcaaagaactcaactcctatgtgaccttaaggaaaacgtaccagagcagccttggtaataagaggatcgaactattcgatacgggtaatgaccaggtggctgagggaactccagttcaaatggcatcagaaatgtcaaatcaagaactcattagcaccggaaggaaacaaatggaccaaactgatcaagctattgagcgctcaaaaatggttgtagcacaaactgttgaagttggagctcagactgctgcaactctgacacagcaaacggaacaaatgaagaggataggcaatgagctagattctgtccacttttcactgaagaaggctagtcaaatggtgaaagagattggccgtcaggttgctactgacaaatgcattatggcgttcctgtttctgattgtctgtggtgtcattgcaataattgttgttaagattgtcaacccgcataacaagaacatcagagacattccgggcctagcacctcccgccatgaacaggaagctgctgtccatcgacgctgcaggactctgagcgttgtgaatggctgcctcccgcagcacagcgcaacgcagcgcgtcagagttctcttatgagccacgatacatggcttcgcgattcttttgtgcttgtagtttacgtccgcccattctttccctattgcattggtgagtagtagcctcaggtttgtagcgggactcttgttgtttattgcttgcgagcccatagctttctggttgtttgtgtatatgcggtagtgatgtgaatgtgagagtcgagtggagattcttc

SEQ ID NO: 16885 - protein, 265 aa, Zea mays subsp. mays
  peptide (1)..(265): Ceres Seq. ID no. 13494498
MSTDVPMSPELEQVDGEIQDIFRALQNGFQKMDKIKDSSRQSKQLEDLTAKMRECKRLIKEFDRILKDEEKKNTPDVNKQLNDKKQFMIKELNSYVTLRKTYQSSLGNKRIELFDTGNDQVAEGTPVQMASEMSNQELISTGRKQMDQTDQAIERSKMVVAQTVEVGAQTAATLTQQTEQMKRIGNELDSVHFSLKKASQMVKEIGRQVATDKCIMAFLFLIVCGVIAIIVVKIVNPHNKNIRDIPGLAPPAMNRKLLSIDAAGL

SEQ ID NO: 16886 - protein, 259 aa, Zea mays subsp. mays
  peptide (1)..(259): Ceres Seq. ID no. 13494499
MSPELEQVDGEIQDIFRALQNGFQKMDKIKDSSRQSKQLEDLTAKMRECKRLIKEFDRILKDEEKKNTPDVNKQLNDKKQFMIKELNSYVTLRKTYQSSLGNKRIELFDTGNDQVAEGTPVQMASEMSNQELISTGRKQMDQTDQAIERSKMVVAQTVEVGAQTAATLTQQTEQMKRIGNELDSVHFSLKKASQMVKEIGRQVATDKCIMAFLFLIVCGVIAIIVVKIVNPHNKNIRDIPGLAPPAMNRKLLSIDAAGL

SEQ ID NO: 16887 - protein, 234 aa, Zea mays subsp. mays
  peptide (1)..(234): Ceres Seq. ID no. 13494500
MDKIKDSSRQSKQLEDLTAKMRECKRLIKEFDRILKDEEKKNTPDVNKQLNDKKQFMIKELNSYVTLRKTYQSSLGNKRIELFDTGNDQVAEGTPVQMASEMSNQELISTGRKQMDQTDQAIERSKMVVAQTVEVGAQTAATLTQQTEQMKRIGNELDSVHFSLKKASQMVKEIGRQVATDKCIMAFLFLIVCGVIAIIVVKIVNPHNKNIRDIPGLAPPAMNRKLLSIDAAGL

SEQ ID NO: 16888 - DNA, 912 bp, Zea mays subsp. mays
  misc_feature (1)..(912): Ceres Seq. ID no. 12363928
  misc_feature (1)..(912): Ortholog of  Ceres SEQ ID NO 13596720 as cited in SEQ ID NO 60897
  misc_feature (1)..(912): Ortholog of  Ceres SEQ ID NO 14305614 as cited in SEQ ID NO 0
ctctccattccgaactccaaacgaaccaattcgtgtccatcgaaggttccatgggatcaggcctctcaagcagccaccggaggagcagcgcgtcgcttcaccagccggcggcggccccggccccggccccggcgctggtcatcgcggccgacggctcgttgagggagttcgcgccggcgccactccccgcctccgtctccgacgcgctcgccggcgccaatgcggcggccgacggccggttcttcgtgtgcagctccgacgcgctctgcttcgactccgacgtcccggcgctcggcgccgacgagctgctccggccggggcagatatacttcgtcctccccgcggccatgctcggcaggccgctctcgagcgccggcatggccgcgctcgccgcgcgcgcgagcgaggcgctggcggcgggagcgggctggcgtgggcgccctcgcggccgccgcgggttcacgaaggcgcgcgtcgtgccggcgcaccaccgccacgcggacggcgaccgagaggtcaacgagaagctgaaccagaggactcttggcggcatcgagacggcttcacgtggtccggcgaccaacgccaggaagtccgctgtggcggcgcgaccggctccgcctctgaggagggcgctcagcaccattgaagaggatgccgagcgatcaaattggctttgaagcgcgcgtgttggacgcgaccgagtgatcacagagctgcgcgagggcatgtgccgtattgatgataactttggattgatttttttttgtgtgtgtataggatgttagagattttgtgctattcaaatagcttgaaaggatatggaaatttgttatttggttggtcgacgtttgtgtatttaaacaaatcacaaagattaaatgaaaattttagttgctgacttggttcttt

SEQ ID NO: 16889 - protein, 225 aa, Zea mays subsp. mays
  peptide (1)..(225): Ceres Seq. ID no. 12363929
LHSELQTNQFVSIEGSMGSGLSSSHRRSSASLHQPAAAPAPAPALVIAADGSLREFAPAPLPASVSDALAGANAAADGRFFVCSSDALCFDSDVPALGADELLRPGQIYFVLPAAMLGRPLSSAGMAALAARASEALAAGAGWRGRPRGRRGFTKARVVPAHHRHADGDREVNEKLNQRTLGGIETASRGPATNARKSAVAARPAPPLRRALSTIEEDAERSNWL

SEQ ID NO: 16890 - protein, 215 aa, Zea mays subsp. mays
  peptide (1)..(215): Ceres Seq. ID no. 12363930
SPFRTPNEPIRVHRRFHGIRPLKQPPEEQRVASPAGGGPGPGPGAGHRGRRLVEGVRAGATPRLRLRRARRRQCGGRRPVLRVQLRRALLRLRRPGARRRRAAPAGADILRPPRGHARQAALERRHGRARRARERGAGGGSGLAWAPSRPPRVHEGARRAGAPPPRGRRPRGQREAEPEDSWRHRDGFTWSGDQRQEVRCGGATGSASEEGAQHH

SEQ ID NO: 16891 - protein, 209 aa, Zea mays subsp. mays
  peptide (1)..(209): Ceres Seq. ID no. 12363931
MGSGLSSSHRRSSASLHQPAAAPAPAPALVIAADGSLREFAPAPLPASVSDALAGANAAADGRFFVCSSDALCFDSDVPALGADELLRPGQIYFVLPAAMLGRPLSSAGMAALAARASEALAAGAGWRGRPRGRRGFTKARVVPAHHRHADGDREVNEKLNQRTLGGIETASRGPATNARKSAVAARPAPPLRRALSTIEEDAERSNWL

SEQ ID NO: 16892 - DNA, 686 bp, Zea mays subsp. mays
  misc_feature (1)..(686): Ceres Seq. ID no. 12549504
  misc_feature (1)..(686): Ortholog of  Ceres SEQ ID NO 12583413 as cited in SEQ ID NO 56816
  misc_feature (1)..(686): Ortholog of  Ceres SEQ ID NO 15168480 as cited in SEQ ID NO 57927
  misc_feature (1)..(686): Ortholog of  Ceres SEQ ID NO 15177738 as cited in SEQ ID NO 0
atcgagacgctgggcacgttcgcgctctccgtcggggcggcggtcgggatggagttctgggcgcggtgggcgcaccgggcgctgtggcacgcctccctgtggcacatgcacgagtcgcaccaccggccgcgcgagggccccttcgagctcaacgacgtgttcgccatcgtcaacgccgcgccggccatctccctcctcgcctacggcttcttccaccgcggcatcgtgcccggcctctgcttcggcgcgggcctggggattacgctgttcggcatggcctacatgttcgtccacgacggcctggtccaccgccgctttccggtcggccccatcgccgacgtgccctacttccgccgagtggctgcttcgcacaagatacnccacatggacaagttcggcggcgtcccgtatgggctcttcctgggaccaaaggagctggaggaggttggtggcctggacgagcttgttagcagtccggtgagtgaagctactgatactgaagacgcaggagaagaaaagacgcgtccagttgtatgcgttgtccgaacaagcgtgttcatgggccagagtgtgccaaatgagttctagctttaggcgagtgggccaaatgagtgtgggctgcgtcccagggtagtataagtactatgagtctgtaataatcaggacaagaagaatttaggtaaagt

SEQ ID NO: 16893 - protein, 195 aa, Zea mays subsp. mays
  peptide (1)..(195): Ceres Seq. ID no. 12549505
  misc_feature (127)..(127): Xaa is any aa, unknown or other
IETLGTFALSVGAAVGMEFWARWAHRALWHASLWHMHESHHRPREGPFELNDVFAIVNAAPAISLLAYGFFHRGIVPGLCFGAGLGITLFGMAYMFVHDGLVHRRFPVGPIADVPYFRRVAASHKIXHMDKFGGVPYGLFLGPKELEEVGGLDELVSSPVSEATDTEDAGEEKTRPVVCVVRTSVFMGQSVPNEF

SEQ ID NO: 16894 - protein, 179 aa, Zea mays subsp. mays
  peptide (1)..(179): Ceres Seq. ID no. 12549506
  misc_feature (111)..(111): Xaa is any aa, unknown or other
MEFWARWAHRALWHASLWHMHESHHRPREGPFELNDVFAIVNAAPAISLLAYGFFHRGIVPGLCFGAGLGITLFGMAYMFVHDGLVHRRFPVGPIADVPYFRRVAASHKIXHMDKFGGVPYGLFLGPKELEEVGGLDELVSSPVSEATDTEDAGEEKTRPVVCVVRTSVFMGQSVPNEF

SEQ ID NO: 16895 - protein, 160 aa, Zea mays subsp. mays
  peptide (1)..(160): Ceres Seq. ID no. 12549507
  misc_feature (92)..(92): Xaa is any aa, unknown or other
MHESHHRPREGPFELNDVFAIVNAAPAISLLAYGFFHRGIVPGLCFGAGLGITLFGMAYMFVHDGLVHRRFPVGPIADVPYFRRVAASHKIXHMDKFGGVPYGLFLGPKELEEVGGLDELVSSPVSEATDTEDAGEEKTRPVVCVVRTSVFMGQSVPNEF

SEQ ID NO: 16896 - DNA, 1763 bp, Zea mays subsp. mays
  misc_feature (1)..(1763): Ceres Seq. ID no. 12362600
  misc_feature (1)..(1763): Ortholog of  Ceres SEQ ID NO 13654166 as cited in SEQ ID NO 68381
  misc_feature (1)..(1763): Ortholog of  Ceres SEQ ID NO 13599720 as cited in SEQ ID NO 0
gcacgagaccattacctagaacatcctaatcgaaaagagatagacagctagcttcatcagtaggatgggcagcgacgaggaagcggcgctgctggtgccggcggtggaggagggttgccccgggtgcgtgatggagcagcggaaggcgagcagcaacggcaggatcccctacagggagctgttcttcgtcgccgccacctccctcgcctcagctttaccgatcacgtgcctcttccccttcttgtatttcatggtaagggacttccgcgtcgctgaaacagaggaagacatcggattctatgctggttttcttgctgcgtcgtacatggtgggcagaggcttctcttccatcttctggggcgtcatcgcagaccgcgttggacggaagcctgtcatcacgttttcgatactgtccgtggtcgtattcagcgcgctgtttggtctgagcacgacgtactggatggcgatcgccacgaggctcgtgctgggcgctctcaacggcctgctcgccccgataaaggcgtactgcgttgaagtttgccagacccagcaccaggcgcttggactctcgcttgtgaacacggcatgggctctgggtctcattgttggtccagctcttggaggctacctttcgcagccagctgagaaatatcctcacgtgttttccaaagactctgtatttggcagatttccataccttttgccctgtctaagtgtatcagcgtttgctacacttgtcctgataagctgtgagtggcttccggagactatacacaagcataaggttcccgaaatggacaccaaagcattcaaagccctgtcgtcaaaagagggctattgcgatccacctcgcaagaagaagagcttgctccagaacaggccttggatatcaaccctgctaccttactgctttttcagtcttcatgacacagcatatagtgagatactttccttatgggctgtgagcgaccggaagtatggcggccttagcttctcgactgaagatactggtcaggttcttgctatggcaggcgctagtcttctagtgtaccagcttgtcatttatcgctgggtccataggattcttgggacagtcaactcagcacgtattgcatctgctgtgtccatacttgttcttgcaacttatccctttatgacatacctgtcgggagtgaaactttccttggctctttgttctgcagccatgatgagaagtgctcttgcgatcactgtcaccacaggaatttcacttctacagaataatgctgtgtgccaagaacaaagaggcaccgcaaatggtatatcgacaactgcaatgtcattcttcaagtcaattgctccagtaggtgcaggggctctattctcatgggcacaaaaacgtcaagatgttgctttcctgccaggtgatcaagtggtgttcatggtgctgaatttggtgcagcttctcgggctgatatccacctttgagccctttctagtgttacctgcactaccagagtagtagtagtgttaaggctacaggacattatgaaaataaatgtaccttggcacatagttacagttgatcgagtgcaagacagaaggaacatgattgtagccacttgttacactactaatgatgtctgattagcccaagattaaaaaagaagaatgttttattaattagcaaacttgatctattgtaatatcactgtgacacaaaacccatatttctaatcatatggtcgtggatgctcaaaatgtgcaataaagttgtgatattc

SEQ ID NO: 16897 - protein, 478 aa, Zea mays subsp. mays
  peptide (1)..(478): Ceres Seq. ID no. 12362601
MGSDEEAALLVPAVEEGCPGCVMEQRKASSNGRIPYRELFFVAATSLASALPITCLFPFLYFMVRDFRVAETEEDIGFYAGFLAASYMVGRGFSSIFWGVIADRVGRKPVITFSILSVVVFSALFGLSTTYWMAIATRLVLGALNGLLAPIKAYCVEVCQTQHQALGLSLVNTAWALGLIVGPALGGYLSQPAEKYPHVFSKDSVFGRFPYLLPCLSVSAFATLVLISCEWLPETIHKHKVPEMDTKAFKALSSKEGYCDPPRKKKSLLQNRPWISTLLPYCFFSLHDTAYSEILSLWAVSDRKYGGLSFSTEDTGQVLAMAGASLLVYQLVIYRWVHRILGTVNSARIASAVSILVLATYPFMTYLSGVKLSLALCSAAMMRSALAITVTTGISLLQNNAVCQEQRGTANGISTTAMSFFKSIAPVGAGALFSWAQKRQDVAFLPGDQVVFMVLNLVQLLGLISTFEPFLVLPALPE

SEQ ID NO: 16898 - protein, 456 aa, Zea mays subsp. mays
  peptide (1)..(456): Ceres Seq. ID no. 12362602
MEQRKASSNGRIPYRELFFVAATSLASALPITCLFPFLYFMVRDFRVAETEEDIGFYAGFLAASYMVGRGFSSIFWGVIADRVGRKPVITFSILSVVVFSALFGLSTTYWMAIATRLVLGALNGLLAPIKAYCVEVCQTQHQALGLSLVNTAWALGLIVGPALGGYLSQPAEKYPHVFSKDSVFGRFPYLLPCLSVSAFATLVLISCEWLPETIHKHKVPEMDTKAFKALSSKEGYCDPPRKKKSLLQNRPWISTLLPYCFFSLHDTAYSEILSLWAVSDRKYGGLSFSTEDTGQVLAMAGASLLVYQLVIYRWVHRILGTVNSARIASAVSILVLATYPFMTYLSGVKLSLALCSAAMMRSALAITVTTGISLLQNNAVCQEQRGTANGISTTAMSFFKSIAPVGAGALFSWAQKRQDVAFLPGDQVVFMVLNLVQLLGLISTFEPFLVLPALPE

SEQ ID NO: 16899 - protein, 416 aa, Zea mays subsp. mays
  peptide (1)..(416): Ceres Seq. ID no. 12362603
MVRDFRVAETEEDIGFYAGFLAASYMVGRGFSSIFWGVIADRVGRKPVITFSILSVVVFSALFGLSTTYWMAIATRLVLGALNGLLAPIKAYCVEVCQTQHQALGLSLVNTAWALGLIVGPALGGYLSQPAEKYPHVFSKDSVFGRFPYLLPCLSVSAFATLVLISCEWLPETIHKHKVPEMDTKAFKALSSKEGYCDPPRKKKSLLQNRPWISTLLPYCFFSLHDTAYSEILSLWAVSDRKYGGLSFSTEDTGQVLAMAGASLLVYQLVIYRWVHRILGTVNSARIASAVSILVLATYPFMTYLSGVKLSLALCSAAMMRSALAITVTTGISLLQNNAVCQEQRGTANGISTTAMSFFKSIAPVGAGALFSWAQKRQDVAFLPGDQVVFMVLNLVQLLGLISTFEPFLVLPALPE

SEQ ID NO: 16900 - DNA, 1388 bp, Zea mays subsp. mays
  misc_feature (1)..(1388): Ceres Seq. ID no. 12382787
  misc_feature (1)..(1388): Ortholog of  Ceres SEQ ID NO 14312047 as cited in SEQ ID NO 55656
  misc_feature (1)..(1388): Ortholog of  Ceres SEQ ID NO 13582619 as cited in SEQ ID NO 56520
  misc_feature (1)..(1388): Ortholog of  Ceres SEQ ID NO 12611392 as cited in SEQ ID NO 56826
  misc_feature (1)..(1388): Ortholog of  Ceres SEQ ID NO 14315846 as cited in SEQ ID NO 58094
  misc_feature (1)..(1388): Ortholog of  Ceres SEQ ID NO 14314632 as cited in SEQ ID NO 59923
  misc_feature (1)..(1388): Ortholog of  Ceres SEQ ID NO 13660872 as cited in SEQ ID NO 60830
  misc_feature (1)..(1388): Ortholog of  Ceres SEQ ID NO 15226831 as cited in SEQ ID NO 62916
  misc_feature (1)..(1388): Ortholog of  Ceres SEQ ID NO 12616221 as cited in SEQ ID NO 63291
gcacgagaccattacctagaacatcctaatcgaaaaaaacaaaaaaagggccttcacttgactccacagccacagctagctgctgtggtgaagagtagcaggttcggcggccgggagggggcagccaacacgacgatggagcggttcggcctggacggcggcggtggcggtggcgagctgccgccggggttccggttccacccgacggacgaggagctcatcacctactacctcctccgcaaggccgtggacggcagcttctgcggccgcgccatcgcggagatcgacctgaacaagtgcgagccatgggagctcccggacaaggcgaagatgggggagaaggagtggtacttctacagcctccgcgaccgcaagtacccgacgggcctgcgcaccaaccgcgccacggtggccggctactggaaggccaccggcaaggaccgcgagatccgcagcggccgcaccggcgcgctggtgggcatgaagaagacgctcgtcttctaccgcggccgcgcccccaagggacagaagacgcactgggtcatgcacgagtaccgcctcgagggcgcctacgcctaccatttcctccccagctccacaagggacgagtgggtgatcgcgagggtgttccagaagcccggcgaggtcccacctgcagcccgcaagcaccgcctcggcgcccttagcagcactaccggcaccgccgcgggcgattcctgcttctcggactctacctcggcctccatcggcggcgcgtcgtcgtcatccacgcctggcccgctgttcgcgtcggcggccgccgccgtggccaatgccggcgccgccgacggcgacaccagctcctactgcggcggcgctgccaaccatggcaacctggtcaccggccgtgagctcgtgccctgcttctccactgccaccattaacggccccctagttgccgccgcgctcggcatcgggcagccgtacaacgcagccccgctgccgttcgagcagcagccgccgcctccggccttcctgccgagcctgcgttcccttcaggacaacctccagcttccaccgttcctctcagcaggcggtctgggcggcggcggggctctccactggctccccgccggcggcatggaggtcaaggtcgagggccgctcggcgccaccgcagatggctgtcggccccggccagctcgatggcgctttcggctggagcttctagttcttcgctgcactacatggttgtgcccatctatctagctagtagtggtttcttcatgcgttgtacgttaagcttggttaatcaactgctagtaagtgactgggtcgtcgttctaagtaatgtagtaactgtgttgtagtctctcatctaactgcagtagcagctttatttgttcgtgg

SEQ ID NO: 16901 - protein, 402 aa, Zea mays subsp. mays
  peptide (1)..(402): Ceres Seq. ID no. 12382788
ARDHYLEHPNRKKQKKGLHLTPQPQLAAVVKSSRFGGREGAANTTMERFGLDGGGGGGELPPGFRFHPTDEELITYYLLRKAVDGSFCGRAIAEIDLNKCEPWELPDKAKMGEKEWYFYSLRDRKYPTGLRTNRATVAGYWKATGKDREIRSGRTGALVGMKKTLVFYRGRAPKGQKTHWVMHEYRLEGAYAYHFLPSSTRDEWVIARVFQKPGEVPPAARKHRLGALSSTTGTAAGDSCFSDSTSASIGGASSSSTPGPLFASAAAAVANAGAADGDTSSYCGGAANHGNLVTGRELVPCFSTATINGPLVAAALGIGQPYNAAPLPFEQQPPPPAFLPSLRSLQDNLQLPPFLSAGGLGGGGALHWLPAGGMEVKVEGRSAPPQMAVGPGQLDGAFGWSF

SEQ ID NO: 16902 - protein, 357 aa, Zea mays subsp. mays
  peptide (1)..(357): Ceres Seq. ID no. 12382789
MERFGLDGGGGGGELPPGFRFHPTDEELITYYLLRKAVDGSFCGRAIAEIDLNKCEPWELPDKAKMGEKEWYFYSLRDRKYPTGLRTNRATVAGYWKATGKDREIRSGRTGALVGMKKTLVFYRGRAPKGQKTHWVMHEYRLEGAYAYHFLPSSTRDEWVIARVFQKPGEVPPAARKHRLGALSSTTGTAAGDSCFSDSTSASIGGASSSSTPGPLFASAAAAVANAGAADGDTSSYCGGAANHGNLVTGRELVPCFSTATINGPLVAAALGIGQPYNAAPLPFEQQPPPPAFLPSLRSLQDNLQLPPFLSAGGLGGGGALHWLPAGGMEVKVEGRSAPPQMAVGPGQLDGAFGWSF

SEQ ID NO: 16903 - protein, 292 aa, Zea mays subsp. mays
  peptide (1)..(292): Ceres Seq. ID no. 12382790
MGEKEWYFYSLRDRKYPTGLRTNRATVAGYWKATGKDREIRSGRTGALVGMKKTLVFYRGRAPKGQKTHWVMHEYRLEGAYAYHFLPSSTRDEWVIARVFQKPGEVPPAARKHRLGALSSTTGTAAGDSCFSDSTSASIGGASSSSTPGPLFASAAAAVANAGAADGDTSSYCGGAANHGNLVTGRELVPCFSTATINGPLVAAALGIGQPYNAAPLPFEQQPPPPAFLPSLRSLQDNLQLPPFLSAGGLGGGGALHWLPAGGMEVKVEGRSAPPQMAVGPGQLDGAFGWSF

SEQ ID NO: 16904 - DNA, 1143 bp, Zea mays subsp. mays
  misc_feature (1)..(1143): Ceres Seq. ID no. 12350692
  misc_feature (1)..(1143): Ortholog of  Ceres SEQ ID NO 14314172 as cited in SEQ ID NO 59584
actcccaccttcttggagacaccgccaggcgccatcttccggccgctgcccgcctgccccccccgggaggtcgaactgccttctagagccctctcctgttttcaggcgaatgtgcaggtagcttgacgtctgatgaacgctcagccatgctgctgatgctacacgaaactcttcctttcgtgaggccgacgagttcttgccgggacccaaaactctccgagaagagtgcctctgctctccacggtaaattgggatgcagtgcggtctgcagttcagcggaaggccatcgtgtacagaagccacacattgttcacagctacaaagttagcttcactaggaccagccatcatctgtgtaaaagcttaaacgagagaactacaaggcactgcctgcatcggttccatgttaatgcttcgcccgatgacgacgacttccgctcgtcgcgtaacatagcgatcagtttgttcaagcggtacaagaatgtcattgaccgaggaggtggagaaaacctaaatgagtttgtcagtgctggagtgaccgcttacgcactagggtgtacagatgaggggcttagaaaggaacttatggatattgaagattctggtctggagattgaaggcttagggtccttggggggcaccagcctcaagttcaaagtccactcctttgagatccgtgagtgcatcctgtggctcagtatagtgttcgtcacaatactgtgcacaccacaactaacagttatcaggtggtctccgaacccaccggtgtcagccgacgtcttgcatcagtggaaaggattctgtgctctaatcgcgaacgcttactatgtcaaaggaatggcatggttgccagtgaaaaccttgcagctggaacagatggctgtcacaggaagttcagagaaaccatcagtagttgctagccgcatgcagttagttttcagcacattagaggtagtcagcccacagtggccaagagtgtgattagatgaaagcaataccatcaaacaaaggtctgcagttttattctgaccaaaagatatgcatgtccaagttagcaagttcaaacctctgtcatggtgcaaacagatgatactatatccatttgaactctaatgtcaaataaaaatgctaatgtacttgttgg

SEQ ID NO: 16905 - protein, 277 aa, Zea mays subsp. mays
  peptide (1)..(277): Ceres Seq. ID no. 12350693
MLLMLHETLPFVRPTSSCRDPKLSEKSASALHGKLGCSAVCSSAEGHRVQKPHIVHSYKVSFTRTSHHLCKSLNERTTRHCLHRFHVNASPDDDDFRSSRNIAISLFKRYKNVIDRGGGENLNEFVSAGVTAYALGCTDEGLRKELMDIEDSGLEIEGLGSLGGTSLKFKVHSFEIRECILWLSIVFVTILCTPQLTVIRWSPNPPVSADVLHQWKGFCALIANAYYVKGMAWLPVKTLQLEQMAVTGSSEKPSVVASRMQLVFSTLEVVSPQWPRV

SEQ ID NO: 16906 - protein, 274 aa, Zea mays subsp. mays
  peptide (1)..(274): Ceres Seq. ID no. 12350694
MLHETLPFVRPTSSCRDPKLSEKSASALHGKLGCSAVCSSAEGHRVQKPHIVHSYKVSFTRTSHHLCKSLNERTTRHCLHRFHVNASPDDDDFRSSRNIAISLFKRYKNVIDRGGGENLNEFVSAGVTAYALGCTDEGLRKELMDIEDSGLEIEGLGSLGGTSLKFKVHSFEIRECILWLSIVFVTILCTPQLTVIRWSPNPPVSADVLHQWKGFCALIANAYYVKGMAWLPVKTLQLEQMAVTGSSEKPSVVASRMQLVFSTLEVVSPQWPRV

SEQ ID NO: 16907 - DNA, 1569 bp, Zea mays subsp. mays
  misc_feature (1)..(1569): Ceres Seq. ID no. 12383339
  misc_feature (1)..(1569): Ortholog of  Ceres SEQ ID NO 14316532 as cited in SEQ ID NO 57093
  misc_feature (1)..(1569): Ortholog of  Ceres SEQ ID NO 14301482 as cited in SEQ ID NO 63355
ctacgccaagcgcgcaattaaccctcactaaagggaacaaaagctggagctccaccgcggtggcggccgctctagaactagtggatcccccgggctgcaggaattcgcacgagaccattacctagaacatcctaatcgaaaaaagttcaggaaaggggagcctcaaaaggagagggagagtgagagggaggggaagtgcgctgcagtgctgcgcagctgcgctggggagaagagaagaaggtgccaaccacttcccaaggagaccgccagctctgctgctgcacgaccgaccagcccgtccactcgcctcgccttcctccgaaccccggcgaggaagaggaacccgccgccgccgccggacgcacttccgatggcgacgccacggaagccgatcaagctcacgctgccgtcccacgagaccaccatcggcaagttcctgacgcacagcgggacgttcacggacggggatctgcgcgtgaacaaggacggcctccgcatcgtctcgcggagggagggaggcgaggctcctcctatagagccactggatagtcaactgagcttagatgatctagacgttataaaagtgatcgggaaaggtagcagtggaaatgtgcaattggtccgccacaaatttactggccagttttttgctctgaaggttattcaactaaatattgatgagagtatacgcaaacagattgccaaggagttgaagataaacttatcaacacagtgccaatatgttgttgtgttctatcagtgtttctatttcaatggcgccatttctattgttttggaatacatggatggtggctcccttgcagatttcctgaagactgttaaaaccattccagaggcctacctcgctgctatctgtacgcagatgctaaaaggactgatctacttgcataacgagaagcgcgttatacaccgagatctgaaaccatcaaatatattgataaatcataggggtgaagtaaaaatatcagattttggtgtgagtgccattatctctagttcctcttcgcaacgagatacatttattggcacacgcaactacatggcgccagaaagaatcgataaagaaacatggttctatgagtgatatctggagtttgggactagtgatactggaatgtgcaaccggcatctttccatttcctccttgtgaaagcttctacgaacttctcgtagctgttgttgatcaaccgccaccttctgcaccaccggatcagttttcaccagaattctgtgcgttcatttctgcatgtctccagaaggatgctaatgacaggtcatcagcacaagccttattggaccatccattcctgagcatgtatgatgacctgcatgtagatcttgcttcgtacttcacgacagcaggatctcccctcgccaccttcaagtcggtgattggctccatcactttacttatatgacatacatgtacagccttttaggataaaaatgagcactgaagttttgcctatctgtatatcggcagcaacgtttggtcatgtttgtttcaccttgtaatgtattgactcagatatgggattggtcattgtc

SEQ ID NO: 16908 - protein, 244 aa, Zea mays subsp. mays
  peptide (1)..(244): Ceres Seq. ID no. 12383340
MATPRKPIKLTLPSHETTIGKFLTHSGTFTDGDLRVNKDGLRIVSRREGGEAPPIEPLDSQLSLDDLDVIKVIGKGSSGNVQLVRHKFTGQFFALKVIQLNIDESIRKQIAKELKINLSTQCQYVVVFYQCFYFNGAISIVLEYMDGGSLADFLKTVKTIPEAYLAAICTQMLKGLIYLHNEKRVIHRDLKPSNILINHRGEVKISDFGVSAIISSSSSQRDTFIGTRNYMAPERIDKETWFYE

SEQ ID NO: 16909 - DNA, 1722 bp, Zea mays subsp. mays
  misc_feature (1)..(1722): Ceres Seq. ID no. 12361452
  misc_feature (1)..(1722): Ortholog of  Ceres SEQ ID NO 14307363 as cited in SEQ ID NO 54059
gcacgagaccattacctagaacatcctaatcgaaaaaaaaataaaaaaattgggtgtttacaacgaattttaggtcttggccccttgggctcttggtccaagcgattttttttctgtgggccgttgggtccgtggaacatatccgttgcagaagactacagattgcagaagcgctcgctcgctgttgttgctgctgccaactgaagggatgcgagccacggccaccgcaggaggccgtgcggtgttccacctccaacacctctgcccgcgcccgccatggcgagctcttcctcctgctgccaccacgcacctctcccgctccgcgccagcgaggcgagccgaccaccgttgcctccccaaaggtttcttatcaactctagaaccggggatttcaggagtctccttgtgtcggcgtgctcatgcaacatgtagctattctttggatgacaagttacagggagagctagatgatatacagggagaacagagaaagctagaaacagttggtgcgtttcagaaaataccaatggtgatgcctgcaactgatatactaatgtcagcacaaaggaaatctagaaatgtgccaccaacaaagggtatagcaaatattgctaagcgtgaaaggaacaaaggtgcgaaacagcttgatgccttaatgaaagaactttctgtaccgctgagaacatacacagaaaacttcccaaagaggagagatttgcatccttatgagaggtctctcattgagttgacttttggggagggttattatgagcaggttctaggacgtgtagatactctcaggaaaaggattacttctgttggaaagcaacatgcttcagtctgtgctaagtcaacaacaaaacgtgaagcagaggaacgcctcactgagggcagaaagaaactcgaagaggctttccagcatgggaagcacgccattgatgatttagtaaatgtagcaaaggctttgcgttctatgcctgttgttgatctacatattccaacactatgtctagttggatcacccaatgtggggaagtcatctttagtccggatattatcatctggaaaacctgaggtctgcagctacccattcacaacaagagggattctaatgggtcacattgtatctaatcaggaacgttttcaggttacggacactccaggactcctgacaaggcatgatgatgacagaaataacatagagcgattgacactcgctgtcctttcttatctacctattgctgtcctgtatgtgcatgatctatccgaagactgtgggacctcagtggccgatcagtacatcacgtacaagcatattaaggacagattcggtgaccgcctatggcttgatgttatatccaaatgcgatcttttgggaaagaaagagcccataagttttcacgatgctgatgacgatgtagcacggtacagaagattggggccagaaggcgccctccaagtatctgtgcagagcgaaatcggcgtcaaacagcttaaggaaagagtgcatgagctgctgacctctcagatggctcggatcaaatctaccaaggcggagcctgaaacacaggaagtagggactagtgttgtttactgaagtttgacaataataaggattcgaatatcatgctgggtgtccgcgtaaacattcaatgtcgatgatggtaacacattccatctgttgtccttttgtccatttggaaagggtggtcagaattgccc

SEQ ID NO: 16910 - protein, 462 aa, Zea mays subsp. mays
  peptide (1)..(462): Ceres Seq. ID no. 12361453
MRATATAGGRAVFHLQHLCPRPPWRALPPAATTHLSRSAPARRADHRCLPKGFLSTLEPGISGVSLCRRAHATCSYSLDDKLQGELDDIQGEQRKLETVGAFQKIPMVMPATDILMSAQRKSRNVPPTKGIANIAKRERNKGAKQLDALMKELSVPLRTYTENFPKRRDLHPYERSLIELTFGEGYYEQVLGRVDTLRKRITSVGKQHASVCAKSTTKREAEERLTEGRKKLEEAFQHGKHAIDDLVNVAKALRSMPVVDLHIPTLCLVGSPNVGKSSLVRILSSGKPEVCSYPFTTRGILMGHIVSNQERFQVTDTPGLLTRHDDDRNNIERLTLAVLSYLPIAVLYVHDLSEDCGTSVADQYITYKHIKDRFGDRLWLDVISKCDLLGKKEPISFHDADDDVARYRRLGPEGALQVSVQSEIGVKQLKERVHELLTSQMARIKSTKAEPETQEVGTSVVY

SEQ ID NO: 16911 - protein, 356 aa, Zea mays subsp. mays
  peptide (1)..(356): Ceres Seq. ID no. 12361454
MVMPATDILMSAQRKSRNVPPTKGIANIAKRERNKGAKQLDALMKELSVPLRTYTENFPKRRDLHPYERSLIELTFGEGYYEQVLGRVDTLRKRITSVGKQHASVCAKSTTKREAEERLTEGRKKLEEAFQHGKHAIDDLVNVAKALRSMPVVDLHIPTLCLVGSPNVGKSSLVRILSSGKPEVCSYPFTTRGILMGHIVSNQERFQVTDTPGLLTRHDDDRNNIERLTLAVLSYLPIAVLYVHDLSEDCGTSVADQYITYKHIKDRFGDRLWLDVISKCDLLGKKEPISFHDADDDVARYRRLGPEGALQVSVQSEIGVKQLKERVHELLTSQMARIKSTKAEPETQEVGTSVVY

SEQ ID NO: 16912 - protein, 354 aa, Zea mays subsp. mays
  peptide (1)..(354): Ceres Seq. ID no. 12361455
MPATDILMSAQRKSRNVPPTKGIANIAKRERNKGAKQLDALMKELSVPLRTYTENFPKRRDLHPYERSLIELTFGEGYYEQVLGRVDTLRKRITSVGKQHASVCAKSTTKREAEERLTEGRKKLEEAFQHGKHAIDDLVNVAKALRSMPVVDLHIPTLCLVGSPNVGKSSLVRILSSGKPEVCSYPFTTRGILMGHIVSNQERFQVTDTPGLLTRHDDDRNNIERLTLAVLSYLPIAVLYVHDLSEDCGTSVADQYITYKHIKDRFGDRLWLDVISKCDLLGKKEPISFHDADDDVARYRRLGPEGALQVSVQSEIGVKQLKERVHELLTSQMARIKSTKAEPETQEVGTSVVY

SEQ ID NO: 16913 - DNA, 1296 bp, Zea mays subsp. mays
  misc_feature (1)..(1296): Ceres Seq. ID no. 12415205
  misc_feature (1)..(1296): Ortholog of  Ceres SEQ ID NO 13594727 as cited in SEQ ID NO 52169
  misc_feature (1)..(1296): Ortholog of  Ceres SEQ ID NO 13638746 as cited in SEQ ID NO 59296
  misc_feature (1)..(1296): Ortholog of  Ceres SEQ ID NO 13598714 as cited in SEQ ID NO 62656
  misc_feature (1)..(1296): Ortholog of  Ceres SEQ ID NO 13596969 as cited in SEQ ID NO 63375
  misc_feature (1)..(1296): Ortholog of  Ceres SEQ ID NO 14302240 as cited in SEQ ID NO 64162
  misc_feature (1)..(1296): Ortholog of  Ceres SEQ ID NO 13584480 as cited in SEQ ID NO 64751
  misc_feature (1)..(1296): Ortholog of  Ceres SEQ ID NO 15170183 as cited in SEQ ID NO 65667
  misc_feature (1)..(1296): Ortholog of  Ceres SEQ ID NO 13596362 as cited in SEQ ID NO 67877
  misc_feature (1)..(1296): Ortholog of  Ceres SEQ ID NO 13655970 as cited in SEQ ID NO 69109
tacgccaagcgcgcaattaaccctcactaaagggaacaaaagctggagctccaccgcggtggcggccgctctagaactagtggatcccccgggctgcaggaattcgcacgagaccattacctagaacatcctaatcaaaaactagtgtgcagaaacatggcgcgaagcagcagcccagctaggatggccatgttgctgctcttgctctcggccctcgcagtgctcttcccacccgccgtggccgacgacctgctctccgtggacttccacgccgcgtcgtgcccgcagctggaccgcatcgtgcgcaccgccgtgcaggccgccctccggagggagatcgcgctcgccgcgggcctcctccgcatcttcttccacgactgcttcccgcagggctgcgacgcgtccgtgctcctcaagggcaacgccacggagcagaccatggggcccaacaccacgctgcagccgcgggcgctgcagctcatcgacgacatccgcgccaaggtgcacgccgcctgcgggcccaccgtgtcctgcgccgacgtcacggcgctcgccacccgcgccgccgtcgtcgcgtcggggggaccctcctaccccgtgcccctgggccagcgcgacagcctcgccccggcgcccgaggacgacgtcaacgcgctcccgtcgcccaccaccgccagcgtcccggagctcctggcggcgttccggggcaggggcatccgcgacgtggccgacctggtcgcgctctccggtgctcacaccgtcgggagggccatctgccccttcttccaggaccgcgccgacagccaggaggatgacttcgccaggcagctcaaggccgactgcgccagggaccccaaccggctgcagcagctggacgtcgtcacgcccgatgccttcgacaacgtctactacaagaacctcaacgccagccggggcgtcttcacgtccgacatggcgctcatcagggaccctacaacggcgccgatcgtcaggtgcttcgcggggagcaaggacgccttcttcgcccagttcgccacctccatggtcaagctcagcaaggtgcccaggaagccccccgggaacgtcggcgagatccgccgccgcagctgcttcaggaccaataacgccaagatgagcatccttgacgtcgacgatgccgtgggcagcttggcggcggcgtctgcccgttgaccaacaccaactattatattacctgctggctgtggctgctgtacgcctgtactgtactaggcgtcgtcggcgccttacgtgtatgtcctgtacgactgttatctt

SEQ ID NO: 16914 - protein, 344 aa, Zea mays subsp. mays
  peptide (1)..(344): Ceres Seq. ID no. 12415206
MARSSSPARMAMLLLLLSALAVLFPPAVADDLLSVDFHAASCPQLDRIVRTAVQAALRREIALAAGLLRIFFHDCFPQGCDASVLLKGNATEQTMGPNTTLQPRALQLIDDIRAKVHAACGPTVSCADVTALATRAAVVASGGPSYPVPLGQRDSLAPAPEDDVNALPSPTTASVPELLAAFRGRGIRDVADLVALSGAHTVGRAICPFFQDRADSQEDDFARQLKADCARDPNRLQQLDVVTPDAFDNVYYKNLNASRGVFTSDMALIRDPTTAPIVRCFAGSKDAFFAQFATSMVKLSKVPRKPPGNVGEIRRRSCFRTNNAKMSILDVDDAVGSLAAASAR

SEQ ID NO: 16915 - protein, 335 aa, Zea mays subsp. mays
  peptide (1)..(335): Ceres Seq. ID no. 12415207
MAMLLLLLSALAVLFPPAVADDLLSVDFHAASCPQLDRIVRTAVQAALRREIALAAGLLRIFFHDCFPQGCDASVLLKGNATEQTMGPNTTLQPRALQLIDDIRAKVHAACGPTVSCADVTALATRAAVVASGGPSYPVPLGQRDSLAPAPEDDVNALPSPTTASVPELLAAFRGRGIRDVADLVALSGAHTVGRAICPFFQDRADSQEDDFARQLKADCARDPNRLQQLDVVTPDAFDNVYYKNLNASRGVFTSDMALIRDPTTAPIVRCFAGSKDAFFAQFATSMVKLSKVPRKPPGNVGEIRRRSCFRTNNAKMSILDVDDAVGSLAAASAR

SEQ ID NO: 16916 - protein, 333 aa, Zea mays subsp. mays
  peptide (1)..(333): Ceres Seq. ID no. 12415208
MLLLLLSALAVLFPPAVADDLLSVDFHAASCPQLDRIVRTAVQAALRREIALAAGLLRIFFHDCFPQGCDASVLLKGNATEQTMGPNTTLQPRALQLIDDIRAKVHAACGPTVSCADVTALATRAAVVASGGPSYPVPLGQRDSLAPAPEDDVNALPSPTTASVPELLAAFRGRGIRDVADLVALSGAHTVGRAICPFFQDRADSQEDDFARQLKADCARDPNRLQQLDVVTPDAFDNVYYKNLNASRGVFTSDMALIRDPTTAPIVRCFAGSKDAFFAQFATSMVKLSKVPRKPPGNVGEIRRRSCFRTNNAKMSILDVDDAVGSLAAASAR

SEQ ID NO: 16917 - DNA, 931 bp, Zea mays subsp. mays
  misc_feature (1)..(931): Ceres Seq. ID no. 13622442
  misc_feature (1)..(931): Ortholog of  Ceres SEQ ID NO 12611884 as cited in SEQ ID NO 51018
  misc_feature (1)..(931): Ortholog of  Ceres SEQ ID NO 12609093 as cited in SEQ ID NO 52008
  misc_feature (1)..(931): Ortholog of  Ceres SEQ ID NO 12609839 as cited in SEQ ID NO 52022
  misc_feature (1)..(931): Ortholog of  Ceres SEQ ID NO 14304209 as cited in SEQ ID NO 56460
  misc_feature (1)..(931): Ortholog of  Ceres SEQ ID NO 12587429 as cited in SEQ ID NO 63113
  misc_feature (1)..(931): Ortholog of  Ceres SEQ ID NO 12615635 as cited in SEQ ID NO 63133
  misc_feature (1)..(931): Ortholog of  Ceres SEQ ID NO 12586351 as cited in SEQ ID NO 64028
  misc_feature (1)..(931): Ortholog of  Ceres SEQ ID NO 15173174 as cited in SEQ ID NO 64046
  misc_feature (1)..(931): Ortholog of  Ceres SEQ ID NO 13654441 as cited in SEQ ID NO 67814
  misc_feature (1)..(931): Ortholog of  Ceres SEQ ID NO 14309027 as cited in SEQ ID NO 0
  misc_feature (1)..(931): Ortholog of  Ceres SEQ ID NO 15177482 as cited in SEQ ID NO 0
aggatatgtcacgactcacgacgacggaaacagtagtgctgccagtagagagctctcagaactcgggaaaaaaatgtcagaggccgccgtgcgtgtgatcggcctatggccgagcccgttcgtgatccgcgtcctgatcgccctgaagctgaagggcgtcgagttcgagttcgtggaggaggtggtgggcaggaagagcgagctgctgctgaggtcgaacccggtgcacaagaagatccccgtcctgctccaccacggcaagcccatctccgagtctctgatcgtcgtccagtacatcgacgaggtctggtcctccggcgcgccggccttcctccccgtcgacgctcacgcccgcgccgtccagcggttctgggcgcagtacgtcgacgacaagctgccttgggcgatccgcatactgaagggaacggacgacgggggcatggagcaggcggcggggcagctgtccgcggccctgcagctcctagaggaggctttcgcgcagctcagccaggggaagcgctacttcggcggggacagcgtcgggtacctggacatcgctctggtgtcgcatgtcggctgggtgaaggcggtggagaagatcgccggggtcaccctgctggacaaggccaaggtcccgaacctggtggcgtgggctgatcgtctgtgtgcccacccggccgtggtcgacgccatccctgacgcggacaagttcgttgagttcagcgtcacctatggctccttttcgaagcctatcaatgctcccgccaagtgagcaaaaagggtccgtgcatgctttcgtcattttcactttcactgcgcgtgtgccggtgcgtgtcaaaattgcatagcaaggggattcttctcccacatagatcttcttgtgatcatagtcaccaaatcagctctgaaaatgaagattttctgcccttcc

SEQ ID NO: 16918 - protein, 256 aa, Zea mays subsp. mays
  peptide (1)..(256): Ceres Seq. ID no. 13622443
GYVTTHDDGNSSAASRELSELGKKMSEAAVRVIGLWPSPFVIRVLIALKLKGVEFEFVEEVVGRKSELLLRSNPVHKKIPVLLHHGKPISESLIVVQYIDEVWSSGAPAFLPVDAHARAVQRFWAQYVDDKLPWAIRILKGTDDGGMEQAAGQLSAALQLLEEAFAQLSQGKRYFGGDSVGYLDIALVSHVGWVKAVEKIAGVTLLDKAKVPNLVAWADRLCAHPAVVDAIPDADKFVEFSVTYGSFSKPINAPAK

SEQ ID NO: 16919 - protein, 232 aa, Zea mays subsp. mays
  peptide (1)..(232): Ceres Seq. ID no. 13622444
MSEAAVRVIGLWPSPFVIRVLIALKLKGVEFEFVEEVVGRKSELLLRSNPVHKKIPVLLHHGKPISESLIVVQYIDEVWSSGAPAFLPVDAHARAVQRFWAQYVDDKLPWAIRILKGTDDGGMEQAAGQLSAALQLLEEAFAQLSQGKRYFGGDSVGYLDIALVSHVGWVKAVEKIAGVTLLDKAKVPNLVAWADRLCAHPAVVDAIPDADKFVEFSVTYGSFSKPINAPAK

SEQ ID NO: 16920 - protein, 183 aa, Zea mays subsp. mays
  peptide (1)..(183): Ceres Seq. ID no. 13622445
MAEPVRDPRPDRPEAEGRRVRVRGGGGGQEERAAAEVEPGAQEDPRPAPPRQAHLRVSDRRPVHRRGLVLRRAGLPPRRRSRPRRPAVLGAVRRRQAALGDPHTEGNGRRGHGAGGGAAVRGPAAPRGGFRAAQPGEALLRRGQRRVPGHRSGVACRLGEGGGEDRRGHPAGQGQGPEPGGVG

SEQ ID NO: 16921 - DNA, 1956 bp, Zea mays subsp. mays
  misc_feature (1)..(1956): Ceres Seq. ID no. 12358907
  misc_feature (1)..(1956): Ortholog of  Ceres SEQ ID NO 14314480 as cited in SEQ ID NO 52362
  misc_feature (1)..(1956): Ortholog of  Ceres SEQ ID NO 13593854 as cited in SEQ ID NO 53403
  misc_feature (1)..(1956): Ortholog of  Ceres SEQ ID NO 12581680 as cited in SEQ ID NO 55019
  misc_feature (1)..(1956): Ortholog of  Ceres SEQ ID NO 15172112 as cited in SEQ ID NO 59632
agctgtaattttttagagtccctctcaaactttgcttgcttgcgctctccatatatcctgtggaccggagaggatgctctgatctacctgtctgttcttcgatcgagtctgagagatttgggaggaggagggaaacaaagcgaaagagcccatcttttttgtctttttggttcggtttcgtggttgcttcttttggaccccgcggaggagcccaccgtttctacaaaaacccaatctttgctgccttctcagcggtcgagatcgataggtttccagatctgaggctccgtgttctggctgtgagatcggaggcgcagcaatccgagcacgcagctagtagggaaagtatccgagaaaagttgcagattttgctgggggcaacggagcgagaacaagttactgcagaaggaaagggcaaaggtgggggaggcgccggagatgagggatgctatcagctctgatggattatttgaaatcttgctggggtccggcatcaccggctgggcgtccccgcaaaggatcggatgccaccggccgccaggacgggctcctgtggtacaaggacggcgggcaggtcgtcgatggtgagttctccatggccgtggtccaggccaataacctattggaggaccatagccaggttgaatccgggccgcttagcacatcggagcctggactgcaaggcaccttcgtcggggtctacgatgggcacggtggcccggagacagcgcgttacatcaatgaccatctcttcaaccacttgaggagattcgcatctgagcacaagtgcatgtcagcggatgtgattcggaaggtattccgagcgactgaggagggtttcatttctgtggttagtaaccaatggtcattgagacctcaattagcagctgtaggctcttgctgtctagttggtgtggtttgcagcggaactctatatgttgcaaaccttggggactcccgtgctgttctggggagacttgtcaagggaactggggaggttttggcaatgcagctctcagcagaacacaatgcatcctatgtggaggttagacgagagctgcaggcatcacatcctgatgatccccatattgtggtcctaaaacacaatgtttggcgtgtaaagggtattatccagataacaaggtcaattggagatgtgtatctgaagaaaccagaatttaatagagaacctttgcacagcaagtttcgtcttcaggaaacttttaggagaccacttcttagttctgatccagcaattactgtccaccaaatacagccaactgataagttcatcatttttgcatctgatggactctgggaacatcttagtaatcaggaagtggttgacatggtccaaagtagcccgcgtaatggaatcgcacgaaagttagtaaagtctgcagtgcaggaagcagcgaagaagagggagatgcggtattcagacctcaagaaagttgatcggggggtgaggcggcacttccacgacgatataactgtcattgtggtatttttcgattcaaacgccatgacaactgctgcctggagcagaccctcggtctctctccgagggggtgggtttccaatccattcaaacacccttgctccattctcagttcctacagagctaaacaactactgaaaccacgcggtatgtgaaggagccaggcaagaggataaaaaaaaagtaaaggaaaaaggagaaggaaaaacagctgttgtgatcagttgtagtgtatttcaccgttcatgttcatgcaaaacattttttagattctcaagtctcaacctggtgaccagtgcactgatagcaaggtataagattagattattcttagcttttttatcctctttttctctctctcttccttaccctttagattcactcatgggatatcaggtgcttgtacattctttggttcaacttgtgataatagtccatcgcccccctctttcgtc

SEQ ID NO: 16922 - protein, 397 aa, Zea mays subsp. mays
  peptide (1)..(397): Ceres Seq. ID no. 12358908
MLSALMDYLKSCWGPASPAGRPRKGSDATGRQDGLLWYKDGGQVVDGEFSMAVVQANNLLEDHSQVESGPLSTSEPGLQGTFVGVYDGHGGPETARYINDHLFNHLRRFASEHKCMSADVIRKVFRATEEGFISVVSNQWSLRPQLAAVGSCCLVGVVCSGTLYVANLGDSRAVLGRLVKGTGEVLAMQLSAEHNASYVEVRRELQASHPDDPHIVVLKHNVWRVKGIIQITRSIGDVYLKKPEFNREPLHSKFRLQETFRRPLLSSDPAITVHQIQPTDKFIIFASDGLWEHLSNQEVVDMVQSSPRNGIARKLVKSAVQEAAKKREMRYSDLKKVDRGVRRHFHDDITVIVVFFDSNAMTTAAWSRPSVSLRGGGFPIHSNTLAPFSVPTELNNY

SEQ ID NO: 16923 - protein, 392 aa, Zea mays subsp. mays
  peptide (1)..(392): Ceres Seq. ID no. 12358909
MDYLKSCWGPASPAGRPRKGSDATGRQDGLLWYKDGGQVVDGEFSMAVVQANNLLEDHSQVESGPLSTSEPGLQGTFVGVYDGHGGPETARYINDHLFNHLRRFASEHKCMSADVIRKVFRATEEGFISVVSNQWSLRPQLAAVGSCCLVGVVCSGTLYVANLGDSRAVLGRLVKGTGEVLAMQLSAEHNASYVEVRRELQASHPDDPHIVVLKHNVWRVKGIIQITRSIGDVYLKKPEFNREPLHSKFRLQETFRRPLLSSDPAITVHQIQPTDKFIIFASDGLWEHLSNQEVVDMVQSSPRNGIARKLVKSAVQEAAKKREMRYSDLKKVDRGVRRHFHDDITVIVVFFDSNAMTTAAWSRPSVSLRGGGFPIHSNTLAPFSVPTELNNY

SEQ ID NO: 16924 - protein, 347 aa, Zea mays subsp. mays
  peptide (1)..(347): Ceres Seq. ID no. 12358910
MAVVQANNLLEDHSQVESGPLSTSEPGLQGTFVGVYDGHGGPETARYINDHLFNHLRRFASEHKCMSADVIRKVFRATEEGFISVVSNQWSLRPQLAAVGSCCLVGVVCSGTLYVANLGDSRAVLGRLVKGTGEVLAMQLSAEHNASYVEVRRELQASHPDDPHIVVLKHNVWRVKGIIQITRSIGDVYLKKPEFNREPLHSKFRLQETFRRPLLSSDPAITVHQIQPTDKFIIFASDGLWEHLSNQEVVDMVQSSPRNGIARKLVKSAVQEAAKKREMRYSDLKKVDRGVRRHFHDDITVIVVFFDSNAMTTAAWSRPSVSLRGGGFPIHSNTLAPFSVPTELNNY

SEQ ID NO: 16925 - DNA, 1581 bp, Zea mays subsp. mays
  misc_feature (1)..(1581): Ceres Seq. ID no. 12376644
  misc_feature (1)..(1581): Ortholog of  Ceres SEQ ID NO 15169809 as cited in SEQ ID NO 52839
  misc_feature (1)..(1581): Ortholog of  Ceres SEQ ID NO 15224302 as cited in SEQ ID NO 53942
gcacgagaccattacctagaacatcctaatcgaaaagaaatgaaactcgcgacagacagttcgtcctctgctccgtggaccctattcctgcgattatctggttgctcacatggacggtgatccgtgatccccggtgaccaagggtgttgaatcctcatgcaggcagaggcagaaacactgcccgaggctgatgcctgatggtgcgatcccgttccctgtcgccatcgagttcgttttttcgttgcttgacagccttaaagcggcgcacgaatgccacgagccactgaggcggcttcccagttcactccaggcccagggcgcccggtcgccatgaactcccgctcctcctccggcggcgtgcggtccgagagctcgctgtcgttgggggagcgcctctgcgcggtcttcttccccgtcatcgccatcgccgaggccgttttcttcgccttcaccgactgcctcgcggacctctgcaccgactccggctcctcgcactcgcgccgcttcggcgcgggcgcgtcctcctccgccgccaggaacagtcggagcaaccattgccagccccaccacagacctttcctacgccgcgccgctcgggtggatggacctcccccaacctccgccagctcgcacgcctcgccgacgagtcccgatgcttctcggtgaacgaggtggaggcgctctttgagctctacaagaagatcagctgctccatcatcgacgacggcctcatccacaaggaagaacttcagctggcactgttcaaaactccaagcggcgagaatctttttcttgatagagtttttttatttgtttgatgagaagaaaaatggtgtgatcgagtttgatgagtttattcattccctaagtgtcttccaccccttggcaccaattgaagacaagatcgattttgcatttaggttgtatgacttgagacaaactgggtttattgagcgtgaagaggttaagcaaatggtaattgctattttgatggaatctgatttaaaattatcagatgacttactcgaggccatcatagataagacatttgaagatgctgatgcggataaggatggaaaaataaataaagaggagtggaaggaatttgcgttacgccaccctaacctgttaaagaatatgacactgccttatctgagggacatcacaaccgtcttccctagtttcgtcttcaacacggcggtggaagattagtcgctccaattgaaggcaataaagcagtactggggattgcttgaggtgcacaaggttcctgaaacctgacggctgttggtcgccttcaaccactgagaatccgatgtgttctgagcatcaaggcagccgccacctgaccatcactcctgctataaattgtaatattataatataaggctcatccggggtggcagatcggcagcgggaacttacctgatataatttcttgctgccgtttttgcgcagcaatggattgagagtcggtagctgtagatacatctagcttccattctgtacgtagggatccaggaactgtaaatacgttctatggaattgtatcggaaagttcctagtacgccagccagatct

SEQ ID NO: 16926 - protein, 131 aa, Zea mays subsp. mays
  peptide (1)..(131): Ceres Seq. ID no. 12376645
MPRATEAASQFTPGPGRPVAMNSRSSSGGVRSESSLSLGERLCAVFFPVIAIAEAVFFAFTDCLADLCTDSGSSHSRRFGAGASSSAARNSRSNHCQPHHRPFLRRAARVDGPPPTSASSHASPTSPDASR

SEQ ID NO: 16927 - protein, 111 aa, Zea mays subsp. mays
  peptide (1)..(111): Ceres Seq. ID no. 12376646
MNSRSSSGGVRSESSLSLGERLCAVFFPVIAIAEAVFFAFTDCLADLCTDSGSSHSRRFGAGASSSAARNSRSNHCQPHHRPFLRRAARVDGPPPTSASSHASPTSPDASR

SEQ ID NO: 16928 - protein, 79 aa, Zea mays subsp. mays
  peptide (1)..(79): Ceres Seq. ID no. 12376647
MVIAILMESDLKLSDDLLEAIIDKTFEDADADKDGKINKEEWKEFALRHPNLLKNMTLPYLRDITTVFPSFVFNTAVED

SEQ ID NO: 16929 - DNA, 1024 bp, Zea mays subsp. mays; identical to SEQ ID NO: 7244
  misc_feature (1)..(1024): Ceres Seq. ID no. 12462326
  misc_feature (1)..(1024): Ortholog of  Ceres SEQ ID NO 12610554 as cited in SEQ ID NO 59805
  misc_feature (1)..(1024): Ortholog of  Ceres SEQ ID NO 12614051 as cited in SEQ ID NO 67827

SEQ ID NO: 16930 - protein, 293 aa, Zea mays subsp. mays; identical to SEQ ID NO: 7245
  peptide (1)..(293): Ceres Seq. ID no. 12462327

SEQ ID NO: 16931 - protein, 218 aa, Zea mays subsp. mays; identical to SEQ ID NO: 7246
  peptide (1)..(218): Ceres Seq. ID no. 12462328

SEQ ID NO: 16932 - protein, 167 aa, Zea mays subsp. mays; identical to SEQ ID NO: 7247
  peptide (1)..(167): Ceres Seq. ID no. 12462329

SEQ ID NO: 16933 - DNA, 2120 bp, Zea mays subsp. mays
  misc_feature (1)..(2120): Ceres Seq. ID no. 12376866
  misc_feature (1)..(2120): Ortholog of  Ceres SEQ ID NO 12581821 as cited in SEQ ID NO 54414
gcacgagaccattacctagaacatcctaatcgaaaaaatgtcggagcagcagcagccattgccgcagcctcggagcagcatgcgggaggctctggagaaggaggacaaggagaaggcggcggctgctgcggcggccaaggagaaggcggccgtccccaagaacggcaacggcaacggcggcaagaatggcggcggcgccggcagcggcaacggcggagcgcccccgcagtccggggaggagacggcccgcgagatccaggtggtcagggaggcgtaccgccgcgagacggccgcgccggcctacgtcatacccgaggagccgccggccgtggtcgagctcgtcggctggtacatctacggcttctgctcctacttcatcacccacctgctgctgccggtcctcttcccggccatcatcacgcaggtcgccttccccaactccgacttcacgcccgaccccaagtacaccctcaagggcgtcacctgctccgtccacgagatgtccatgtaccagaggcttaccaagcactccattgtgatcgatggatcccggatgtcaccattgggctggagtggactgtcgtgggcaatcggcatcctcatcgtggcgccgctcctcacccagaccgctcaccatctcgaccgtggccagtaccagtcgctgatcctcattgccgccacgtccttcgggtccttcttctgcctgctaacaggcttcttcaagacggtctgggtgttcctgttctacatcctcttcatcgctggctcgatcatcgtcgctgaggcggtgcacacccgcaaccttgggctgatgatccgtggcctggctgcgcatgactcgggcaagcaccttgtccttcgccgccgcgctgctgccagccagctcagcctgtactgcactgccataggaggcattggagctgccctcatggcagctttcatgtaccacatgctgcggcgcactgaccagctcactggcctctgggtcgtgtccatcttctgtggccttatctggttcatcggcatctgccatggcctcttcacaaacaggcccagcagctcgtcacccaccaccgcattcgagcccaacttcttcaccaagctcagctacagcatgaccctcctccgttacccgcaggccattggcagcctggttgcggtgttcctgtcctctttcgccacaatgtgcatcttcaccagcggcacgctctatgctatcggtggtgtctgcatcaagccggtgctcgtgcttgcgctatggatcctctactttctgttccccttgatctcgctcccgctcctccacccgatccagatcataatccgcgcggacgccgtgcgcatgcagctgctcgggttcataatctgcctgttcgtgtccggtgccgggttctacttcaagagccacaggtggagggctgcccacatcatcgtcatcgccctggtccagagcaccgccaatggcatactgtacgcgttcggccgcatcctgctcctcgatgcctcgccgccggggaaggagggtgcgttctcggtctggtacgcgtttgttcgtgtcaccggtgccatgatcggcttcgctgcctcctccgctggccctgggcgcgcgggagggtcctttgctgctgcgttcctcgggagcttcctgggcatcatcgtgctgatcttcggcaacgtcagcaacatcggggcgctgaaggcggccgggcacctcaaggggatggacgacgagaagaggatgggcggtctcgggatggagaagggcgagggcatgggtagcgccgtcgctgattctggcgagagcagggggagggtatgatgatgactattcgtgacagtgaattcctgggaggtgggggagaaaaggattgcgtcctgtggaggttgtgcttgtgagaaggatttgttctctcttttttttcttgtttctttggccgtgtttcagtgacactgttgatggatcccagtgcttcgcccgtttgatgcatcatggtggtggtggtgatgatggatgacatagtggtaggggagtgtgtgctagttgttaatgtgttatttattcttttgcttgcaagacaattgtaactgatgatcgttagatcatatggttcttccttcgt

SEQ ID NO: 16934 - protein, 593 aa, Zea mays subsp. mays
  peptide (1)..(593): Ceres Seq. ID no. 12376867
MSEQQQPLPQPRSSMREALEKEDKEKAAAAAAAKEKAAVPKNGNGNGGKNGGGAGSGNGGAPPQSGEETAREIQVVREAYRRETAAPAYVIPEEPPAVVELVGWYIYGFCSYFITHLLLPVLFPAIITQVAFPNSDFTPDPKYTLKGVTCSVHEMSMYQRLTKHSIVIDGSRMSPLGWSGLSWAIGILIVAPLLTQTAHHLDRGQYQSLILIAATSFGSFFCLLTGFFKTVWVFLFYILFIAGSIIVAEAVHTRNLGLMIRGLAAHDSGKHLVLRRRAAASQLSLYCTAIGGIGAALMAAFMYHMLRRTDQLTGLWVVSIFCGLIWFIGICHGLFTNRPSSSSPTTAFEPNFFTKLSYSMTLLRYPQAIGSLVAVFLSSFATMCIFTSGTLYAIGGVCIKPVLVLALWILYFLFPLISLPLLHPIQIIIRADAVRMQLLGFIICLFVSGAGFYFKSHRWRAAHIIVIALVQSTANGILYAFGRILLLDASPPGKEGAFSVWYAFVRVTGAMIGFAASSAGPGRAGGSFAAAFLGSFLGIIVLIFGNVSNIGALKAAGHLKGMDDEKRMGGLGMEKGEGMGSAVADSGESRGRV

SEQ ID NO: 16935 - protein, 579 aa, Zea mays subsp. mays
  peptide (1)..(579): Ceres Seq. ID no. 12376868
MREALEKEDKEKAAAAAAAKEKAAVPKNGNGNGGKNGGGAGSGNGGAPPQSGEETAREIQVVREAYRRETAAPAYVIPEEPPAVVELVGWYIYGFCSYFITHLLLPVLFPAIITQVAFPNSDFTPDPKYTLKGVTCSVHEMSMYQRLTKHSIVIDGSRMSPLGWSGLSWAIGILIVAPLLTQTAHHLDRGQYQSLILIAATSFGSFFCLLTGFFKTVWVFLFYILFIAGSIIVAEAVHTRNLGLMIRGLAAHDSGKHLVLRRRAAASQLSLYCTAIGGIGAALMAAFMYHMLRRTDQLTGLWVVSIFCGLIWFIGICHGLFTNRPSSSSPTTAFEPNFFTKLSYSMTLLRYPQAIGSLVAVFLSSFATMCIFTSGTLYAIGGVCIKPVLVLALWILYFLFPLISLPLLHPIQIIIRADAVRMQLLGFIICLFVSGAGFYFKSHRWRAAHIIVIALVQSTANGILYAFGRILLLDASPPGKEGAFSVWYAFVRVTGAMIGFAASSAGPGRAGGSFAAAFLGSFLGIIVLIFGNVSNIGALKAAGHLKGMDDEKRMGGLGMEKGEGMGSAVADSGESRGRV

SEQ ID NO: 16936 - protein, 439 aa, Zea mays subsp. mays
  peptide (1)..(439): Ceres Seq. ID no. 12376869
MSMYQRLTKHSIVIDGSRMSPLGWSGLSWAIGILIVAPLLTQTAHHLDRGQYQSLILIAATSFGSFFCLLTGFFKTVWVFLFYILFIAGSIIVAEAVHTRNLGLMIRGLAAHDSGKHLVLRRRAAASQLSLYCTAIGGIGAALMAAFMYHMLRRTDQLTGLWVVSIFCGLIWFIGICHGLFTNRPSSSSPTTAFEPNFFTKLSYSMTLLRYPQAIGSLVAVFLSSFATMCIFTSGTLYAIGGVCIKPVLVLALWILYFLFPLISLPLLHPIQIIIRADAVRMQLLGFIICLFVSGAGFYFKSHRWRAAHIIVIALVQSTANGILYAFGRILLLDASPPGKEGAFSVWYAFVRVTGAMIGFAASSAGPGRAGGSFAAAFLGSFLGIIVLIFGNVSNIGALKAAGHLKGMDDEKRMGGLGMEKGEGMGSAVADSGESRGRV

SEQ ID NO: 16937 - DNA, 1650 bp, Zea mays subsp. mays
  misc_feature (1)..(1650): Ceres Seq. ID no. 12415075
  misc_feature (1)..(1650): Ortholog of  Ceres SEQ ID NO 15172476 as cited in SEQ ID NO 54945
  misc_feature (1)..(1650): Ortholog of  Ceres SEQ ID NO 13594213 as cited in SEQ ID NO 57038
  misc_feature (1)..(1650): Ortholog of  Ceres SEQ ID NO 13654989 as cited in SEQ ID NO 63117
  misc_feature (1)..(1650): Ortholog of  Ceres SEQ ID NO 12460981 as cited in SEQ ID NO 65146
  misc_feature (1)..(1650): Ortholog of  Ceres SEQ ID NO 13584744 as cited in SEQ ID NO 69137
catcctaatcgaaaagttttaggtagtagctagacgtacgtacgtactcacacgacgatgacgaaggcgtggaggccgatgctggcgtcggccaccaagtgctgcgcggcggaggacgcggcggtggcccccgacggcctggcgcggtgccggccgcagcagtcggagctctcgcggcggctggcgtccttcaggcgcctgtcgtcgctggccaacagcccggcgtcggcggcgggcacggacaaggacggcggcagcgtcaagcaggccggggagatggcgggcccgctgcagctgcactccttcggcctaggcgagctccgcggcgtcacgcacgacttcgccagcagcttcctgctcggggagggcggcttcggcgccgtgtacaagggcttcgtggacgccggcatgcgcccgggcctcgccgcccagcccgtcgccgtcaagcagctcaacgccgcgggcttccagggccaccgggagtggctcgccgaggtcatcttcctgggccagttccgccactcgcacctcgtccgcctgctggggtactgctgcgaggacgaggagcgcctgctcgtctacgagttcatgccgcgcgggagcctcgagaaccacctcttcaggaggatctcggcgacgctaccgtggggcacccggctcaaggtggccatcggcgccgccaagggtctggccttcctccacgccgcgagcacgcccgtcatctacagggacttcaaggcctccaacatcctactcgactcggacttcaccgccaagctgtcggacttcgggctggccaagatggggcccgagggcgaggacacgcacgtgacgacgcgcgtgatgggcacccacggctacgcggcgccggagtacgtgcagacgggccacctgaacgtgaagagcgacgtgtacagcttcggcgtcgtgctcctggagctcctnacggggcggcgcgccatggagcacgtncgcgggcgcagcgcgcacgccgaccagcagctgaaggctcgtggactggacccgnccctacctcagcggcggcagccgccgnctgcgctgcatcatggaccagaggctggcgggccactactccgtcaagggcgcgcgcnccgtggcgcagctggccgtgcagtgcaccgcgcagcagccgcgggacaggccgcgcatggtggctgtcgtcgacgcgctcgacaagctgcaggggctcaaggacatggccgtcaccgtcggcctntggcccgccaccgcgcccgtcgccgggcggaacgccatctccgccaagatccgcgcggaggtcaagggcgccgccggcgcagggtcgcgccggaggagcgcgtcctccaagctgccttagtaatcttgacggctggaccacctgcgtgccacgtcgtacatgtctcctagctagctcgtgtgtaccccgggtgtaggaatcctcttgtgtgttttgtgccacgtcgtcggtgtgtgtatatagtacatactactgtaccgtctagtttaggcgcgttgagattggtgaggcagagagatgttcctccatgcactcactagtacgtacgatccatacctattgctcctggattcatgagatcgttaatagaggtgatgtaaaactttgcaaagtacacatgaatttgaattttg

SEQ ID NO: 16938 - protein, 449 aa, Zea mays subsp. mays
  peptide (1)..(449): Ceres Seq. ID no. 12415076
  misc_feature (296)..(296): Xaa is any aa, unknown or other
  misc_feature (305)..(305): Xaa is any aa, unknown or other
  misc_feature (324)..(324): Xaa is any aa, unknown or other
  misc_feature (333)..(333): Xaa is any aa, unknown or other
  misc_feature (352)..(352): Xaa is any aa, unknown or other
  misc_feature (394)..(394): Xaa is any aa, unknown or other
MTKAWRPMLASATKCCAAEDAAVAPDGLARCRPQQSELSRRLASFRRLSSLANSPASAAGTDKDGGSVKQAGEMAGPLQLHSFGLGELRGVTHDFASSFLLGEGGFGAVYKGFVDAGMRPGLAAQPVAVKQLNAAGFQGHREWLAEVIFLGQFRHSHLVRLLGYCCEDEERLLVYEFMPRGSLENHLFRRISATLPWGTRLKVAIGAAKGLAFLHAASTPVIYRDFKASNILLDSDFTAKLSDFGLAKMGPEGEDTHVTTRVMGTHGYAAPEYVQTGHLNVKSDVYSFGVVLLELXTGRRAMEHXRGRSAHADQQLKARGLDPXLPQRRQPPXALHHGPEAGGPLLRQGRAXRGAAGRAVHRAAAAGQAAHGGCRRRARQAAGAQGHGRHRRPXARHRARRRAERHLRQDPRGGQGRRRRRVAPEERVLQAALVILTAGPPACHVVHVS

SEQ ID NO: 16939 - protein, 442 aa, Zea mays subsp. mays
  peptide (1)..(442): Ceres Seq. ID no. 12415077
  misc_feature (289)..(289): Xaa is any aa, unknown or other
  misc_feature (298)..(298): Xaa is any aa, unknown or other
  misc_feature (317)..(317): Xaa is any aa, unknown or other
  misc_feature (326)..(326): Xaa is any aa, unknown or other
  misc_feature (345)..(345): Xaa is any aa, unknown or other
  misc_feature (387)..(387): Xaa is any aa, unknown or other
MLASATKCCAAEDAAVAPDGLARCRPQQSELSRRLASFRRLSSLANSPASAAGTDKDGGSVKQAGEMAGPLQLHSFGLGELRGVTHDFASSFLLGEGGFGAVYKGFVDAGMRPGLAAQPVAVKQLNAAGFQGHREWLAEVIFLGQFRHSHLVRLLGYCCEDEERLLVYEFMPRGSLENHLFRRISATLPWGTRLKVAIGAAKGLAFLHAASTPVIYRDFKASNILLDSDFTAKLSDFGLAKMGPEGEDTHVTTRVMGTHGYAAPEYVQTGHLNVKSDVYSFGVVLLELXTGRRAMEHXRGRSAHADQQLKARGLDPXLPQRRQPPXALHHGPEAGGPLLRQGRAXRGAAGRAVHRAAAAGQAAHGGCRRRARQAAGAQGHGRHRRPXARHRARRRAERHLRQDPRGGQGRRRRRVAPEERVLQAALVILTAGPPACHVVHVS

SEQ ID NO: 16940 - protein, 376 aa, Zea mays subsp. mays
  peptide (1)..(376): Ceres Seq. ID no. 12415078
  misc_feature (223)..(223): Xaa is any aa, unknown or other
  misc_feature (232)..(232): Xaa is any aa, unknown or other
  misc_feature (251)..(251): Xaa is any aa, unknown or other
  misc_feature (260)..(260): Xaa is any aa, unknown or other
  misc_feature (279)..(279): Xaa is any aa, unknown or other
  misc_feature (321)..(321): Xaa is any aa, unknown or other
MAGPLQLHSFGLGELRGVTHDFASSFLLGEGGFGAVYKGFVDAGMRPGLAAQPVAVKQLNAAGFQGHREWLAEVIFLGQFRHSHLVRLLGYCCEDEERLLVYEFMPRGSLENHLFRRISATLPWGTRLKVAIGAAKGLAFLHAASTPVIYRDFKASNILLDSDFTAKLSDFGLAKMGPEGEDTHVTTRVMGTHGYAAPEYVQTGHLNVKSDVYSFGVVLLELXTGRRAMEHXRGRSAHADQQLKARGLDPXLPQRRQPPXALHHGPEAGGPLLRQGRAXRGAAGRAVHRAAAAGQAAHGGCRRRARQAAGAQGHGRHRRPXARHRARRRAERHLRQDPRGGQGRRRRRVAPEERVLQAALVILTAGPPACHVVHVS

SEQ ID NO: 16941 - DNA, 456 bp, Zea mays subsp. mays
  misc_feature (1)..(456): Ceres Seq. ID no. 1667754
  misc_feature (1)..(456): Ortholog of  Ceres SEQ ID NO 15177304 as cited in SEQ ID NO 52668
aagagcctcctacccatggtaatctattctaggatcttttactgaaaccaaacatacatgcagaacaaggcatatttctgtaaggtgaacccagacgaccttgtgtttggaggctgggacatcagcagcatgaacctggcagatgccatgaccagggccaaggtgctggacattgacctgcagaagcagctcaggccctacatggagtccatggtgccacttcccggtgtctatgatccggacttcatcgccgctaaccagggctctcgtgccaacaatgtcatcaagggcaccaagaaagaacaggtggagcagatcatcaaagatatcagggagtttaaggagaagaacaaagtggacaaggtagttgtgctgtggactgcaaacactgaaaggtacagcaatgtatgtgctggtctcaacgacacaatggagaatctgctggcatctgtggac

SEQ ID NO: 16942 - protein, 133 aa, Zea mays subsp. mays
  peptide (1)..(133): Ceres Seq. ID no. 1667755
MQNKAYFCKVNPDDLVFGGWDISSMNLADAMTRAKVLDIDLQKQLRPYMESMVPLPGVYDPDFIAANQGSRANNVIKGTKKEQVEQIIKDIREFKEKNKVDKVVVLWTANTERYSNVCAGLNDTMENLLASVD

SEQ ID NO: 16943 - protein, 109 aa, Zea mays subsp. mays
  peptide (1)..(109): Ceres Seq. ID no. 1667756
MNLADAMTRAKVLDIDLQKQLRPYMESMVPLPGVYDPDFIAANQGSRANNVIKGTKKEQVEQIIKDIREFKEKNKVDKVVVLWTANTERYSNVCAGLNDTMENLLASVD

SEQ ID NO: 16944 - protein, 103 aa, Zea mays subsp. mays
  peptide (1)..(103): Ceres Seq. ID no. 1667757
MTRAKVLDIDLQKQLRPYMESMVPLPGVYDPDFIAANQGSRANNVIKGTKKEQVEQIIKDIREFKEKNKVDKVVVLWTANTERYSNVCAGLNDTMENLLASVD

SEQ ID NO: 16945 - DNA, 1016 bp, Zea mays subsp. mays
  misc_feature (1)..(1016): Ceres Seq. ID no. 12355029
  misc_feature (1)..(1016): Ortholog of  Ceres SEQ ID NO 14305671 as cited in SEQ ID NO 57687
ctggtgttcttctataccacgcgtccacgccactgctaagctgctccccgttcgccaggtcggcgaccaggcgaaacgtgctgctgcaagaagaagaataggtacacagacagcatgtccggagttcaggcgatgccggcggccgtgggcgtggcggggctgagagggtcagggttggttagcagcagcagtaccggcttgttcgccggcgactgcaagaggaaggctcgtcgcccggcgtgctcggcctgggccctcaggcagagccggatcggcagcaggagcaggagcaagaggggcctcggcatcgtctgcaacctcgcgggacagtacgaggattccttcgacgacgtccagcggcaactgatgaactacttcacctacaaggccgtgaggaccgtgctgacccagctctacgagctgaacccgcccgagctaccgctggttctacaacttcgtcgctgtcaacaagcctaccgacggcaagcatttcctccgtgctctcgggcaaggagaggcaggagctcgcagagcgagtgatggtcaccaggcttcacctgtacgggaaatggataaagaaatgcgaccatgccaagacgtacgagaagatctccgacgagaacctggcgctgatgcgggagcggctgatggagacggtcatctggccgaccgacgacagcagcacggagaagatcggctgatgcctgatgcctgccgagtcctttcgggttgctgatcaagcttagctccttctattagcatgtagagcagcactctgggtttctctatcagtcagtcagtcagccagccagtcagtgggttgtatataatcggagttgtagtagacagtatacatttctctgggcaggcaatcactgtttgaggtgttaacagtgccgttttgccctcccaattaagcctctacagtcggtctaagtgaagcaaaaatgcttaccttgtagtagctaaatttacatgtgcggggatatacgttgtaatagaatatttctgcgccc

SEQ ID NO: 16946 - protein, 141 aa, Zea mays subsp. mays
  peptide (1)..(141): Ceres Seq. ID no. 12355030
MSGVQAMPAAVGVAGLRGSGLVSSSSTGLFAGDCKRKARRPACSAWALRQSRIGSRSRSKRGLGIVCNLAGQYEDSFDDVQRQLMNYFTYKAVRTVLTQLYELNPPELPLVLQLRRCQQAYRRQAFPPCSRARRGRSSQSE

SEQ ID NO: 16947 - protein, 135 aa, Zea mays subsp. mays
  peptide (1)..(135): Ceres Seq. ID no. 12355031
MPAAVGVAGLRGSGLVSSSSTGLFAGDCKRKARRPACSAWALRQSRIGSRSRSKRGLGIVCNLAGQYEDSFDDVQRQLMNYFTYKAVRTVLTQLYELNPPELPLVLQLRRCQQAYRRQAFPPCSRARRGRSSQSE

SEQ ID NO: 16948 - DNA, 1830 bp, Zea mays subsp. mays
  misc_feature (1)..(1830): Ceres Seq. ID no. 12390089
  misc_feature (1)..(1830): Ortholog of  Ceres SEQ ID NO 14310998 as cited in SEQ ID NO 53411
gcacgagaccattacctagaacatcctaatcgaaaaactgtctcgtcggctcgtcgctccgtagaccccgcgcctccgcctccccgccactcgccggaggctgccgccatcgttatgccatggccgtcatcctctcctccgcggcgccaacgatactgactcgtcccacgcgccctcggaggcagccgaggagcggcctccgcgggggcctcgcgcgcctctcagctgcgctcggcctcgcgcacgcgggcgccggcgccggcgccgcactcgccgcgccgctctcctacgaggagatgctgcgcctctcgtccgactccggcggtgatgttggcgggttcgcgctcccggagctcggcctcgacgggctcgttgacttcgtcaacgataaccctctcgtcgtcgcggcaggcgtcgcggccatcgcagtgccgcttctccttgcgcagcttctcggcggaggcggcagctccaagcccctactccgtcctgtccgccaaggcggcctaccagcggctgctcgaggagcccgacgcgcagctcgtcgacatcaggccgctcaaggatgcacgagaggccggcacgcctgatctcaaggaggctaagaagaaggctgctgccgtaccttacaacggggaggacaaaaacggattcttgaaaaagttgacactaaagttcaaggacccggagaacaccacgctgatcatccttgacaaatttgatgggaactccgaactagttgctgagcttgtgacagccaatggttacaaagctgcttttgcagtgaaggatggtgcagaaggaagccgaggatggaagagcagtaaccttccctggaaggctccgccaaaaggattcagctttgacttgggcgaattatttggggatggttcagatggtttgcctgtgacaattggtctcgctgcagctactggtttgggagtacttgcctacacagagattgaaactttgctacagtttttggggtcagctgctgttgttcagctagtggtaaccaaactcttgtatgccgaggatcgacaaaagacacttaaacagatcgatgagttctttaacaagaaggttgctccgaaggagcttattgacgaaataaaggaaatcgggcaggctctactacctttacctggcgatgctaaaagccaaccagcactagcaacagcgactcaagttgctgccacacaaacagctgcaccagcagaggacgctaccgcagaagccaccacggaatcagatcctgcaacgccaacacctctttcaccttatacaaattacccagatctcaagccgccatcaacccctacgccaccgtcagtggagtctgaagtcgagacgaaggctagcagcaccgtgactgaaggaccagcagtggtcaattctgcacctatagcagacgctgccacgggatcatctcctgccactactaggcccagacctcagtcaccataccctaattatccagatttcaagccaccatcctcgccttcaccgtcagcaccttaatttggcaagagtacaagaaaccgggtctagaggatattaaagaagttgagttgttcatatggagccggcatctcactagaggtgtatgttgtactatgagcgtgacagtgtggctaagtcactgtggcgagttttctgcagcagtaaatatatgatgtaatgttcattagttatcaatgtgctatgattttctttttgttgtcttattttcgatacatgtaaatgtcgaataactagccgtgagaattgagagttcaagcctatagagcttgatatgtttgatcaaagtaaatgtatcttcttaaaaac

SEQ ID NO: 16949 - protein, 397 aa, Zea mays subsp. mays
  peptide (1)..(397): Ceres Seq. ID no. 12390090
MLAGSRSRSSASTGSLTSSTITLSSSRQASRPSQCRFSLRSFSAEAAAPSPYSVLSAKAAYQRLLEEPDAQLVDIRPLKDAREAGTPDLKEAKKKAAAVPYNGEDKNGFLKKLTLKFKDPENTTLIILDKFDGNSELVAELVTANGYKAAFAVKDGAEGSRGWKSSNLPWKAPPKGFSFDLGELFGDGSDGLPVTIGLAAATGLGVLAYTEIETLLQFLGSAAVVQLVVTKLLYAEDRQKTLKQIDEFFNKKVAPKELIDEIKEIGQALLPLPGDAKSQPALATATQVAATQTAAPAEDATAEATTESDPATPTPLSPYTNYPDLKPPSTPTPPSVESEVETKASSTVTEGPAVVNSAPIADAATGSSPATTRPRPQSPYPNYPDFKPPSSPSPSAP

SEQ ID NO: 16950 - DNA, 876 bp, Zea mays subsp. mays
  misc_feature (1)..(876): Ceres Seq. ID no. 12375045
  misc_feature (1)..(876): Ortholog of  Ceres SEQ ID NO 12611884 as cited in SEQ ID NO 51018
  misc_feature (1)..(876): Ortholog of  Ceres SEQ ID NO 15177083 as cited in SEQ ID NO 51917
  misc_feature (1)..(876): Ortholog of  Ceres SEQ ID NO 12609839 as cited in SEQ ID NO 52022
  misc_feature (1)..(876): Ortholog of  Ceres SEQ ID NO 13638931 as cited in SEQ ID NO 52200
  misc_feature (1)..(876): Ortholog of  Ceres SEQ ID NO 13638885 as cited in SEQ ID NO 55803
  misc_feature (1)..(876): Ortholog of  Ceres SEQ ID NO 12587429 as cited in SEQ ID NO 63113
  misc_feature (1)..(876): Ortholog of  Ceres SEQ ID NO 12615635 as cited in SEQ ID NO 63133
  misc_feature (1)..(876): Ortholog of  Ceres SEQ ID NO 12586351 as cited in SEQ ID NO 64028
  misc_feature (1)..(876): Ortholog of  Ceres SEQ ID NO 13654441 as cited in SEQ ID NO 67814
aatacgctattcttgctaatcttcaagcaggagagaaaaaagcataagctgagcatccatcaatggcggatgctggcaacgaggccgagggtctgacgctgttgggcctgcacgtgagccccttcgcgttgcgcgtgcgcatggcgctgagcctcaagggcctgagctacgagtacatcgagcaggacctgttccacaagggcgagctcctcctcagctcaaaccccgtgcacaagaaggtgcccgtgctcatccaccacggcaagcccatctgcgagtccctcgccgtcgtggagtacgtcgatgaggtctggcccggcgccgccgccaccatcctccccgccgacccccacggtcgcgccaccgctcgcttctgggccgcctacatcgacggcaagctgtttccggcgtggacagggatcatgaaggcggcgacggaggaagcgagggcggataagctgagggagacgcacgccgcggtcctcaacctggagaaggccttcgccgagatcagctctagctccagcaacgacggcgcggccttcttcggcggcgactccgtcgggtacctggacctcgcgctcgggtgctccctgccgtggttcggggcgctgcgcgccatgctcggcgtcgagatcatcgacgccgcccaggctccgctcctggtggcgtgggccgagcgatttggggagaccccggtggccaaggaggtgctgccgcagccggacgaggctgtggcctacgccaagaagattcaggcctactgggcttctgctaagaactgatgagcaccgaatcctgtcatgatgaaattgaagcagcaatacttgtataacactccaatcatggtgaataaaggcctctaaactgttggtt

SEQ ID NO: 16951 - protein, 240 aa, Zea mays subsp. mays
  peptide (1)..(240): Ceres Seq. ID no. 12375046
MADAGNEAEGLTLLGLHVSPFALRVRMALSLKGLSYEYIEQDLFHKGELLLSSNPVHKKVPVLIHHGKPICESLAVVEYVDEVWPGAAATILPADPHGRATARFWAAYIDGKLFPAWTGIMKAATEEARADKLRETHAAVLNLEKAFAEISSSSSNDGAAFFGGDSVGYLDLALGCSLPWFGALRAMLGVEIIDAAQAPLLVAWAERFGETPVAKEVLPQPDEAVAYAKKIQAYWASAKN

SEQ ID NO: 16952 - protein, 214 aa, Zea mays subsp. mays
  peptide (1)..(214): Ceres Seq. ID no. 12375047
MALSLKGLSYEYIEQDLFHKGELLLSSNPVHKKVPVLIHHGKPICESLAVVEYVDEVWPGAAATILPADPHGRATARFWAAYIDGKLFPAWTGIMKAATEEARADKLRETHAAVLNLEKAFAEISSSSSNDGAAFFGGDSVGYLDLALGCSLPWFGALRAMLGVEIIDAAQAPLLVAWAERFGETPVAKEVLPQPDEAVAYAKKIQAYWASAKN

SEQ ID NO: 16953 - protein, 120 aa, Zea mays subsp. mays
  peptide (1)..(120): Ceres Seq. ID no. 12375048
MKAATEEARADKLRETHAAVLNLEKAFAEISSSSSNDGAAFFGGDSVGYLDLALGCSLPWFGALRAMLGVEIIDAAQAPLLVAWAERFGETPVAKEVLPQPDEAVAYAKKIQAYWASAKN

SEQ ID NO: 16954 - DNA, 1562 bp, Zea mays subsp. mays
  misc_feature (1)..(1562): Ceres Seq. ID no. 12364256
  misc_feature (1)..(1562): Ortholog of  Ceres SEQ ID NO 13594671 as cited in SEQ ID NO 51800
gcacgagaccattacctagaacatcctaatcaaaaaccccactcgaaacaaatcccctcgtcatcgtccccaccgaaaccgcagtaccaccatacccgcgccgacgtgagtacgatggcctcctacttcgccggtccggccatcgtgccgtcgcagcacgccaccgcggcgcccgacaattccgcggtcgccaccccttctccggttaagtcgcgtgacccccgcttctccggatccgcctccaccaccgttcgtcacatcgcccgctccttcgccgccgccgaagccaccggtgatggcgaccttgtcatccctatcgacggcgtcgacgccaccaacgtttggattctggggagggtggtgagcgtggtgaacatggaggccagcgtgtcgttcacgctcgacgacggcaccgggaagatcgcgctcacgcggtggatcgctgaagatattgatgctaaggaagtggctttcgtccagaatggtatatacctcaaggttcaagttactctcgtagggtttcaaactaagcagtatggttttgctcgcgctattcggcctgttaccaatttcaatgaagtggcgctgcacttcattgattgtatttatttgcatttggaaaatgtacggcaaaagatgcaaggtcaattccctcgctccattcaagcaaatgtgtctacttatgagatgcaagctcaagttgctcacagtgttcaaacaaaatcacctgctcatatccccttttctggtggagctagagatcatcaagttgattttgctcctgaagtaaaccatgggcgattcccttcatcagttcaaacaaacacacctactcatgtacccttttctggtggagctagggaacagcaagttcactttactcctcaaccaaatcaattttcagcttacccaggtacaggtggtcatcagcacgatctgcagagtatggttttggaggttatgcaacgaccagatatacttgcacttgaaaatggagtacatgttgatgaagtggcaaggagacttggaatgccaagcgcacaaattatggtcaccgcccggcgtcttgtcaatttggcatgcctctgttccactattgatgattatcatttcaagtctattaaatgattgaccaatgttatcatcttcaagacttggcattttagattattggcagtttttaggtactgaatagcattcgcgtatatgctttaagtatgcacatctagtacatgcatttttctttgtacagagcactgaacacctgtttttagttgccaagctagttactcagattgtcagacatgcagatcggttagaaacttagaatgtcaaaccattggcatgctgcagttgctggatggatctgcttagtactgtttacttgtttactagaatgtcaaaccattgccaagcaagttactcatccatttcttttcatgcttccttccggttgtcatgcttgatcatcttttctaggcccctttttatttttttctcgaaaggcgtaggaaaactgcacccccatatattaagaagaatgaaagaaggttatgcttatg

SEQ ID NO: 16955 - protein, 375 aa, Zea mays subsp. mays
  peptide (1)..(375): Ceres Seq. ID no. 12364257
ARDHYLEHPNQKPHSKQIPSSSSPPKPQYHHTRADVSTMASYFAGPAIVPSQHATAAPDNSAVATPSPVKSRDPRFSGSASTTVRHIARSFAAAEATGDGDLVIPIDGVDATNVWILGRVVSVVNMEASVSFTLDDGTGKIALTRWIAEDIDAKEVAFVQNGIYLKVQVTLVGFQTKQYGFARAIRPVTNFNEVALHFIDCIYLHLENVRQKMQGQFPRSIQANVSTYEMQAQVAHSVQTKSPAHIPFSGGARDHQVDFAPEVNHGRFPSSVQTNTPTHVPFSGGAREQQVHFTPQPNQFSAYPGTGGHQHDLQSMVLEVMQRPDILALENGVHVDEVARRLGMPSAQIMVTARRLVNLACLCSTIDDYHFKSIK

SEQ ID NO: 16956 - protein, 337 aa, Zea mays subsp. mays
  peptide (1)..(337): Ceres Seq. ID no. 12364258
MASYFAGPAIVPSQHATAAPDNSAVATPSPVKSRDPRFSGSASTTVRHIARSFAAAEATGDGDLVIPIDGVDATNVWILGRVVSVVNMEASVSFTLDDGTGKIALTRWIAEDIDAKEVAFVQNGIYLKVQVTLVGFQTKQYGFARAIRPVTNFNEVALHFIDCIYLHLENVRQKMQGQFPRSIQANVSTYEMQAQVAHSVQTKSPAHIPFSGGARDHQVDFAPEVNHGRFPSSVQTNTPTHVPFSGGAREQQVHFTPQPNQFSAYPGTGGHQHDLQSMVLEVMQRPDILALENGVHVDEVARRLGMPSAQIMVTARRLVNLACLCSTIDDYHFKSIK

SEQ ID NO: 16957 - protein, 250 aa, Zea mays subsp. mays
  peptide (1)..(250): Ceres Seq. ID no. 12364259
MEASVSFTLDDGTGKIALTRWIAEDIDAKEVAFVQNGIYLKVQVTLVGFQTKQYGFARAIRPVTNFNEVALHFIDCIYLHLENVRQKMQGQFPRSIQANVSTYEMQAQVAHSVQTKSPAHIPFSGGARDHQVDFAPEVNHGRFPSSVQTNTPTHVPFSGGAREQQVHFTPQPNQFSAYPGTGGHQHDLQSMVLEVMQRPDILALENGVHVDEVARRLGMPSAQIMVTARRLVNLACLCSTIDDYHFKSIK

SEQ ID NO: 16958 - DNA, 848 bp, Zea mays subsp. mays
  misc_feature (1)..(848): Ceres Seq. ID no. 12374850
  misc_feature (1)..(848): Ortholog of  Ceres SEQ ID NO 12624019 as cited in SEQ ID NO 61713
gcccgtgccccacttcatccgcgcgcgcgtcagagactcagagcccaagcatagacgtgcgccttcagcagcgcgcagcgacgtcacctgagcgcgcgacacgccccagcgtccacagttcactgcgcgcgcgtcgtgcaggacaccacaccatggcacctgccgcccctgctgccacgggcgcggcgagccccgccgtcaccaagggcggcggcaaggttgcagcacgctccgtcaggctggggctgcccgcgctgccgccgctgcccggcctcagcctcgccgcgcagggccagacccgggccgcgtcgtccttgtacaagcggctggcgagggacgtggtggccatggccgcgggggagccgcggcgcctcaggctgccaacgaggagctgaccgagttcgtcgacgcgttgaaaaaggagtgggacaggatcgaggacaagtacgcggtgaccacgctcgccgtcgccgccacgcttggcatgtggagcgccggtggagtagtgtcggcaatcgataggctccccgtggttcctggtctgatgcaggccgttggaattggatacagcgggtggttcgcgtaccgaaacctgctattcaagcctgacagggatgctttctttgcgaaggtcagggagatctacgaggatattatcagcgcttaacagatgggagcaccaatgcaaagctcatccaaattaatgaagttcactttaagacatccttctagtttgctgctgttcagttgtttttgctgtgatgtatttcagtgtagcttctaatttggtccttactcagtgcacgtatggataagtaatttggacgttaaatttagttttctggccc

SEQ ID NO: 16959 - protein, 130 aa, Zea mays subsp. mays
  peptide (1)..(130): Ceres Seq. ID no. 12374851
PCPTSSARASETQSPSIDVRLQQRAATSPERATRPSVHSSLRARRAGHHTMAPAAPAATGAASPAVTKGGGKVAARSVRLGLPALPPLPGLSLAAQGQTRAASSLYKRLARDVVAMAAGEPRRLRLPTRS

SEQ ID NO: 16960 - protein, 80 aa, Zea mays subsp. mays
  peptide (1)..(80): Ceres Seq. ID no. 12374852
MAPAAPAATGAASPAVTKGGGKVAARSVRLGLPALPPLPGLSLAAQGQTRAASSLYKRLARDVVAMAAGEPRRLRLPTRS

SEQ ID NO: 16961 - DNA, 1213 bp, Zea mays subsp. mays
  misc_feature (1)..(1213): Ceres Seq. ID no. 15175531
  misc_feature (1)..(1213): Ortholog of  Ceres SEQ ID NO 13594482 as cited in SEQ ID NO 51285
  misc_feature (1)..(1213): Ortholog of  Ceres SEQ ID NO 13655381 as cited in SEQ ID NO 63359
aaccaaccaaaatcgtggctgcggctgtggacaatcggcagcttgcgagtagctccggtacggaggggatcatggaggaggggcggcaactggaagcggcggcgttcggttttccggcgccggtgcagccgggggccacgcgcgtggggtggatcggcatcggcgtcatgggcggcgccatggccaagcgcctcctcgcggcagggtacgcggtcaccgcgtacgctcgcacgccgtccagggcggagagcctcgtcgcggcgggcgcgagcctcgcggactcgccggccgccgtggccgccgcgtccgacgtggtgttcaccatggtcgggaaccccggcgacgtccgcgcggtggtcctggacccggccgccggggccctcgcgggcctccgccgcggcggcgtgctggtggactgcacgagctcctccccgtccctcgcgcgcgaggtcgccgcggccgcggccgcgggcgggctgccacgccgtcgacgcgccggtctccggaggcgacgtgggcgcgcgggacggcacgctggccgtcttcgccggcggcgacgaggccgtcgtcgcctggctcgcgccgctcttcgccagcctcggcagggcgacccgcatgggcgcgccgggcagcggccagagcagcaagatcgccaaccaggtcgcggtggccggcgcggtggtgggcctcggcgaggccgtgtccttcgcccgcgcggcggggctcgacgcgccgctgttcctcggcgcggtgtccaggggcgcggcctggtcgcgcgtcatggacgtcttcggcggccgcttgctccgccgcgagttcgcgtccgggggcagcgtacggtacatcgtcaaggacctcggcatggcgctggaggtcggagacggcggggaggaggaggtcaacgtgctgcctggagcggcgctgtaccggcagatgttctcggccatggtggccaatggcgacgcggacctgagcttgcagggactgatcaccgttatcgagcgcctgaacggcattgcaaagtagcgaaggctgcagcaggcaaggtgctgcttttttgttgatggagactgcaggaaaggtgttcgccggaatgcaacactggacccgaagacgcctgagcttgtgacatggacttgttttttgtattcaaaacactgtttcgagcttgatttgcgtttgtaatttcgcccctaaataaaactttgcttcc

SEQ ID NO: 16962 - protein, 353 aa, Zea mays subsp. mays
  peptide (1)..(353): Ceres Seq. ID no. 15175532
PTKIVAAAVDNRQLASSSGTEGIMEEGRQLEAAAFGFPAPVQPGATRVGWIGIGVMGGAMAKRLLAAGYAVTAYARTPSRAESLVAAGASLADSPAAVAAASDVVFTMVGNPGDVRAVVLDPAAGALAGLRRGGVLVDCTSSSPSLAREVAAAAAAGGLPRRRRAGLRRRRGRAGRHAGRLRRRRRGRRRLARAALRQPRQGDPHGRAGQRPEQQDRQPGRGGRRGGGPRRGRVLRPRGGARRAAVPRRGVQGRGLVARHGRLRRPLAPPRVRVRGQRTVHRQGPRHGAGGRRRRGGGGQRAAWSGAVPADVLGHGGQWRRGPELAGTDHRYRAPERHCKVAKAAAGKVLLFC

SEQ ID NO: 16963 - protein, 341 aa, Zea mays subsp. mays
  peptide (1)..(341): Ceres Seq. ID no. 15175533
NQPKSWLRLWTIGSLRVAPVRRGSWRRGGNWKRRRSVFRRRCSRGPRAWGGSASASWAAPWPSASSRQGTRSPRTLARRPGRRASSRRARASRTRRPPWPPRPTWCSPWSGTPATSARWSWTRPPGPSRASAAAACWWTARAPPRPSRARSPRPRPRAGCHAVDAPVSGGDVGARDGTLAVFAGGDEAVVAWLAPLFASLGRATRMGAPGSGQSSKIANQVAVAGAVVGLGEAVSFARAAGLDAPLFLGAVSRGAAWSRVMDVFGGRLLRREFASGGSVRYIVKDLGMALEVGDGGEEEVNVLPGAALYRQMFSAMVANGDADLSLQGLITVIERLNGIAK

SEQ ID NO: 16964 - protein, 330 aa, Zea mays subsp. mays
  peptide (1)..(330): Ceres Seq. ID no. 15175534
MEEGRQLEAAAFGFPAPVQPGATRVGWIGIGVMGGAMAKRLLAAGYAVTAYARTPSRAESLVAAGASLADSPAAVAAASDVVFTMVGNPGDVRAVVLDPAAGALAGLRRGGVLVDCTSSSPSLAREVAAAAAAGGLPRRRRAGLRRRRGRAGRHAGRLRRRRRGRRRLARAALRQPRQGDPHGRAGQRPEQQDRQPGRGGRRGGGPRRGRVLRPRGGARRAAVPRRGVQGRGLVARHGRLRRPLAPPRVRVRGQRTVHRQGPRHGAGGRRRRGGGGQRAAWSGAVPADVLGHGGQWRRGPELAGTDHRYRAPERHCKVAKAAAGKVLLFC

SEQ ID NO: 16965 - DNA, 743 bp, Zea mays subsp. mays
  misc_feature (1)..(743): Ceres Seq. ID no. 14301971
  misc_feature (1)..(743): Ortholog of  Ceres SEQ ID NO 15171293 as cited in SEQ ID NO 51744
aaggtttaatgtcattagacgactttgacgatgctgaaggcggctccaagctggaacgattctcacgggagacgctggatccatcattgtcatggaaggacgtggagtggctcaagtccatcaccagcctgccgattctgctcaagggcatcgtcaccgcggaagacgcgaggaaggccgtggaggcgtgggcggccggcttgatcgtgtccaaccacggcgcccggcagctggactatgcgccggccaccatctcggcgctcgaagaggtggttaaggcggtggcgggggctgtgccggtgctggtggacggcggcgtccggcgcggcaccgacgtgttgaaggcgctggcgctcggcgccaaggcagtcatggtgggcaggccggtgttctttgggctggcggcgcgcggggaagccggcgcgaggcacgtgatcgagatgttgaacaaggagctggagttggccatggcgctctgcggctgccgtagcgtcgcggaggtcaccagggcgcacgtccagaccgagggcgaccggatcagggccctgctgtgacttataaataagcgaccatatccgaggccgaccaccgtgctgtctgggttgcgatatgatttatatgatacgtgagggcatgtgatcgattgttgcctccacacagataagcttactattgccagagcctgggctggactatgctttcagtgattatctaaatcaaatagactgaatgctaaagggaac

SEQ ID NO: 16966 - protein, 183 aa, Zea mays subsp. mays
  peptide (1)..(183): Ceres Seq. ID no. 14301972
GLMSLDDFDDAEGGSKLERFSRETLDPSLSWKDVEWLKSITSLPILLKGIVTAEDARKAVEAWAAGLIVSNHGARQLDYAPATISALEEVVKAVAGAVPVLVDGGVRRGTDVLKALALGAKAVMVGRPVFFGLAARGEAGARHVIEMLNKELELAMALCGCRSVAEVTRAHVQTEGDRIRALL

SEQ ID NO: 16967 - protein, 181 aa, Zea mays subsp. mays
  peptide (1)..(181): Ceres Seq. ID no. 14301973
MSLDDFDDAEGGSKLERFSRETLDPSLSWKDVEWLKSITSLPILLKGIVTAEDARKAVEAWAAGLIVSNHGARQLDYAPATISALEEVVKAVAGAVPVLVDGGVRRGTDVLKALALGAKAVMVGRPVFFGLAARGEAGARHVIEMLNKELELAMALCGCRSVAEVTRAHVQTEGDRIRALL

SEQ ID NO: 16968 - DNA, 1005 bp, Zea mays subsp. mays
  misc_feature (1)..(1005): Ceres Seq. ID no. 12354677
  misc_feature (1)..(1005): Ortholog of  Ceres SEQ ID NO 15173410 as cited in SEQ ID NO 61812
ataggtagctcactgtactgtaccctagctagctagtcgcttccagtccagagcgtcccgagaccaatggcctgccacaccgtcatcccgcttcttctcttcctcccttccctcttggcagcggctgcggacgacgtcgcccctgctcctgctcctgccccggcggcaccacccgagcccaccaacaacaacctgaccagcatcctggaaaatggcgggcagtacaccactctgctccgcctcctgaacgccacccggataacggaacagatcagcagccaactcaagaactcgtacgacggcctgaccttcttcgcgcccaacgacaacgccttcgccaagctcaaggccgccggcacgctcaacgccctcgcagaccaagaccagatccagctgctgctctaccacgtcctgccccgctactacagcctcgccacgttccagacggccagcaacccgctgcacaccgaggcgtcgggcccctccggcatgtacagtgtcaacgtcaccgccagcaccacgaaccccctggtgaacctttccactggcgtcgtcgacgtgcccatcagcagcacgctgttcgctcgcttcccgttcgccgtctactccgtcgacagcgtgctgctgcccccgcagctattccacacggcttcttctgcgccggcaccaggacagtctgcagaggcgccggtgcctggaaaggcggcaccagggcacaaggggggcgtcccaaagagcggcgacgatgtggcagcgcagccgtccgctgcggtggatggggcacaagacaccagtgtcgccgcggatggtagagggagcgcggcgtggatgacgccggtggttgttttgggtggcatggccctactgctttgcgcgtgagcagtgtgtgcttcgttctgttttgttttccttggcatctctctgatttctctctcgtggccggtttgtatgtactgcccttaaaaatgtaattctgcatttatgataacgatgatacgatggtcc

SEQ ID NO: 16969 - protein, 270 aa, Zea mays subsp. mays
  peptide (1)..(270): Ceres Seq. ID no. 12354678
MACHTVIPLLLFLPSLLAAAADDVAPAPAPAPAAPPEPTNNNLTSILENGGQYTTLLRLLNATRITEQISSQLKNSYDGLTFFAPNDNAFAKLKAAGTLNALADQDQIQLLLYHVLPRYYSLATFQTASNPLHTEASGPSGMYSVNVTASTTNPLVNLSTGVVDVPISSTLFARFPFAVYSVDSVLLPPQLFHTASSAPAPGQSAEAPVPGKAAPGHKGGVPKSGDDVAAQPSAAVDGAQDTSVAADGRGSAAWMTPVVVLGGMALLLCA

SEQ ID NO: 16970 - DNA, 1591 bp, Zea mays subsp. mays
  misc_feature (1)..(1591): Ceres Seq. ID no. 12374664
  misc_feature (1)..(1591): Ortholog of  Ceres SEQ ID NO 13662197 as cited in SEQ ID NO 63622
aaacgctcaacttgaaagtcacaggacagcacacaccccacccacaactaccaaccttctccggaaggccaaatccccccgggccaagggaaacgagggagagagaccctccgcccctctcctctccctctccttccggtgaggcggtgagctatggagtcggcagcggccgcgaagacggtggagcggctggcgcagcgcctggtgccgccggcggagcccacccccactgccccccaccgcctgtcgtggctggaccggtacccgacgcagatggcgctcatcgagtcgctgcacgtcttcaagcccgacccggcgcgtgacgggctcagccccgcggagaccatagagcgggccctcgcacgggcgctggtcgactactacccgctcgccggccgcctcgccgtgtccgagagcgccgggggcctgcacgtcgactgcagcgctgagggcgtctggttcatcgaggccgccgtacggtgccgccttgaggacgtcgactacctcgagtacccgctccagatccccaaggacgagctgctcccgcacccgctgccgaggcccagccacgaggaggagagcaagctcatcctgctcgtccaggtgacggcgttcgcgtgcggcggcttcgtggtgggcttccgcttcagccacgcggtggcggacgggctcggcgcggccaagttcatgggcgcggtgggggagctggcgcgcggggcggaccaggtgtccgtggcgcccacctgggcccgcgacgccatcccagacccgtcgggcgcgctggtcggcagcctccccgagcccacgggcgccaagcgcctcgagtacctggccatcgacatctccgccgactacatcgaccacttcaagtcccagttcgccgcggccacgggcgggggccgctgctcggccttcgaggtcctcatcgccaaggcgtggcagagccgcacccgcgccgcggggttcgaggaccccgacacccccgtgcagctctgcttcgccatgaacgcgcgcccgctcctcggcgcccgcctcccgcggggcggcgccggcttctacggcaactgctactacatcatgcgcgtggcgtccacggccgacaaggtgtcctcgtcgtccgtcaccgacgtggtgaagatcatcagggaggggaagaagcggctgccattggagtttgcgcggtgggcggcgggggaggagggcgccgacggcgtggacccctaccagatcacctccgactaccggacgctgctggtgtcggattggacgcgcctcggcttcgcggaggtggactacgggtggggcccgccagcccacgtggtaccgctgacgaacctggactacatcgccacgtgcatcctcgtcaagccatgggcccacaagccaggggcgaggctcatcacgcagtgcgtgacgcccgaccgcgtctcgcgcttccacgacgccatggtggacatgaactagcgccccgcctcgtcctgcgttcaccacggcctcccgtttgttcatgggtttcttgttttttttcctcctctcagttactgtggtaattattagttggtattataattactaatcacattgctgcctc

SEQ ID NO: 16971 - protein, 436 aa, Zea mays subsp. mays
  peptide (1)..(436): Ceres Seq. ID no. 12374665
MESAAAAKTVERLAQRLVPPAEPTPTAPHRLSWLDRYPTQMALIESLHVFKPDPARDGLSPAETIERALARALVDYYPLAGRLAVSESAGGLHVDCSAEGVWFIEAAVRCRLEDVDYLEYPLQIPKDELLPHPLPRPSHEEESKLILLVQVTAFACGGFVVGFRFSHAVADGLGAAKFMGAVGELARGADQVSVAPTWARDAIPDPSGALVGSLPEPTGAKRLEYLAIDISADYIDHFKSQFAAATGGGRCSAFEVLIAKAWQSRTRAAGFEDPDTPVQLCFAMNARPLLGARLPRGGAGFYGNCYYIMRVASTADKVSSSSVTDVVKIIREGKKRLPLEFARWAAGEEGADGVDPYQITSDYRTLLVSDWTRLGFAEVDYGWGPPAHVVPLTNLDYIATCILVKPWAHKPGARLITQCVTPDRVSRFHDAMVDMN

SEQ ID NO: 16972 - protein, 396 aa, Zea mays subsp. mays
  peptide (1)..(396): Ceres Seq. ID no. 12374666
MALIESLHVFKPDPARDGLSPAETIERALARALVDYYPLAGRLAVSESAGGLHVDCSAEGVWFIEAAVRCRLEDVDYLEYPLQIPKDELLPHPLPRPSHEEESKLILLVQVTAFACGGFVVGFRFSHAVADGLGAAKFMGAVGELARGADQVSVAPTWARDAIPDPSGALVGSLPEPTGAKRLEYLAIDISADYIDHFKSQFAAATGGGRCSAFEVLIAKAWQSRTRAAGFEDPDTPVQLCFAMNARPLLGARLPRGGAGFYGNCYYIMRVASTADKVSSSSVTDVVKIIREGKKRLPLEFARWAAGEEGADGVDPYQITSDYRTLLVSDWTRLGFAEVDYGWGPPAHVVPLTNLDYIATCILVKPWAHKPGARLITQCVTPDRVSRFHDAMVDMN

SEQ ID NO: 16973 - protein, 258 aa, Zea mays subsp. mays
  peptide (1)..(258): Ceres Seq. ID no. 12374667
MGAVGELARGADQVSVAPTWARDAIPDPSGALVGSLPEPTGAKRLEYLAIDISADYIDHFKSQFAAATGGGRCSAFEVLIAKAWQSRTRAAGFEDPDTPVQLCFAMNARPLLGARLPRGGAGFYGNCYYIMRVASTADKVSSSSVTDVVKIIREGKKRLPLEFARWAAGEEGADGVDPYQITSDYRTLLVSDWTRLGFAEVDYGWGPPAHVVPLTNLDYIATCILVKPWAHKPGARLITQCVTPDRVSRFHDAMVDMN

SEQ ID NO: 16974 - DNA, 1486 bp, Zea mays subsp. mays
  misc_feature (1)..(1486): Ceres Seq. ID no. 12435191
  misc_feature (1)..(1486): Ortholog of  Ceres SEQ ID NO 13663426 as cited in SEQ ID NO 66312
aagggcgaggaaaactgaaagcctacgaaaatggtggagctcacctccttatccccagggccaccacgtccttctccgtttactcctcggcgccggccgccgccgacaccacatgtccgtacctcctcgcgtcgtcgcgggaggatcctcggcgccgcgaccgccacgcctggcgccgacgactaccactccaccatccgctccctcaactcccgcggccgccacgtcccccgaaaatccctcgggcagaactacacgctcaactccaaggtgaacgaggagctggtggcggcggcgggggtggaggacggtgacgtcgtgctcgagatcggcccaggcaccggctcgctcacttccgcgctgctccaggccggcgctaccgtatttgccgtcgagaaggacaagcatatggctactcttgttaaagataggtttggatctacagaacagttgaaggtcattgaagaagacatcacaaaatttcacatccgttcccattttcttcctttcatgaaggagaaatacggtgccaccaaaaaacttgcaaaggttgcatcaaacttaccattcaatgtcagcaccgaagttgtcaaactactactcccaatgggggatgttttctctgtcgtggtgctcatgcttcaggatgaaacagcagtacgctttgcagatgcttcaatacaaagtccagagtaccgatctatcaatgtgtttgtggatttttactcggaacctgaatacaagttcagagtagacagagagaattttttccctcggcctaaggttgatggtgctgttatcagcttcaaactaaagaatgcggaggagtatccgccagttagttccccaaaaagcttcttttcaatggtgaattccgctttcatggggaagcgcaagatgcttaggaaatctcttcagcacatatgctcttcttctgacattgaggctgctcttgacaacattggccttccagttacagctagaccttctgatctgattttggatgatttcgtgagattgcacaatcatttagcgaaagtatgactaagaagtgcctttcaaaatgcctaaggaattgcttgttggcatggtgttcaacagttggagtaacttacgcctgaccgcctgagagttgctatgcagctacaggtgccttcagctcagctccggggcgaagccaggaattacatgtagggaagccggccgaaagagccatcttgtaaaaaatgatcgcggttcaactggtttggttactcgcacttatcgtctgtctgagttaatacttgacaaaaaaaaaaacacagctcaactggttaggtttctcgtagtggtggtggtcgttcggggtttattatagatagtgagggtttattgtattttgatcgtagacgctaatcataaactgtaatgaatggacgccttcgttctctctgagtacaaaggccccattgaaatatgtatgagaaacaaagcaaatttagagggc

SEQ ID NO: 16975 - protein, 337 aa, Zea mays subsp. mays
  peptide (1)..(337): Ceres Seq. ID no. 12435192
MVELTSLSPGPPRPSPFTPRRRPPPTPHVRTSSRRRGRILGAATATPGADDYHSTIRSLNSRGRHVPRKSLGQNYTLNSKVNEELVAAAGVEDGDVVLEIGPGTGSLTSALLQAGATVFAVEKDKHMATLVKDRFGSTEQLKVIEEDITKFHIRSHFLPFMKEKYGATKKLAKVASNLPFNVSTEVVKLLLPMGDVFSVVVLMLQDETAVRFADASIQSPEYRSINVFVDFYSEPEYKFRVDRENFFPRPKVDGAVISFKLKNAEEYPPVSSPKSFFSMVNSAFMGKRKMLRKSLQHICSSSDIEAALDNIGLPVTARPSDLILDDFVRLHNHLAKV

SEQ ID NO: 16976 - protein, 211 aa, Zea mays subsp. mays
  peptide (1)..(211): Ceres Seq. ID no. 12435193
MATLVKDRFGSTEQLKVIEEDITKFHIRSHFLPFMKEKYGATKKLAKVASNLPFNVSTEVVKLLLPMGDVFSVVVLMLQDETAVRFADASIQSPEYRSINVFVDFYSEPEYKFRVDRENFFPRPKVDGAVISFKLKNAEEYPPVSSPKSFFSMVNSAFMGKRKMLRKSLQHICSSSDIEAALDNIGLPVTARPSDLILDDFVRLHNHLAKV

SEQ ID NO: 16977 - protein, 177 aa, Zea mays subsp. mays
  peptide (1)..(177): Ceres Seq. ID no. 12435194
MKEKYGATKKLAKVASNLPFNVSTEVVKLLLPMGDVFSVVVLMLQDETAVRFADASIQSPEYRSINVFVDFYSEPEYKFRVDRENFFPRPKVDGAVISFKLKNAEEYPPVSSPKSFFSMVNSAFMGKRKMLRKSLQHICSSSDIEAALDNIGLPVTARPSDLILDDFVRLHNHLAKV

SEQ ID NO: 16978 - DNA, 1471 bp, Zea mays subsp. mays
  misc_feature (1)..(1471): Ceres Seq. ID no. 12435165
  misc_feature (1)..(1471): Ortholog of  Ceres SEQ ID NO 13594345 as cited in SEQ ID NO 58043
  misc_feature (1)..(1471): Ortholog of  Ceres SEQ ID NO 12614112 as cited in SEQ ID NO 60891
  misc_feature (1)..(1471): Ortholog of  Ceres SEQ ID NO 13597574 as cited in SEQ ID NO 64677
  misc_feature (1)..(1471): Ortholog of  Ceres SEQ ID NO 13662880 as cited in SEQ ID NO 65422
  misc_feature (1)..(1471): Ortholog of  Ceres SEQ ID NO 14302071 as cited in SEQ ID NO 66585
  misc_feature (1)..(1471): Ortholog of  Ceres SEQ ID NO 14316013 as cited in SEQ ID NO 67181
  misc_feature (1)..(1471): Ortholog of  Ceres SEQ ID NO 12779098 as cited in SEQ ID NO 67698
  misc_feature (1)..(1471): Ortholog of  Ceres SEQ ID NO 13591190 as cited in SEQ ID NO 68044
  misc_feature (1)..(1471): Ortholog of  Ceres SEQ ID NO 13595961 as cited in SEQ ID NO 68223
atgttccagctcgccggcctgctccacgcgcgcggcttcgccgtcaccgtcttccacacccacttcaacgcgccggacgcgtcccagcacccggcctacgacttcgtccccgtccagttcgacgggacgccggcggacagcgcggacacggtgcgggtgaccgtggagcacgtcctcgccgtgaaccgcgcgtgcgaggccccgttccgggagcgcctggccgcgctgctggaggaggaggaggaggaggtcgcgtgcctcgtcgccgacgcgcacctgctcacgctcatggacgtggcacgcgggctcggcgtgccgactctcgcgctccgcaccggcagcgccgcgtgcttccgctggttcatggcgtttcccatgctctgcgacaagggctacctgtcctctcaagagtcgcaggagccggacatgctggtgacggagctgccgccgtaccgcgtccgtgacatgccgtccgccagcggggccaccctcgggctaatgcgggacctgatttcgcgagcggtgacggccgtgaacgcctcgtcgggtctcatcatcaacacgttcgacgcgctggagacggacgagctggcgtcgctccggcgcggcctcgccgtcccggtgttcgacatcgggccgctgcacgtgcactcgccggcggcctcgagcagcctgctgcggcaggaccgagggtgcctggactggctggacgcgcggggccccgcgtccgtgctctacgtcagcttcggcagcctggccagcatgtccgcggcggacctggtggagacggcatggggcatcgccaacagcggccgccctttcctgtgggtgctccggccgggcctcgtccgcggcgcgccgccgagtcagccgccgccgctgcccgacggcttccacgccgagacgcgcggtcgcggcacggtggtgagctgggcgccgcaggaggaggtcctggcgcaccctgccgtgggcgcgttctggacgcactgcggctggaactccacgctggagggcgtgtgcgccggcgtgccgatgctgtgccgcccctgcttcggcgaccagatggggaacgccaggtacgtggaccacgtgtggcggaccggcctcgcgctccacggcgagctggagaggggcaaggtggaggcggccatctcgacgatgatgggggcaggcgagcccgccacggcgctgcgtgggagggcacgggagctctgtagaagagcggcggagtgcgtggccaaggccggctcgtccgacctcaacgtcgacaagctggtgaaccacatcatgtccctcacggcgcggcggtgccaatagagacttaattatttgagtaacacatactcatctgcataattaagcctgacaaatctgtttgatacaaatccacttgcactggctgtttcaaagtttcaagtttgatggagacatggagcatgaattagttactgttgtacacttgtgcatcttc

SEQ ID NO: 16979 - protein, 438 aa, Zea mays subsp. mays
  peptide (1)..(438): Ceres Seq. ID no. 12435166
MFQLAGLLHARGFAVTVFHTHFNAPDASQHPAYDFVPVQFDGTPADSADTVRVTVEHVLAVNRACEAPFRERLAALLEEEEEEVACLVADAHLLTLMDVARGLGVPTLALRTGSAACFRWFMAFPMLCDKGYLSSQESQEPDMLVTELPPYRVRDMPSASGATLGLMRDLISRAVTAVNASSGLIINTFDALETDELASLRRGLAVPVFDIGPLHVHSPAASSSLLRQDRGCLDWLDARGPASVLYVSFGSLASMSAADLVETAWGIANSGRPFLWVLRPGLVRGAPPSQPPPLPDGFHAETRGRGTVVSWAPQEEVLAHPAVGAFWTHCGWNSTLEGVCAGVPMLCRPCFGDQMGNARYVDHVWRTGLALHGELERGKVEAAISTMMGAGEPATALRGRARELCRRAAECVAKAGSSDLNVDKLVNHIMSLTARRCQ

SEQ ID NO: 16980 - protein, 342 aa, Zea mays subsp. mays
  peptide (1)..(342): Ceres Seq. ID no. 12435167
MDVARGLGVPTLALRTGSAACFRWFMAFPMLCDKGYLSSQESQEPDMLVTELPPYRVRDMPSASGATLGLMRDLISRAVTAVNASSGLIINTFDALETDELASLRRGLAVPVFDIGPLHVHSPAASSSLLRQDRGCLDWLDARGPASVLYVSFGSLASMSAADLVETAWGIANSGRPFLWVLRPGLVRGAPPSQPPPLPDGFHAETRGRGTVVSWAPQEEVLAHPAVGAFWTHCGWNSTLEGVCAGVPMLCRPCFGDQMGNARYVDHVWRTGLALHGELERGKVEAAISTMMGAGEPATALRGRARELCRRAAECVAKAGSSDLNVDKLVNHIMSLTARRCQ

SEQ ID NO: 16981 - protein, 317 aa, Zea mays subsp. mays
  peptide (1)..(317): Ceres Seq. ID no. 12435168
MAFPMLCDKGYLSSQESQEPDMLVTELPPYRVRDMPSASGATLGLMRDLISRAVTAVNASSGLIINTFDALETDELASLRRGLAVPVFDIGPLHVHSPAASSSLLRQDRGCLDWLDARGPASVLYVSFGSLASMSAADLVETAWGIANSGRPFLWVLRPGLVRGAPPSQPPPLPDGFHAETRGRGTVVSWAPQEEVLAHPAVGAFWTHCGWNSTLEGVCAGVPMLCRPCFGDQMGNARYVDHVWRTGLALHGELERGKVEAAISTMMGAGEPATALRGRARELCRRAAECVAKAGSSDLNVDKLVNHIMSLTARRCQ

SEQ ID NO: 16982 - DNA, 1684 bp, Zea mays subsp. mays
  misc_feature (1)..(1684): Ceres Seq. ID no. 12358911
  misc_feature (1)..(1684): Ortholog of  Ceres SEQ ID NO 15174599 as cited in SEQ ID NO 53646
  misc_feature (1)..(1684): Ortholog of  Ceres SEQ ID NO 15174646 as cited in SEQ ID NO 54499
aaggatcccaatgctatatgctactcgactacatactgctgagtacatcagtactcagatagcccgagtcggaccacactgcttgcacagtagaagatgataggcgatgaactggattccgatgtggttgtacgctacttcagaggcaagagcatcctgatcactggatcaacaggtttcctggggaaagtgctcgtggagaagatactgagggttcagccggacgtgaagaagctcttcctcctcgttcgagccgccgatgacgagtctgccaagcagagggtcgagaccgaggtgacaggaaaggagatctttcaggttctgaaagaaaagcacggtaacgggttcgaaggtttcgtccaagaaaaaatctgccctctgccaggagacgtcatgcacgagaacttgggcctaggccctgccaaactgagacaagtgtgcaaggaaatagacatcgttgtaaacggagctgcaactacgaatttctacgaaagatacgatgtggctttcgacacaaatgtcatgggagccaagcacatatgcgagttcgccaagaggtgcagcaaactcaagatgctgctacatgtttcaacagcttatgtagctggtgaacaggaaggggtggtgctggagaagccattccgtttgggcgaaaccctgagggaaggcacgcacctggacatcgagtccgaactaaacctgataaaagagacgaggagagaactgaaggccagccgttgttcagaaaaggctgagaggagaagcatgaaggagcttggcctcaagagggcaagggagttcgggtggcccaacacctatgtgttcaccaaggcaatgggggagatgctgctgggcgcccacctccggggagacgtgccggtcgtcatcgtccggcctagtatcataaccagcatcctcaaggagccattgcctggatggatggaagggatcaggacgattgactcgttcatcatcggctacgccaagcaggctctgtccatcttcttagttgacctcgacctgatcatggacgtgattcccggggacatggtggtgaacgccatgatggtggccatggcggcgcactcggaggagcgggggcagcagactagcatctaccacctgacgtcgtcggtgcggcacccggcgccctacgccgtcctcgcggagtgcggccgccgctacttcctccacaacccactcaggtccgggggcaagaacagcgagcccgtgcggcctagcaggatgcgcttcttccgcaccctccccgggttccgcgcctacatggccatcaagttcaggcttccccttgagatccttcgcctgctcaacattgtcctgtgcggtgctctctcccggcgccacgacgagctcagccgcaagtacagatacgtcatgcatatcgcagagctgtacgcgccttactccttgttcaaaggatgcttcgatgactccaacacggagaggctgagggcggcgatggcgaacaggagcagcggatatgacttgggtttcgatcccatgtgcgtagactgggacgactatttctacagggttcacatccccggtgttgtcaagtacctgtgtggttactaggttaatacatatttaagatccggagagagccaaatgtatcttcgcatgttttaatacacaaatatgtcgctgtagtttgcagattatt

SEQ ID NO: 16983 - protein, 499 aa, Zea mays subsp. mays
  peptide (1)..(499): Ceres Seq. ID no. 12358912
MIGDELDSDVVVRYFRGKSILITGSTGFLGKVLVEKILRVQPDVKKLFLLVRAADDESAKQRVETEVTGKEIFQVLKEKHGNGFEGFVQEKICPLPGDVMHENLGLGPAKLRQVCKEIDIVVNGAATTNFYERYDVAFDTNVMGAKHICEFAKRCSKLKMLLHVSTAYVAGEQEGVVLEKPFRLGETLREGTHLDIESELNLIKETRRELKASRCSEKAERRSMKELGLKRAREFGWPNTYVFTKAMGEMLLGAHLRGDVPVVIVRPSIITSILKEPLPGWMEGIRTIDSFIIGYAKQALSIFLVDLDLIMDVIPGDMVVNAMMVAMAAHSEERGQQTSIYHLTSSVRHPAPYAVLAECGRRYFLHNPLRSGGKNSEPVRPSRMRFFRTLPGFRAYMAIKFRLPLEILRLLNIVLCGALSRRHDELSRKYRYVMHIAELYAPYSLFKGCFDDSNTERLRAAMANRSSGYDLGFDPMCVDWDDYFYRVHIPGVVKYLCGY

SEQ ID NO: 16984 - protein, 400 aa, Zea mays subsp. mays
  peptide (1)..(400): Ceres Seq. ID no. 12358913
MHENLGLGPAKLRQVCKEIDIVVNGAATTNFYERYDVAFDTNVMGAKHICEFAKRCSKLKMLLHVSTAYVAGEQEGVVLEKPFRLGETLREGTHLDIESELNLIKETRRELKASRCSEKAERRSMKELGLKRAREFGWPNTYVFTKAMGEMLLGAHLRGDVPVVIVRPSIITSILKEPLPGWMEGIRTIDSFIIGYAKQALSIFLVDLDLIMDVIPGDMVVNAMMVAMAAHSEERGQQTSIYHLTSSVRHPAPYAVLAECGRRYFLHNPLRSGGKNSEPVRPSRMRFFRTLPGFRAYMAIKFRLPLEILRLLNIVLCGALSRRHDELSRKYRYVMHIAELYAPYSLFKGCFDDSNTERLRAAMANRSSGYDLGFDPMCVDWDDYFYRVHIPGVVKYLCGY

SEQ ID NO: 16985 - protein, 357 aa, Zea mays subsp. mays
  peptide (1)..(357): Ceres Seq. ID no. 12358914
MGAKHICEFAKRCSKLKMLLHVSTAYVAGEQEGVVLEKPFRLGETLREGTHLDIESELNLIKETRRELKASRCSEKAERRSMKELGLKRAREFGWPNTYVFTKAMGEMLLGAHLRGDVPVVIVRPSIITSILKEPLPGWMEGIRTIDSFIIGYAKQALSIFLVDLDLIMDVIPGDMVVNAMMVAMAAHSEERGQQTSIYHLTSSVRHPAPYAVLAECGRRYFLHNPLRSGGKNSEPVRPSRMRFFRTLPGFRAYMAIKFRLPLEILRLLNIVLCGALSRRHDELSRKYRYVMHIAELYAPYSLFKGCFDDSNTERLRAAMANRSSGYDLGFDPMCVDWDDYFYRVHIPGVVKYLCGY

SEQ ID NO: 16986 - DNA, 1584 bp, Zea mays subsp. mays
  misc_feature (1)..(1584): Ceres Seq. ID no. 12383435
  misc_feature (1)..(1584): Ortholog of  Ceres SEQ ID NO 13662197 as cited in SEQ ID NO 63622
ctacgccaagcccgcaattaaccctcactaaagggaacaaaagctggagctccaccgcggtggcggccgctctagaactagtggatcccccgggctgcaggaattcgcacgagaccattacctagaacatcctaatcgaaaaacccacacctacacctacacattacagccagtactgctgtcacctcacttagcaaagctaatacgtatgtcatagcagcttgccaccatggcgagcatcaccgtgacaaggaaatcccaatccttcgtcgtgccatcgtccacgccaactccgacgaccgagacgctcgagttgtcggccatcgaccgcgttccaggcctgcgccacacggtgcgatccctgcacgtgttccgccgcaaggacgccgccgcctccgccgcccactacgatgctgctgccgccggcaggccggccgaggtgatccgcgcggcgctgtcccgcgcgctggtggactaccgcccgttcgccggccgtttcgtcggctcactgtacgccggggaggcgagcgttgagtgcaccgacgacggtgcgtggttcgtggacgctgtcacagattgcagcctcgaggacgtgaacggcctcgactacccgcttatggtctccgaggaagagctgctgccggctccagaggaaggtgttgacccaaccagtattccgattatgatgcaggtcacggaatttgcttgtggaggatttgtggtggggctagtcgcagtgcacacccttgctgacgggctcggtgcagctcaattcatcaatgcaatttctgagtttgcccgtggagtagttaaacctacaatagcacctatatgggcacgggagttaataccaaacccacctaaaatgcctcctgggccaccaccatccttcgagtgcttcgggttcaaacattttgttatggatgtggcagttaacaatattgcacatgtcaagagtgaatactttcaaaccaatggacactattgctctacatttgatgttgccattgccaaggtttggcaagctaggacaagggcaatcaagtacgaaccaaatttcaaggtgcatgtttgcttctttgccaacactcgccacctcctcacacatgtgctacccaaggttggtggcttctatggaaattgcttctatccagtgactgtcacagcaactgctgaggtagttgctagttcaagattgcttgatgtgattaggatgataagggatgggaaggctaggcttcctttagagttttccagatggtccacgggcaatgtgaaagtagacccatatcaactaacattcaagcacaatgttctatttgtgtccgattggacacggcttggattctttgaagttgactatgggtggggtgtaccaaaccatatcctccctttcacttatgcagactacatggctgtagcagttcttggggctccaccgtctatgaagaaggggactcgaataatgacacaatgtgtcgaggaggagcatctcgtggacttcaaggccgagatgaaagccttcttttaggtcctcggattttacttgaaagttcaaacattatgcatttatgtgttcaattc

SEQ ID NO: 16987 - protein, 433 aa, Zea mays subsp. mays
  peptide (1)..(433): Ceres Seq. ID no. 12383436
MASITVTRKSQSFVVPSSTPTPTTETLELSAIDRVPGLRHTVRSLHVFRRKDAAASAAHYDAAAAGRPAEVIRAALSRALVDYRPFAGRFVGSLYAGEASVECTDDGAWFVDAVTDCSLEDVNGLDYPLMVSEEELLPAPEEGVDPTSIPIMMQVTEFACGGFVVGLVAVHTLADGLGAAQFINAISEFARGVVKPTIAPIWARELIPNPPKMPPGPPPSFECFGFKHFVMDVAVNNIAHVKSEYFQTNGHYCSTFDVAIAKVWQARTRAIKYEPNFKVHVCFFANTRHLLTHVLPKVGGFYGNCFYPVTVTATAEVVASSRLLDVIRMIRDGKARLPLEFSRWSTGNVKVDPYQLTFKHNVLFVSDWTRLGFFEVDYGWGVPNHILPFTYADYMAVAVLGAPPSMKKGTRIMTQCVEEEHLVDFKAEMKAFF

SEQ ID NO: 16988 - protein, 304 aa, Zea mays subsp. mays
  peptide (1)..(304): Ceres Seq. ID no. 12383437
MVSEEELLPAPEEGVDPTSIPIMMQVTEFACGGFVVGLVAVHTLADGLGAAQFINAISEFARGVVKPTIAPIWARELIPNPPKMPPGPPPSFECFGFKHFVMDVAVNNIAHVKSEYFQTNGHYCSTFDVAIAKVWQARTRAIKYEPNFKVHVCFFANTRHLLTHVLPKVGGFYGNCFYPVTVTATAEVVASSRLLDVIRMIRDGKARLPLEFSRWSTGNVKVDPYQLTFKHNVLFVSDWTRLGFFEVDYGWGVPNHILPFTYADYMAVAVLGAPPSMKKGTRIMTQCVEEEHLVDFKAEMKAFF

SEQ ID NO: 16989 - protein, 282 aa, Zea mays subsp. mays
  peptide (1)..(282): Ceres Seq. ID no. 12383438
MMQVTEFACGGFVVGLVAVHTLADGLGAAQFINAISEFARGVVKPTIAPIWARELIPNPPKMPPGPPPSFECFGFKHFVMDVAVNNIAHVKSEYFQTNGHYCSTFDVAIAKVWQARTRAIKYEPNFKVHVCFFANTRHLLTHVLPKVGGFYGNCFYPVTVTATAEVVASSRLLDVIRMIRDGKARLPLEFSRWSTGNVKVDPYQLTFKHNVLFVSDWTRLGFFEVDYGWGVPNHILPFTYADYMAVAVLGAPPSMKKGTRIMTQCVEEEHLVDFKAEMKAFF

SEQ ID NO: 16990 - DNA, 1252 bp, Zea mays subsp. mays
  misc_feature (1)..(1252): Ceres Seq. ID no. 12360776
  misc_feature (1)..(1252): Ortholog of  Ceres SEQ ID NO 14304170 as cited in SEQ ID NO 53453
  misc_feature (1)..(1252): Ortholog of  Ceres SEQ ID NO 14315911 as cited in SEQ ID NO 56998
  misc_feature (1)..(1252): Ortholog of  Ceres SEQ ID NO 13656028 as cited in SEQ ID NO 64728
gcacgagaccattacctagaacatcctaatcgaaaaaggtacaccaatcgcttcgtccccgcgtctcgccgcgtagcggcgtaggcgccacagaaactcgcacgccgctccccgccgtccggcccgagtcgccgtcgctgccgaatccaatccatggctccgcccgccgcacccaccgcgctgcaccaccgcacgcccctcctcctcccccgccgcaccgtcgccttgggtgccaccgccaccgcgcgcgccgccagggccgcttctctcgccgtcagggcccagccggacaccaccgccgcagccgtctccacctccgcgcctgagccggcgcccgagttcaagcctccgccggggttcaaggcgcccgagcccaagaggtacgaggtcaagtccggccaggtgggcagcgtcctcggcgcctcgctcgccatcccccttcgcctcggcaccggcgtcttcgtcctcgggtactcgccatctcttgtttctccatcagagataccatcagaccagtatgcactggaatttggagcttggaaggtgaaagaggaatcaaaaataggacagtgcaaacgaccagaaaagcctatcgagatatatgaatttgaaggttgtccattttgtcggaaggtcagagagatggtaacagtcttggacctagatgtattattttacccctgtcctcaaaaaggcccaacattccgacctaaagtcctcgaaatgggtggaaagaaacaattcccttacatggtagatccaaacacaggggtcgccatgtatgaatccgatgacatcataaaatatctagctgatacatatggcgatggaactgttccaattatgctatcacttggtctgttgacagcaattacagcagggcttgctactcttggtcgtattggaaagggaaattcctacattgcttcaaaagtcccaccgcagcccatagagatatgggcatgtgagggatctcccttctgtaaattagtacgagagacacttgtcgagttggaattgccacatctgctacacagctgcgcacgaggcagccccaaacgacaagaatttttcaagaaaaaggggcttttccaggcgccgtacatcgaagatcctaacacgggagtccagatgtttgaaagcgctgaaatcatagactacctgaaggcaacatatgccctgtacccaagctcgtagtgatgtatcagaaatggtcattgtaatgttgcgtgtagattcagttcttcccggt

SEQ ID NO: 16991 - protein, 347 aa, Zea mays subsp. mays
  peptide (1)..(347): Ceres Seq. ID no. 12360777
MAPPAAPTALHHRTPLLLPRRTVALGATATARAARAASLAVRAQPDTTAAAVSTSAPEPAPEFKPPPGFKAPEPKRYEVKSGQVGSVLGASLAIPLRLGTGVFVLGYSPSLVSPSEIPSDQYALEFGAWKVKEESKIGQCKRPEKPIEIYEFEGCPFCRKVREMVTVLDLDVLFYPCPQKGPTFRPKVLEMGGKKQFPYMVDPNTGVAMYESDDIIKYLADTYGDGTVPIMLSLGLLTAITAGLATLGRIGKGNSYIASKVPPQPIEIWACEGSPFCKLVRETLVELELPHLLHSCARGSPKRQEFFKKKGLFQAPYIEDPNTGVQMFESAEIIDYLKATYALYPSS

SEQ ID NO: 16992 - protein, 184 aa, Zea mays subsp. mays
  peptide (1)..(184): Ceres Seq. ID no. 12360778
MVTVLDLDVLFYPCPQKGPTFRPKVLEMGGKKQFPYMVDPNTGVAMYESDDIIKYLADTYGDGTVPIMLSLGLLTAITAGLATLGRIGKGNSYIASKVPPQPIEIWACEGSPFCKLVRETLVELELPHLLHSCARGSPKRQEFFKKKGLFQAPYIEDPNTGVQMFESAEIIDYLKATYALYPSS

SEQ ID NO: 16993 - DNA, 1856 bp, Zea mays subsp. mays
  misc_feature (1)..(1856): Ceres Seq. ID no. 12415997
  misc_feature (1)..(1856): Ortholog of  Ceres SEQ ID NO 14307964 as cited in SEQ ID NO 66191
  misc_feature (1)..(1856): Ortholog of  Ceres SEQ ID NO 12614124 as cited in SEQ ID NO 68392
gcacgagaccattacctagaacatcctaatcgaaaaacaccagctccactgcatcaaaacccctcatcaccctgcagcctgcactcatcagacatggtgctcaccatggccagcgcccaagaggactcgctcctcctgctcctcctcccgaccacctccccactgccgcccctcgtggccgtgttcatcctagccgccgtcctcctgtggctctcccccggcggtcctgcgtgggcgctctcccgctgccgccgcccgccgcccgggccaacgggcgtggtcaccgcgctctccagccccgtggcgcaccgcaccctggcggcgctgtcccacgccgtagacggcggcaaggcactgatggccttctcggtcgggctgacccgcctcgtcgtgtcgagccagcccgatacggcgcgcgagatcctcgccagccccggcgttcggcgaccgccccgtcaaggacgcggcgcgccacctgctcttccaccgcgccatgggcttcgcgccctcgggagacgcgcactggcgcgggctcccgccgcctcgccgccaaccacctgttcggcccgcgccgccgtggcgggtgccgcgcaccaccgcgcctccatcggcgaggccatggtcgccgacgtcgccgctgccatggcgcgccacggcgaggtccctctcaagcgcgtgctgcatgtcgcgtctctcaaccacatcatggccaccgtgtttggcaagcgctacgacatgggcagccgagagggcgcccttctggacgagatggtggccgagggctacgacctcctgggcacgttcaactgggctgaccacctgccattgctcaagcatctcgacccccagggcgtgcgccgccggtgcaacaggctggtccaaaaggtcgaatcgttcgttggtaagatcatcatggagcacaggacgaggcgcgcaaatggaggattcgtgagcgatgagtgcattggtgacttcgtcgacgtccttcttggcctcgagggtgaggagaagctgtcagatgcggacatgatcgctgttctttgggagatgatcttcagaggcgccgacaccgtggcgatcttgatggagtgggtcatggcgaggatggcgctgcacccggacatccaggcgaaggcccaggcggagctggacggcgtcgtgggcatcgggcgcggcgtggcggacgccgacgtcgccagcctaccctacatccagtgcatcgtgaaggagacgctgcgcatgcacccgccaggcccgctcctgtcgtgggcgcgcctcgccgtccacgacgcgcacgtcggcggccacctggtccccgccggcaccacagccatggtgaacatgtggtccatcgcgcacgaccccgccatctgggccgagccggagaagttccgccccggagcggttccaggaggaggacgtgagcgtcctcgggagcgacctccgcctggcccccttcggcgccgggcgccgcgcctgccccggcaagatactggccctcgccaccacccacctctgtgtcgcccagcttctgcacaagttcgagtgggccgccggcgggggcgtcgacctgtcggagcgcctgagcatgtcgctggagatggccacgccgctggtgtgcaaggccgtacccagggttcagggccaagcggcctcctagcctagcctccatgcatgcctgatgcctggatgccgtagcgagagtgggagactgatgagtgtatgccgttatgtttgtgtgtccatgcatgcatgcatgcctcggctactgtagcttcctggcttgcttgttgtgcatgtcctgcgtcgagaccttgcgtagtatgatgcagtataattttaataataatattatt

SEQ ID NO: 16994 - protein, 554 aa, Zea mays subsp. mays
  peptide (1)..(554): Ceres Seq. ID no. 12415998
ARDHYLEHPNRKTPAPLHQNPSSPCSLHSSDMVLTMASAQEDSLLLLLLPTTSPLPPLVAVFILAAVLLWLSPGGPAWALSRCRRPPPGPTGVVTALSSPVAHRTLAALSHAVDGGKALMAFSVGLTRLVVSSQPDTAREILASPGVRRPPRQGRGAPPALPPRHGLRALGRRALARAPAASPPTTCSARAAVAGAAHHRASIGEAMVADVAAAMARHGEVPLKRVLHVASLNHIMATVFGKRYDMGSREGALLDEMVAEGYDLLGTFNWADHLPLLKHLDPQGVRRRCNRLVQKVESFVGKIIMEHRTRRANGGFVSDECIGDFVDVLLGLEGEEKLSDADMIAVLWEMIFRGADTVAILMEWVMARMALHPDIQAKAQAELDGVVGIGRGVADADVASLPYIQCIVKETLRMHPPGPLLSWARLAVHDAHVGGHLVPAGTTAMVNMWSIAHDPAIWAEPEKFRPGAVPGGGRERPRERPPPGPLRRRAPRLPRQDTGPRHHPPLCRPASAQVRVGRRRGRRPVGAPEHVAGDGHAAGVQGRTQGSGPSGLLA

SEQ ID NO: 16995 - protein, 523 aa, Zea mays subsp. mays
  peptide (1)..(523): Ceres Seq. ID no. 12415999
MVLTMASAQEDSLLLLLLPTTSPLPPLVAVFILAAVLLWLSPGGPAWALSRCRRPPPGPTGVVTALSSPVAHRTLAALSHAVDGGKALMAFSVGLTRLVVSSQPDTAREILASPGVRRPPRQGRGAPPALPPRHGLRALGRRALARAPAASPPTTCSARAAVAGAAHHRASIGEAMVADVAAAMARHGEVPLKRVLHVASLNHIMATVFGKRYDMGSREGALLDEMVAEGYDLLGTFNWADHLPLLKHLDPQGVRRRCNRLVQKVESFVGKIIMEHRTRRANGGFVSDECIGDFVDVLLGLEGEEKLSDADMIAVLWEMIFRGADTVAILMEWVMARMALHPDIQAKAQAELDGVVGIGRGVADADVASLPYIQCIVKETLRMHPPGPLLSWARLAVHDAHVGGHLVPAGTTAMVNMWSIAHDPAIWAEPEKFRPGAVPGGGRERPRERPPPGPLRRRAPRLPRQDTGPRHHPPLCRPASAQVRVGRRRGRRPVGAPEHVAGDGHAAGVQGRTQGSGPSGLLA

SEQ ID NO: 16996 - protein, 519 aa, Zea mays subsp. mays
  peptide (1)..(519): Ceres Seq. ID no. 12416000
MASAQEDSLLLLLLPTTSPLPPLVAVFILAAVLLWLSPGGPAWALSRCRRPPPGPTGVVTALSSPVAHRTLAALSHAVDGGKALMAFSVGLTRLVVSSQPDTAREILASPGVRRPPRQGRGAPPALPPRHGLRALGRRALARAPAASPPTTCSARAAVAGAAHHRASIGEAMVADVAAAMARHGEVPLKRVLHVASLNHIMATVFGKRYDMGSREGALLDEMVAEGYDLLGTFNWADHLPLLKHLDPQGVRRRCNRLVQKVESFVGKIIMEHRTRRANGGFVSDECIGDFVDVLLGLEGEEKLSDADMIAVLWEMIFRGADTVAILMEWVMARMALHPDIQAKAQAELDGVVGIGRGVADADVASLPYIQCIVKETLRMHPPGPLLSWARLAVHDAHVGGHLVPAGTTAMVNMWSIAHDPAIWAEPEKFRPGAVPGGGRERPRERPPPGPLRRRAPRLPRQDTGPRHHPPLCRPASAQVRVGRRRGRRPVGAPEHVAGDGHAAGVQGRTQGSGPSGLLA

SEQ ID NO: 16997 - DNA, 1721 bp, Zea mays subsp. mays
  misc_feature (1)..(1721): Ceres Seq. ID no. 12383403
  misc_feature (1)..(1721): Ortholog of  Ceres SEQ ID NO 15175785 as cited in SEQ ID NO 56970
  misc_feature (1)..(1721): Ortholog of  Ceres SEQ ID NO 15178157 as cited in SEQ ID NO 57481
  misc_feature (1)..(1721): Ortholog of  Ceres SEQ ID NO 13597407 as cited in SEQ ID NO 64106
  misc_feature (1)..(1721): Ortholog of  Ceres SEQ ID NO 14303309 as cited in SEQ ID NO 67739
cgccaagcccgcaattaaccctcactaaagggaacaaaagctggagctccaccgcggtggcggccgctctagaactagtggatcccccgggctgcaggaattcgcacgagaccattacctagaacatcctaatcgaaaaattattaccatgggagaagagaagcaacgtcgggatggccatggcggaaagaacaagtacgccgtggcgtgctccattattggctccatcatctccattctcatgggctatgacacgggcgtcatgaccggcgcgatgctgttcatcaaggaggacctcaagaccaacgacacgcaggtccaggtcctcgccggcatcctcaacgtctgcgcccttgtcggctccctcacggccggccgcgtctccgactgggtcggcccccgccgcaccatctccctcgcggcctgcatcttcctcgcggggtcagtcctcatgggcctctcgcccaacttcggtacgctcctggcaggacgctgcgtggccggcgtcggcgtcggatacgcgctcatgatcgcgcccgtctacgcggccgagatttcgtccgcccacatccgcggctccgtcacctcgctgcccgagatctgcatcagcttcggcatcctgattgggtacgtggccaactacctgctagctaagctcccgctggtctacggctggcgcgccatgctggggctcggcgcgctgccgagcgccgtgctcgcagtcgccgtgctcgcgatgccggagtcgccccggtggctcgtcatgcagggccgcgtcgagcaggcccacgccgtgctcaggcgcgtgtccgacactgcaggcgaggccgatgtgcgcctcgcggaaatcaagaccgcggcggggctggcagacgacgatgacggctcaccgagaggtgtcggcaagggcgtgtggaaggagatgttcctgcacccgacgccccccgtccggcgtatcctcgtcgctgccttcggagtccacttcttccagcatctcacgggaatcgaagccgtggtcctctacagcccacgcatctttaaggcagccggcatcgccacccgcagcgagatccttgcagcgaccatcggcgtgggcgtcaccaagacggtgttcatcatgacagccatcctgctggtggaccgcatcggccggaggccgctctacctctcgagcctggcgggcatcatcgcctcgcttgcctgcctcggtcttggcctcaccgtcgtggagcgctcggtgccgcgccactcgccgacgtgggctatggcattgtccatcgcaacggtcttcaccttcatagcgtccttctccatcggtgtggggcccatcacgtgggcgtacagcaccgaggtgtacccgctccggctgcgcgcgcagggcgccagcgtcggcgtggccatcaaccgtgtcatgaacgccggggtctctatgacgttcgtgtcgctgtacaatgcggtgaccatcggcggtgcctttttcctgttcgcagggctggccgtgttggcggccatgttcttctacttcctctgcccggagacgcaaggacggccactggaggagatcgaagaggtgttcggccgtgggtggcgcgcgcgcctcctgtcatgggacgaagctgttgtggagcttccaatgtccaacaccaccgacggcaacaccaaggcgcgcccgtgatgcaaatgcgattgcaaaaattatggatagacattcatatatggtc

SEQ ID NO: 16998 - protein, 508 aa, Zea mays subsp. mays
  peptide (1)..(508): Ceres Seq. ID no. 12383404
MGEEKQRRDGHGGKNKYAVACSIIGSIISILMGYDTGVMTGAMLFIKEDLKTNDTQVQVLAGILNVCALVGSLTAGRVSDWVGPRRTISLAACIFLAGSVLMGLSPNFGTLLAGRCVAGVGVGYALMIAPVYAAEISSAHIRGSVTSLPEICISFGILIGYVANYLLAKLPLVYGWRAMLGLGALPSAVLAVAVLAMPESPRWLVMQGRVEQAHAVLRRVSDTAGEADVRLAEIKTAAGLADDDDGSPRGVGKGVWKEMFLHPTPPVRRILVAAFGVHFFQHLTGIEAVVLYSPRIFKAAGIATRSEILAATIGVGVTKTVFIMTAILLVDRIGRRPLYLSSLAGIIASLACLGLGLTVVERSVPRHSPTWAMALSIATVFTFIASFSIGVGPITWAYSTEVYPLRLRAQGASVGVAINRVMNAGVSMTFVSLYNAVTIGGAFFLFAGLAVLAAMFFYFLCPETQGRPLEEIEEVFGRGWRARLLSWDEAVVELPMSNTTDGNTKARP

SEQ ID NO: 16999 - protein, 477 aa, Zea mays subsp. mays
  peptide (1)..(477): Ceres Seq. ID no. 12383405
MGYDTGVMTGAMLFIKEDLKTNDTQVQVLAGILNVCALVGSLTAGRVSDWVGPRRTISLAACIFLAGSVLMGLSPNFGTLLAGRCVAGVGVGYALMIAPVYAAEISSAHIRGSVTSLPEICISFGILIGYVANYLLAKLPLVYGWRAMLGLGALPSAVLAVAVLAMPESPRWLVMQGRVEQAHAVLRRVSDTAGEADVRLAEIKTAAGLADDDDGSPRGVGKGVWKEMFLHPTPPVRRILVAAFGVHFFQHLTGIEAVVLYSPRIFKAAGIATRSEILAATIGVGVTKTVFIMTAILLVDRIGRRPLYLSSLAGIIASLACLGLGLTVVERSVPRHSPTWAMALSIATVFTFIASFSIGVGPITWAYSTEVYPLRLRAQGASVGVAINRVMNAGVSMTFVSLYNAVTIGGAFFLFAGLAVLAAMFFYFLCPETQGRPLEEIEEVFGRGWRARLLSWDEAVVELPMSNTTDGNTKARP

SEQ ID NO: 17000 - protein, 470 aa, Zea mays subsp. mays
  peptide (1)..(470): Ceres Seq. ID no. 12383406
MTGAMLFIKEDLKTNDTQVQVLAGILNVCALVGSLTAGRVSDWVGPRRTISLAACIFLAGSVLMGLSPNFGTLLAGRCVAGVGVGYALMIAPVYAAEISSAHIRGSVTSLPEICISFGILIGYVANYLLAKLPLVYGWRAMLGLGALPSAVLAVAVLAMPESPRWLVMQGRVEQAHAVLRRVSDTAGEADVRLAEIKTAAGLADDDDGSPRGVGKGVWKEMFLHPTPPVRRILVAAFGVHFFQHLTGIEAVVLYSPRIFKAAGIATRSEILAATIGVGVTKTVFIMTAILLVDRIGRRPLYLSSLAGIIASLACLGLGLTVVERSVPRHSPTWAMALSIATVFTFIASFSIGVGPITWAYSTEVYPLRLRAQGASVGVAINRVMNAGVSMTFVSLYNAVTIGGAFFLFAGLAVLAAMFFYFLCPETQGRPLEEIEEVFGRGWRARLLSWDEAVVELPMSNTTDGNTKARP

SEQ ID NO: 17001 - DNA, 1264 bp, Zea mays subsp. mays
  misc_feature (1)..(1264): Ceres Seq. ID no. 12358919
  misc_feature (1)..(1264): Ortholog of  Ceres SEQ ID NO 14303263 as cited in SEQ ID NO 1224
  misc_feature (1)..(1264): Ortholog of  Ceres SEQ ID NO 13593955 as cited in SEQ ID NO 54278
  misc_feature (1)..(1264): Ortholog of  Ceres SEQ ID NO 14314092 as cited in SEQ ID NO 62788
  misc_feature (1)..(1264): Ortholog of  Ceres SEQ ID NO 13597380 as cited in SEQ ID NO 64054
  misc_feature (1)..(1264): Ortholog of  Ceres SEQ ID NO 12625474 as cited in SEQ ID NO 64169
acgtgcaagagacgagcgtagtaactgtgagcagctagcacatgcatggcgtcgtcgcagctggtcgtcgtgtgcctgtttgtagcgtcggcggtgactgtgacgatgaacggtggcgcgcaggcgcagccgattgtgccggcgatcatctcattcggcgactccaccgtcgacgtcggcaacaataactacctgccgggcgcggtgttcaaggccgactacgcgccgtacgggcagggcttcgcgcggcacaaggccaccggccgattctccgacggcaagatcgtcaccgacatcaccgccgaaacgctcggcttcgagagctacgcgccgccgtacctcagcccgcaggcgtcggggaagaacctgttcaccggcgccaacttcgcctccgcggcgtccagctactacgacgacacggcggccatgtatgacgcgatcacgctgacccagcagctcaagtactacaaggagtaccagtcgaagctggcggcggtggccgggcgcgctagggctcgcgccatccttggcgacgcgctctacgttgtcagcacgggcaccggcgacttcctccagaactactaccacaacgcctccctgtcccgccgctacgacgtcgaccagtacaccgacctcctcgtcggcatcttctccggcttcgccaacgagctgtacaggttgggggcgcggcggatcggcgtcacttccatgccgccgctgggctgcctgccggcgtccatcaggctgtacggcgacggcaagggagcgtgcgtgccgaggctcaaccgcgacgccgagaccttcaacgccaagctgaacccaccgtcagggcgctcaagcggcggcacgccgacctcaagctcgccatcctcgacatctacacgcccctccgcaaactcgcacaagaccccgcggcttacggcttcgccgacgctagagggacgtgctgccggacggggacggccaagacgagggtgtacctctgcaacccgacgacggccgggacgtgccggaacgccagcagctacgtgttcttcgacgccgtccacccgtctgaggctgccaacgtcttcatcgcggagtccacggtcgacgcgggcatcgagctggtcacctagctagtaggaataaaggagacgacacacatctgcagatctgctcacatgtttccggctccatcgaaacagaactacgtacagtgtctggaatattaatatatagccagtgaaattaaaaattgcaccgtcggccctgcccttttcgc

SEQ ID NO: 17002 - protein, 358 aa, Zea mays subsp. mays
  peptide (1)..(358): Ceres Seq. ID no. 12358920
MASSQLVVVCLFVASAVTVTMNGGAQAQPIVPAIISFGDSTVDVGNNNYLPGAVFKADYAPYGQGFARHKATGRFSDGKIVTDITAETLGFESYAPPYLSPQASGKNLFTGANFASAASSYYDDTAAMYDAITLTQQLKYYKEYQSKLAAVAGRARARAILGDALYVVSTGTGDFLQNYYHNASLSRRYDVDQYTDLLVGIFSGFANELYRLGARRIGVTSMPPLGCLPASIRLYGDGKGACVPRLNRDAETFNAKLNPPSGRSSGGTPTSSSPSSTSTRPSANSHKTPRLTASPTLEGRAAGRGRPRRGCTSATRRRPGRAGTPAATCSSTPSTRLRLPTSSSRSPRSTRASSWSPS

SEQ ID NO: 17003 - protein, 338 aa, Zea mays subsp. mays
  peptide (1)..(338): Ceres Seq. ID no. 12358921
MNGGAQAQPIVPAIISFGDSTVDVGNNNYLPGAVFKADYAPYGQGFARHKATGRFSDGKIVTDITAETLGFESYAPPYLSPQASGKNLFTGANFASAASSYYDDTAAMYDAITLTQQLKYYKEYQSKLAAVAGRARARAILGDALYVVSTGTGDFLQNYYHNASLSRRYDVDQYTDLLVGIFSGFANELYRLGARRIGVTSMPPLGCLPASIRLYGDGKGACVPRLNRDAETFNAKLNPPSGRSSGGTPTSSSPSSTSTRPSANSHKTPRLTASPTLEGRAAGRGRPRRGCTSATRRRPGRAGTPAATCSSTPSTRLRLPTSSSRSPRSTRASSWSPS

SEQ ID NO: 17004 - protein, 231 aa, Zea mays subsp. mays
  peptide (1)..(231): Ceres Seq. ID no. 12358922
MYDAITLTQQLKYYKEYQSKLAAVAGRARARAILGDALYVVSTGTGDFLQNYYHNASLSRRYDVDQYTDLLVGIFSGFANELYRLGARRIGVTSMPPLGCLPASIRLYGDGKGACVPRLNRDAETFNAKLNPPSGRSSGGTPTSSSPSSTSTRPSANSHKTPRLTASPTLEGRAAGRGRPRRGCTSATRRRPGRAGTPAATCSSTPSTRLRLPTSSSRSPRSTRASSWSPS

SEQ ID NO: 17005 - DNA, 496 bp, Zea mays subsp. mays
  misc_feature (1)..(496): Ceres Seq. ID no. 1668035
  misc_feature (1)..(496): Ortholog of  Ceres SEQ ID NO 15170458 as cited in SEQ ID NO 52842
  misc_feature (1)..(496): Ortholog of  Ceres SEQ ID NO 13597679 as cited in SEQ ID NO 65073
aagagaccggccggacgatggcagcagagcgcgaccgcgagcgatggatcctgcccgacgcgacggcgctggtcaccggcgggagcaaggggatcgggcacgcgatcgtggaggagctggcggcgctgggcgcgcgcgtgcacacgtgctcccgcaacgccgcggagctggaggagtgccgccggaggtgggcagagaagggcggcggccgcctgctgcagcaggtgaccgtctccgtctgcgacgtcgccgtgcgcgccgacagggaggcgctcatggccaccgtcagggacgtcttcggcgtcaagctggacatcctcgtgaataacgcggcgcaggtggtcttcaagccggcggtggagtgcaccggggaggagtacgcgcggatcatggcgaccaacctggagtcctgcttccacctcagccagctcgcgcacccgctgctccgcaacgcctccctcgccggcggcgggagcgttgtgcacatctcctccac

SEQ ID NO: 17006 - protein, 108 aa, Zea mays subsp. mays
  peptide (1)..(108): Ceres Seq. ID no. 1668036
RDRPDDGSRARPRAMDPARRDGAGHRREQGDRARDRGGAGGAGRARAHVLPQRRGAGGVPPEVGREGRRPPAAAGDRLRLRRRRARRQGGAHGHRQGRLRRQAGHPRE

SEQ ID NO: 17007 - protein, 164 aa, Zea mays subsp. mays
  peptide (1)..(164): Ceres Seq. ID no. 1668037
ETGRTMAAERDRERWILPDATALVTGGSKGIGHAIVEELAALGARVHTCSRNAAELEECRRRWAEKGGGRLLQQVTVSVCDVAVRADREALMATVRDVFGVKLDILVNNAAQVVFKPAVECTGEEYARIMATNLESCFHLSQLAHPLLRNASLAGGGSVVHISS

SEQ ID NO: 17008 - protein, 159 aa, Zea mays subsp. mays
  peptide (1)..(159): Ceres Seq. ID no. 1668038
MAAERDRERWILPDATALVTGGSKGIGHAIVEELAALGARVHTCSRNAAELEECRRRWAEKGGGRLLQQVTVSVCDVAVRADREALMATVRDVFGVKLDILVNNAAQVVFKPAVECTGEEYARIMATNLESCFHLSQLAHPLLRNASLAGGGSVVHISS

SEQ ID NO: 17009 - DNA, 501 bp, Zea mays subsp. mays
  misc_feature (1)..(501): Ceres Seq. ID no. 12637773
  misc_feature (1)..(501): Ortholog of  Ceres SEQ ID NO 12626078 as cited in SEQ ID NO 69113
accctctagaagcctccgggtcgctcggtgtgggttgctaactactcgcagcagccagaggccagatccagccgccaaccccccaaacaaaaccctaggccaccattctgaccaccaggcacaagcagagcagaagcagacatggccaccattccgaccaccgattctggcctcgtcctcagttcctccgctctcctccggaggactaggagggccgcctcatccgtcaccgccaggctgccagccgtcgcccgccgtcgcccgcagctcctcgtgcgtgcctccgccaaggagatcgcctttgaccagggctccagagccgcccttcaggccggcgtcgagaagctcgccgccgcggtcggcgtcaccctcggacccagaggaaggaatgttgtcttggatgagtttggaacccccaaagtggtcaatgatggagttaccattgcccgcgctattgagcttgctgatcccatggagaatgctggtgcttcttgattcgtg

SEQ ID NO: 17010 - protein, 166 aa, Zea mays subsp. mays
  peptide (1)..(166): Ceres Seq. ID no. 13624342
PSRSLRVARCGLLTTRSSQRPDPAANPPNKTLGHHSDHQAQAEQKQTWPPFRPPILASSSVPPLSSGGLGGPPHPSPPGCQPSPAVARSSSCVPPPRRSPLTRAPEPPFRPASRSSPPRSASPSDPEEGMLSWMSLEPPKWSMMELPLPALLSLLIPWRMLVLLDS

SEQ ID NO: 17011 - protein, 117 aa, Zea mays subsp. mays
  peptide (1)..(117): Ceres Seq. ID no. 13624343
MATIPTTDSGLVLSSSALLRRTRRAASSVTARLPAVARRRPQLLVRASAKEIAFDQGSRAALQAGVEKLAAAVGVTLGPRGRNVVLDEFGTPKVVNDGVTIARAIELADPMENAGAS

SEQ ID NO: 17012 - DNA, 1467 bp, Zea mays subsp. mays
  misc_feature (1)..(1467): Ceres Seq. ID no. 12383439
  misc_feature (1)..(1467): Ortholog of  Ceres SEQ ID NO 14303324 as cited in SEQ ID NO 54563
  misc_feature (1)..(1467): Ortholog of  Ceres SEQ ID NO 13584238 as cited in SEQ ID NO 64216
gcagctccgcacaggtccctggcacagggcgaggcactgtcacgcacggaatcgagcaatcgatcacacagagacacaggtcaggagcaggagctcgaggtgtcgccgcgcggcagcagcttgggactcgggacagccatggggaagggccgggcaccgtgctgcgccaaggtggggctcaacaagggctcctggacgccggaggaggacatgcgcctcgtcgcctacattcagaagtacggccacgccaactggcgcgccctgcccaagcaagcaggtttgctgcggtgcgggaagagctgccgtctgcggtggatcaactacctgcgcccggacctcaagcgcggcaacttcaccgccgaggaggaggaggccatcatcaagctccacggcttgctcgggaacaagtggtccaagatcgcgtcgtgcctgccgggccggacggacaacgagatcaagaacgtctggaacacgcacctgaagaagcgggtatcgccgtccggcggggaggaggagcacggcgccgccgggtccaacaagaacaagaagaagaagaagaaagccgctggcggcgccgaggagccgctcccgtcaccgactccgtctccgtcgccgtcctcgtccaccaccacgacggccaactgctccagcggcgactccggcgagcagcagagcaacaccagcaaggaggcggacgacgagcagctggacctggagaacctcgagatgatgcccatgctggacgacgacccaataaccttcggcttcgacatgctggtggaccccgtgccagcgccgtacggcccggccgtgtccgcgtccgcgtccagacccacgtcgccctgcgcctcgtccacgtccccacctccgcccgcgggctgcggcccgctcggcgtggacgacctgctggtgctgccagagatcgacatcgaccaggagctgtggagcatcatcgacggcgacggcggcggcgacggaggaggctccgcttgcgccgtgtctgccgagacatcggcgccgtgctgccagagcaatgcgccggagccgacgacgaacggcgcctgcgcgaccagccaccacggagcggcggaggaggagggaaaggagtggtggttggaggacctggagagggagttgggcctgtggggccccgtggacgtggaggactaccagtaccagtacccaacgggcccacatggtctggtggctgaccacacggacccgcttcctgccatggtggacgacccggtgtcctgctacttccaagcgggccccgcctccgcagtgctccaggaacccgggtactcggtgactagtggtagcaacctgatggggttgtgagatttatcgtcgtcgtcgtcgtcgtttttttttgtgatttttttttagatagcagaacagaaatcctgaacaaacggatcgtactatgcctggcaaaccatcggcgccagcatactacttgcttgc

SEQ ID NO: 17013 - protein, 446 aa, Zea mays subsp. mays
  peptide (1)..(446): Ceres Seq. ID no. 12383440
AAPHRSLAQGEALSRTESSNRSHRDTGQEQELEVSPRGSSLGLGTAMGKGRAPCCAKVGLNKGSWTPEEDMRLVAYIQKYGHANWRALPKQAGLLRCGKSCRLRWINYLRPDLKRGNFTAEEEEAIIKLHGLLGNKWSKIASCLPGRTDNEIKNVWNTHLKKRVSPSGGEEEHGAAGSNKNKKKKKKAAGGAEEPLPSPTPSPSPSSSTTTTANCSSGDSGEQQSNTSKEADDEQLDLENLEMMPMLDDDPITFGFDMLVDPVPAPYGPAVSASASRPTSPCASSTSPPPPAGCGPLGVDDLLVLPEIDIDQELWSIIDGDGGGDGGGSACAVSAETSAPCCQSNAPEPTTNGACATSHHGAAEEEGKEWWLEDLERELGLWGPVDVEDYQYQYPTGPHGLVADHTDPLPAMVDDPVSCYFQAGPASAVLQEPGYSVTSGSNLMGL

SEQ ID NO: 17014 - protein, 402 aa, Zea mays subsp. mays
  peptide (1)..(402): Ceres Seq. ID no. 12383441
SSAQVPGTGRGTVTHGIEQSITQRHRSGAGARGVAARQQLGTRDSHGEGPGTVLRQGGAQQGLLDAGGGHAPRRLHSEVRPRQLARPAQASRFAAVREELPSAVDQLPAPGPQARQLHRRGGGGHHQAPRLAREQVVQDRVVPAGPDGQRDQERLEHAPEEAGIAVRRGGGARRRRVQQEQEEEEESRWRRRGAAPVTDSVSVAVLVHHHDGQLLQRRLRRAAEQHQQGGGRRAAGPGEPRDDAHAGRRPNNLRLRHAGGPRASAVRPGRVRVRVQTHVALRLVHVPTSARGLRPARRGRPAGAARDRHRPGAVEHHRRRRRRRRRRLRLRRVCRDIGAVLPEQCAGADDERRLRDQPPRSGGGGGKGVVVGGPGEGVGPVGPRGRGGLPVPVPNGPTWSGG

SEQ ID NO: 17015 - protein, 400 aa, Zea mays subsp. mays
  peptide (1)..(400): Ceres Seq. ID no. 12383442
MGKGRAPCCAKVGLNKGSWTPEEDMRLVAYIQKYGHANWRALPKQAGLLRCGKSCRLRWINYLRPDLKRGNFTAEEEEAIIKLHGLLGNKWSKIASCLPGRTDNEIKNVWNTHLKKRVSPSGGEEEHGAAGSNKNKKKKKKAAGGAEEPLPSPTPSPSPSSSTTTTANCSSGDSGEQQSNTSKEADDEQLDLENLEMMPMLDDDPITFGFDMLVDPVPAPYGPAVSASASRPTSPCASSTSPPPPAGCGPLGVDDLLVLPEIDIDQELWSIIDGDGGGDGGGSACAVSAETSAPCCQSNAPEPTTNGACATSHHGAAEEEGKEWWLEDLERELGLWGPVDVEDYQYQYPTGPHGLVADHTDPLPAMVDDPVSCYFQAGPASAVLQEPGYSVTSGSNLMGL

SEQ ID NO: 17016 - DNA, 1213 bp, Zea mays subsp. mays
  misc_feature (1)..(1213): Ceres Seq. ID no. 12435169
  misc_feature (1)..(1213): Ortholog of  Ceres SEQ ID NO 15171501 as cited in SEQ ID NO 58322
atcgagaagccaggaccaggacgacgatggcccggccgcgcctcctcctcaccttcctgctcgccgcggcggccgtgctgaccacggtgcccggcgtcgcgctcgccaagtcgaagctcgccaagaagagcgacgacgtcgtgaacgggcccctcctgaccgagtagatccaggcgaagaagacgctgatcgtggggccggacgaggagttcaagaccgtgcagtccgccatcgacgcggtgcccgccggcaacgccgagtgggtcatcgtccacctccgctctggcctgcacaggggcaaagttgtgataccggagaacaagcccttcatcttcgtgaggggcaacggcaaaggccggacctccatctcccacgagtccgcctcttccgacaacgccgagtccgccgcgttcaccgtgaactcggacaacgtcatcgtcttcggcgtcagcttcaggaacagcgcccgcgtcggcctggtgaacgacccggagatccgttccgtggcggcgatggtggccggcgacaaggtggccttctaccactgcgcgttctacagcccccaccacaccctgttcgacagcgccggccgccactactacgagagctgctacatccagggcaacatcgacttcatcttcggcagcggccagtccatcttccagtgccccgagatcttcgtgaggcctgaccggcggacggagatccgcggctccatcaccgcgcaggtgcggcaggaggaggacagcagcggcttcgtcttcctcaagggcaaggtgtacggcgtcggggaggtgtacctgggccgcgtcaccgcgccggactcgcgcgtcatcttcgccgacacctacctctccaagaccatccacccggccggctggacaaccataggctacagcggcagcaccgacaaggtgacgctcgccgagttcaactgcactgggccgggcgctgacgtgacgaaccgcgtgccatggtcgcggaggttctctcccgacgacgcggccaagtacctcaccatcgacttcatcaacggcaaggactggctgccggcgtactactactgatccgacgatcgactgctggatcgatcaagcatgcatgcatgtatacacatcttgtaacgctgaattttgattcatggcacactgtactggacgaggatcattttttcttgcctaagtactgacacgcgtttccattgttgatcccg

SEQ ID NO: 17017 - protein, 229 aa, Zea mays subsp. mays
  peptide (1)..(229): Ceres Seq. ID no. 12435170
SRSQDQDDDGPAAPPPHLPARRGGRADHGARRRARQVEARQEERRRRERAPPDRVDPGEEDADRGAGRGVQDRAVRHRRGARRQRRVGHRPPPLWPAQGQSCDTGEQALHLREGQRQRPDLHLPRVRLFRQRRVRRVHRELGQRHRLRRQLQEQRPRRPGERPGDPFRGGDGGRRQGGLLPLRVLQPPPHPVRQRRPPLLRELLHPGQHRLHLRQRPVHLPVPRDLREA

SEQ ID NO: 17018 - protein, 184 aa, Zea mays subsp. mays
  peptide (1)..(184): Ceres Seq. ID no. 12435171
MVAGDKVAFYHCAFYSPHHTLFDSAGRHYYESCYIQGNIDFIFGSGQSIFQCPEIFVRPDRRTEIRGSITAQVRQEEDSSGFVFLKGKVYGVGEVYLGRVTAPDSRVIFADTYLSKTIHPAGWTTIGYSGSTDKVTLAEFNCTGPGADVTNRVPWSRRFSPDDAAKYLTIDFINGKDWLPAYYY

SEQ ID NO: 17019 - DNA, 1400 bp, Zea mays subsp. mays
  misc_feature (1)..(1400): Ceres Seq. ID no. 12383804
  misc_feature (1)..(1400): Ortholog of  Ceres SEQ ID NO 14311981 as cited in SEQ ID NO 55703
  misc_feature (1)..(1400): Ortholog of  Ceres SEQ ID NO 15226227 as cited in SEQ ID NO 63433
  misc_feature (1)..(1400): Ortholog of  Ceres SEQ ID NO 13599003 as cited in SEQ ID NO 0
gcacgagaccattacctagaacatcctaatcaaaagcggatgcgctcgggcgacgctcctctctctctttctctttctctcgctacatattcttcctctctctatctttgttctcctccgcccagctttcggacgcgacactcatcgcacattcccgtcaggccggtatccgcctcgggcttcgccgaaatcctacgctacctctctgatctctctccccccggccccgagcgcaccagattcacaccgcgcccgcataggtgcgtgtgcctgcggaagctggttgctgctcgcgctactagctgtttcgcgcggtgatcaacaatccggccgcgggagcggagctaggaggccgagagacacaatgaacatgttcgatgggatggagagtgctgggtacggcggcggcgctgggccgatgggcggggtggtgctgtcgcgggaccccaagccgcggctgcggtggacgcccgacctgcacgagcgcttcgtcgaggccgtcaccaagctcggcggggccgacaaggcgacgcccaagtcagtgctgcggctgatgggaatgaaagggctcaccttgtaccacttgaagagtcacctccagaaatacaggcttggaaagcagaccaagaaagacacgggtttggacgccggcagaggggcattcgcggcgcagggcatcaatttctccacaccagtacctcctcctagcattccatctacggccagtgataatacgggagaaacgccacttgcagatgcgctgaagtaccagattgaagtccaaaggaaactgcacgaacagctcgaggttcagaagaagctgcagatgcggatcgaggcgcaaggcaaatacttacagacgatactcgagaaggcccagagcaacctctcgtaccacgcgactggagccgcaaacctagaagcaaccaggtcgcagctgacggacttcaacctcgcgctctcaggcttcatggacaacgtgacccaggcgtgcgagcagaacaacggcgagctggtgaaagccatgtccgaggacggtctcagagcgaacaatctagactttcagccgtaccatggagttcatgacggggacgacgtcaagtgcgctacggacgaagggttgctacttctggacctaaacatcagaggcgggtacggtcatcggatttcgacagatctgaagatgaatcaacacatgcggtgaaaagttcagtagaaagaaaggcgaggacagtagtttaatcttgggtaacccatcaatctaagagaagaggtgcccttgtgtttgtgagaaattctttcggccatcttgattcctaacgatgcttctttacggtgatggtcagcgtattgcttatgtaaaatttggtgagaggctccgaataagggtaactaatctt

SEQ ID NO: 17020 - protein, 279 aa, Zea mays subsp. mays
  peptide (1)..(279): Ceres Seq. ID no. 12383805
MNMFDGMESAGYGGGAGPMGGVVLSRDPKPRLRWTPDLHERFVEAVTKLGGADKATPKSVLRLMGMKGLTLYHLKSHLQKYRLGKQTKKDTGLDAGRGAFAAQGINFSTPVPPPSIPSTASDNTGETPLADALKYQIEVQRKLHEQLEVQKKLQMRIEAQGKYLQTILEKAQSNLSYHATGAANLEATRSQLTDFNLALSGFMDNVTQACEQNNGELVKAMSEDGLRANNLDFQPYHGVHDGDDVKCATDEGLLLLDLNIRGGYGHRISTDLKMNQHMR

SEQ ID NO: 17021 - protein, 277 aa, Zea mays subsp. mays
  peptide (1)..(277): Ceres Seq. ID no. 12383806
MFDGMESAGYGGGAGPMGGVVLSRDPKPRLRWTPDLHERFVEAVTKLGGADKATPKSVLRLMGMKGLTLYHLKSHLQKYRLGKQTKKDTGLDAGRGAFAAQGINFSTPVPPPSIPSTASDNTGETPLADALKYQIEVQRKLHEQLEVQKKLQMRIEAQGKYLQTILEKAQSNLSYHATGAANLEATRSQLTDFNLALSGFMDNVTQACEQNNGELVKAMSEDGLRANNLDFQPYHGVHDGDDVKCATDEGLLLLDLNIRGGYGHRISTDLKMNQHMR

SEQ ID NO: 17022 - protein, 273 aa, Zea mays subsp. mays
  peptide (1)..(273): Ceres Seq. ID no. 12383807
MESAGYGGGAGPMGGVVLSRDPKPRLRWTPDLHERFVEAVTKLGGADKATPKSVLRLMGMKGLTLYHLKSHLQKYRLGKQTKKDTGLDAGRGAFAAQGINFSTPVPPPSIPSTASDNTGETPLADALKYQIEVQRKLHEQLEVQKKLQMRIEAQGKYLQTILEKAQSNLSYHATGAANLEATRSQLTDFNLALSGFMDNVTQACEQNNGELVKAMSEDGLRANNLDFQPYHGVHDGDDVKCATDEGLLLLDLNIRGGYGHRISTDLKMNQHMR

SEQ ID NO: 17023 - DNA, 1651 bp, Zea mays subsp. mays
  misc_feature (1)..(1651): Ceres Seq. ID no. 12424033
  misc_feature (1)..(1651): Ortholog of  Ceres SEQ ID NO 12617235 as cited in SEQ ID NO 63990
gcacgagaccattacctagaacatcctaatcgaaaaacagttattacacacagacagcagtccactcgcgattactactgtaatccccaccacaccacctcccgtcgagtggagtgcttcttggcgacctttctttgcatgtcaacgcagacaaaaagaacagcgccgccgcctccacgaccacgccggtcgccgagcctccgtctcctcccgagagatctcgcagccagccagccagttagccgccgtacgtggccacatggaggcgccgcgggcaaacaacggcaggaagcgcaagcccacgcctcccgccggcctgggggccctccacgacgacttgctcgagcgggtcctcgcgcgcctcccgccggccacctacttccgcctgcgcgccgtctgcagccgctggcgcgccgccgcggcgtccccgaccttcctccacgcctgcgcccgcgtcccctcccgggacccgtggttcctcatgctctccgactccgactccgggccccgcccgcccgtcgccttcgacgccgccggccgcagctggaaccgctgccacgccgcgccgggggccgccgtgcccgtggccgcgtcggccggcctcgtcctctaccgcgcgccggccacgggcgcgctcaccgtcgccaacccgctcacgggcgcgtcccgcgcgctcccctcgccgccgcaggccgcgcgccagctgcaggccatcgccatgtacggcgccggcggtccctaccgcgtggccctcttcgcgggcgacctccccgacgacctctccatggcggtctacgactcctccagcgactcgtgggaggggcccctgccgctcgcccgcaagcccggggacgactcctgccccgacgcgccggcgcccgacgacacggtctacttcctcagcaagtccggggacgtcgtggccaccaacatgcagcgcagcgcgtctaagcagtactcctcctcagtggtcgtgcgccgcgacggcgacggcgacgccgcctttgcctacttcctcagctactcgggcacagtcgtcgcctgcgacacggcgcgccgcaccttcgcggagctgccccgcatcctccccgtctacttcgagtactccatcgacgtcgtcgcgtgcggcgcagcggcctacgccgtcgtgctttcggaatacctcggcacggccagcctgcgcgtctgggagttcgccgggggcgcgtggcggcaggtggccgccatnccgcccgccatgtcgcacggattccacggcacgcggcccgatatcaactgcgtcggccacggcgaccgcctcatggtttgcgtcacctccgccgaggccaacgcctgcttcatgtgcgacgtggccagcaaccagtgggaggagctgcccaagtacgtcaatgccgacggcgaggccagcgagttcctggccgccttctccttcgagcccagagtggaggtcaccgtataagcgcttatggttatagtgttactacgattaattgctttcttcattaaggcgccttagttttggttcggctcctactccgtgtgattgatttcttcgtgtttgtgtgtgtgcatgtacttaacttacggtaccgaattgtaatgtcatttttcattgacattatttgtcttcaataaaattgcagattcgtgt

SEQ ID NO: 17024 - protein, 399 aa, Zea mays subsp. mays
  peptide (1)..(399): Ceres Seq. ID no. 12424034
  misc_feature (323)..(323): Xaa is any aa, unknown or other
MEAPRANNGRKRKPTPPAGLGALHDDLLERVLARLPPATYFRLRAVCSRWRAAAASPTFLHACARVPSRDPWFLMLSDSDSGPRPPVAFDAAGRSWNRCHAAPGAAVPVAASAGLVLYRAPATGALTVANPLTGASRALPSPPQAARQLQAIAMYGAGGPYRVALFAGDLPDDLSMAVYDSSSDSWEGPLPLARKPGDDSCPDAPAPDDTVYFLSKSGDVVATNMQRSASKQYSSSVVVRRDGDGDAAFAYFLSYSGTVVACDTARRTFAELPRILPVYFEYSIDVVACGAAAYAVVLSEYLGTASLRVWEFAGGAWRQVAAXPPAMSHGFHGTRPDINCVGHGDRLMVCVTSAEANACFMCDVASNQWEELPKYVNADGEASEFLAAFSFEPRVEVTV

SEQ ID NO: 17025 - protein, 325 aa, Zea mays subsp. mays
  peptide (1)..(325): Ceres Seq. ID no. 12424035
  misc_feature (249)..(249): Xaa is any aa, unknown or other
MLSDSDSGPRPPVAFDAAGRSWNRCHAAPGAAVPVAASAGLVLYRAPATGALTVANPLTGASRALPSPPQAARQLQAIAMYGAGGPYRVALFAGDLPDDLSMAVYDSSSDSWEGPLPLARKPGDDSCPDAPAPDDTVYFLSKSGDVVATNMQRSASKQYSSSVVVRRDGDGDAAFAYFLSYSGTVVACDTARRTFAELPRILPVYFEYSIDVVACGAAAYAVVLSEYLGTASLRVWEFAGGAWRQVAAXPPAMSHGFHGTRPDINCVGHGDRLMVCVTSAEANACFMCDVASNQWEELPKYVNADGEASEFLAAFSFEPRVEVTV

SEQ ID NO: 17026 - protein, 316 aa, Zea mays subsp. mays
  peptide (1)..(316): Ceres Seq. ID no. 12424036
ARDHYLEHPNRKTVITHRQQSTRDYYCNPHHTTSRRVECFLATFLCMSTQTKRTAPPPPRPRRSPSLRLLPRDLAASQPVSRRTWPHGGAAGKQRQEAQAHASRRPGGPPRRLARAGPRAPPAGHLLPPARRLQPLARRRGVPDLPPRLRPRPLPGPVVPHALRLRLRAPPARRLRRRRPQLEPLPRRAGGRRARGRVGRPRPLPRAGHGRAHRRQPAHGRVPRAPLAAAGRAPAAGHRHVRRRRSLPRGPLRGRPPRRPLHGGLRLLQRLVGGAPAARPQARGRLLPRRAGARRHGLLPQQVRGRRGHQHAAQRV

SEQ ID NO: 17027 - DNA, 1762 bp, Zea mays subsp. mays
  misc_feature (1)..(1762): Ceres Seq. ID no. 13493688
  misc_feature (1)..(1762): Ortholog of  Ceres SEQ ID NO 15169264 as cited in SEQ ID NO 55026
  misc_feature (1)..(1762): Ortholog of  Ceres SEQ ID NO 15224709 as cited in SEQ ID NO 68627
tagaacatcctaatcgaaaaaagcccaagaccaagtgaaacatcaacacttccacgttccacccatggctaattctcatcaccggtgcaccagcgtcgcctccgagctggaaggcacgctgctcatctccggcagcctcttcccatacttcttcctcgtcgccctcgaggccggcggccctctcagggccctgctcttgctcgccgtgtaccctcttcgcgctgctcggcgccgccttctcgtgggacgacctacccctgctcgccatgaccttcctgtccaccgccggcctcgacgtcggcgacgtgaccgcggcggcgcgggccacgctgcccaggttcttcctggccgacctgcggggcagcgcgttccgggccttgtcgcgccacgccggcggcggcgagaggtacgtcgtcacgcacctgcccaggctcgtcgcggagccgttcgtgagggagtacctcggcgccgacgtccgcgtcgtcggcacggagctgcgggtggtcgcgggtaagaggttctcaggcacggtggtggtggcctctcccggcgtcgcggcggcagcggctggcgccgaccgcagcctgggtgctctggtggccgtccttgggagcgaccgggtcgtcggcgtggggctctactgccccggcgccggcggggaccagcagccggcgtttctgcaggcttgccaggagcgccgcatggtgtccgcgccggagaaggcggcggcggtgcccctgccgaggagcgagtacccgcggccgctggtgttccacgacggccgcctcgtgcgccggcccgacccgcttgtgtgcctggccatcttgctgtggctcccgctcggcgtgctcctgtccgtgacgcgcctcctcttcggcttcctcccgcacggcgccgggctcctgctgtccgcggccacgggcttccggatgcgcggcagcctcgggggagcggcggcggcgggcccgcggcgaggcacattgttcgcgtgcaaccaccagacgctgatggacccggtgatcctcgcgacggtgctgcgccggaaggtgaccgccgtgacgtacagcctgtccagcttctcggagctgatcgcgccgatcccgaccgtccggctgacgcgcgaccgcggcagggacagccggatcatgcagcgcgagctcgcgcgcggcgacctggtggtctgcccggagggcaccacctgccgcgagccctacctgctgcgcttcagcccgctgttcgcggagatcgccgacgaggtcacgccgacggccgtgcgggccggcggcgccatgttccacggctccaccgtgcggggccacaagtggctcgactccgtcttcttcctcatgaacccggcgccgtggtacgagatccggatcctggccacctgcagtggcagtggcggcgcgtccagcctcgacgtggcgaacggcgtccagcgcatgatcggcgatgagcttgggttcgagtgcaccggggctcacgcgcagggacaagtaccggatgatcgccggccacgacggcgtcgacgcgaggtcgtcgccgtcgtcatagctgaagagcaaatgtgccagcgtacgcttgtggggactcatgcacagaaatgcaaaacgttcaactggttctccttctccatcaccgccctgctcttaaacacagacattcagtgttgcagcgactaggctccattcttcaggaaatgaccggtttagacggttttggaacaagcccaaccaaattttagtgattttttatgttcctt

SEQ ID NO: 17028 - protein, 471 aa, Zea mays subsp. mays
  peptide (1)..(471): Ceres Seq. ID no. 13493689
MTFLSTAGLDVGDVTAAARATLPRFFLADLRGSAFRALSRHAGGGERYVVTHLPRLVAEPFVREYLGADVRVVGTELRVVAGKRFSGTVVVASPGVAAAAAGADRSLGALVAVLGSDRVVGVGLYCPGAGGDQQPAFLQACQERRMVSAPEKAAAVPLPRSEYPRPLVFHDGRLVRRPDPLVCLAILLWLPLGVLLSVTRLLFGFLPHGAGLLLSAATGFRMRGSLGGAAAAGPRRGTLFACNHQTLMDPVILATVLRRKVTAVTYSLSSFSELIAPIPTVRLTRDRGRDSRIMQRELARGDLVVCPEGTTCREPYLLRFSPLFAEIADEVTPTAVRAGGAMFHGSTVRGHKWLDSVFFLMNPAPWYEIRILATCSGSGGASSLDVANGVQRMIGDELGFECTGAHAQGQVPDDRRPRRRRREVVAVVIAEEQMCQRTLVGTHAQKCKTFNWFSFSITALLLNTDIQCCSD

SEQ ID NO: 17029 - protein, 326 aa, Zea mays subsp. mays
  peptide (1)..(326): Ceres Seq. ID no. 13493690
MVSAPEKAAAVPLPRSEYPRPLVFHDGRLVRRPDPLVCLAILLWLPLGVLLSVTRLLFGFLPHGAGLLLSAATGFRMRGSLGGAAAAGPRRGTLFACNHQTLMDPVILATVLRRKVTAVTYSLSSFSELIAPIPTVRLTRDRGRDSRIMQRELARGDLVVCPEGTTCREPYLLRFSPLFAEIADEVTPTAVRAGGAMFHGSTVRGHKWLDSVFFLMNPAPWYEIRILATCSGSGGASSLDVANGVQRMIGDELGFECTGAHAQGQVPDDRRPRRRRREVVAVVIAEEQMCQRTLVGTHAQKCKTFNWFSFSITALLLNTDIQCCSD

SEQ ID NO: 17030 - protein, 250 aa, Zea mays subsp. mays
  peptide (1)..(250): Ceres Seq. ID no. 13493691
MRGSLGGAAAAGPRRGTLFACNHQTLMDPVILATVLRRKVTAVTYSLSSFSELIAPIPTVRLTRDRGRDSRIMQRELARGDLVVCPEGTTCREPYLLRFSPLFAEIADEVTPTAVRAGGAMFHGSTVRGHKWLDSVFFLMNPAPWYEIRILATCSGSGGASSLDVANGVQRMIGDELGFECTGAHAQGQVPDDRRPRRRRREVVAVVIAEEQMCQRTLVGTHAQKCKTFNWFSFSITALLLNTDIQCCSD

SEQ ID NO: 17031 - DNA, 1529 bp, Zea mays subsp. mays
  misc_feature (1)..(1529): Ceres Seq. ID no. 12362523
  misc_feature (1)..(1529): Ortholog of  Ceres SEQ ID NO 15171279 as cited in SEQ ID NO 51378
  misc_feature (1)..(1529): Ortholog of  Ceres SEQ ID NO 13596816 as cited in SEQ ID NO 62287
gcacgagaccattacctagaacatcctaatcgaaaaaggagcagtgagaactgcatgcaagaggcacaaagcagcagctagcagttcattcaggttagtcatcagaggtgacatcgctctggaactggaagacaagcagcaggaagacagagagatcaatggcagcgcaaggtgctggagcatcagcttctcccctgtccggcttccacgtggcgctgctcctcctcctcactatcttggcttccatccttgcaagggcggcgtcggtgggcgtgtgctacggcacgagcggcgacaacctgccgccggcgagcgcggtggtgggcatgctgcgcgacaacggcttcacggtggtgcggctctactggcccgacggcgacgcgctggcggcgctgggcgggagcgggatccgggtggtggtgggcgcgcccaacgaggccctgccggcgctggcgtccggcgcggccgcggccgcggcgtgggtccgcgacaacgtgcaggcgcacccggcggtggcgttccgctacgtggtggtgggcaacgaggtccccctggagcaggcgccgctgctcgtgccggccatggagaacgtgcacgcggcgctggcggccgccgggctgggccacgtgaaggtcaccacggccgtctcgcagggcgccatcgccgtgcacctgcctccgtcggtgggcgagttcacggaggaggcccgctcgttcatgggctacgtggtgacgttcctggcgcggacccgcgcgccgctgctcgccaacctgtacccctacttcgtctacacgctggggctgggccacctgggcatggacttcgcgctgttcacggcgcccgggacggtggtgcaggacggggagtacgggtaccagaacctgttcgacgccacggtggacgcgctgtacgcggcggtggggaggctcggcgtcgccggcggggacggcgtcagggtggtggtgtcggagaccgggtggccgacggcgggcggcgccgcagcgtcgctggagaacgccaggacgtacaaccagaacctggtgaggcacgtgtggaagggcacgccgcggaggcccaggagggtggaggcatacgtgttcgccatgttcaacgaggacaagaaggacgccggagtggagcagaactggggcctcttctacccgaacatggagagggtttaccccatcacctttggagccggacggcgacactgacgacattatagaaggagcttggtggacgacgaccggtgcattgcatgcaatgatcgaatttgcactcgaccgatccaagaaatgaatacgtactggggtcatggtgtgtgtgttttatttgcgtgtacacagcattcaatgtacaatatatagaggaattgttgcgaccgctgagcgtttgtttgctcanacgtgtacgcggagaggggtcgatgcgtagctgggtctgggtgtacgtaaacgtcatgcgtagcagtatgcacaagcgtatgtacattccgtgactcttgtgagctatatacttgtgaatttgtg

SEQ ID NO: 17032 - protein, 351 aa, Zea mays subsp. mays
  peptide (1)..(351): Ceres Seq. ID no. 12362524
MAAQGAGASASPLSGFHVALLLLLTILASILARAASVGVCYGTSGDNLPPASAVVGMLRDNGFTVVRLYWPDGDALAALGGSGIRVVVGAPNEALPALASGAAAAAAWVRDNVQAHPAVAFRYVVVGNEVPLEQAPLLVPAMENVHAALAAAGLGHVKVTTAVSQGAIAVHLPPSVGEFTEEARSFMGYVVTFLARTRAPLLANLYPYFVYTLGLGHLGMDFALFTAPGTVVQDGEYGYQNLFDATVDALYAAVGRLGVAGGDGVRVVVSETGWPTAGGAAASLENARTYNQNLVRHVWKGTPRRPRRVEAYVFAMFNEDKKDAGVEQNWGLFYPNMERVYPITFGAGRRH

SEQ ID NO: 17033 - protein, 295 aa, Zea mays subsp. mays
  peptide (1)..(295): Ceres Seq. ID no. 12362525
MLRDNGFTVVRLYWPDGDALAALGGSGIRVVVGAPNEALPALASGAAAAAAWVRDNVQAHPAVAFRYVVVGNEVPLEQAPLLVPAMENVHAALAAAGLGHVKVTTAVSQGAIAVHLPPSVGEFTEEARSFMGYVVTFLARTRAPLLANLYPYFVYTLGLGHLGMDFALFTAPGTVVQDGEYGYQNLFDATVDALYAAVGRLGVAGGDGVRVVVSETGWPTAGGAAASLENARTYNQNLVRHVWKGTPRRPRRVEAYVFAMFNEDKKDAGVEQNWGLFYPNMERVYPITFGAGRRH

SEQ ID NO: 17034 - protein, 210 aa, Zea mays subsp. mays
  peptide (1)..(210): Ceres Seq. ID no. 12362526
MENVHAALAAAGLGHVKVTTAVSQGAIAVHLPPSVGEFTEEARSFMGYVVTFLARTRAPLLANLYPYFVYTLGLGHLGMDFALFTAPGTVVQDGEYGYQNLFDATVDALYAAVGRLGVAGGDGVRVVVSETGWPTAGGAAASLENARTYNQNLVRHVWKGTPRRPRRVEAYVFAMFNEDKKDAGVEQNWGLFYPNMERVYPITFGAGRRH

SEQ ID NO: 17035 - DNA, 832 bp, Zea mays subsp. mays
  misc_feature (1)..(832): Ceres Seq. ID no. 12355032
  misc_feature (1)..(832): Ortholog of  Ceres SEQ ID NO 14306303 as cited in SEQ ID NO 56884
gtgattagcaagcacgggcacggtaaagcagagagcctcttgctgttagtgaactaaggcgacggagaccgcgagggcggcgaactaggctgggcagcgatgatggcgacctcggccagcggcgtctccctcctcctcctcctcgcccatccggcgccgccaccgcaccccgccaacggcgccagcagcctgtggcgcggcggtggcgccgcgctagctcctcatcctgctcgcttcgcggccaagaggaggacgctccggttggttaacgtcagcgtcagctgcagcgccgaggcgctgcgctccgacggcgctggcgcggagccggcggtgccgcggtctgtgccggtgcgcgtcgcctacgagctgcaacaggccggccaccgctacctcgacgtcagaacggagggcgagtttagcgccggccaccctgaaggagctgtgaacatcccatacatgaacaaaaccggctcaggaatgacgaaaaacgctcactttctcgagcaagtgtcgagggctttcgggaaggacgacgagatcatcgtgggctgccaaagcggcaagaggtctctcatggcggcgaccgagctctgctccgctggcttcaccgctgtcaccgacatcgccggcggattctcgacctggagggagaacgagctgcctaccgtccagtgacggtgatttcagcctgcctcgccggcgtcgtaagtgtggttggagcttgcccagcgttttctgtccaagcctgtacatatgtcttcctgccttctgctatagttctggaataaagagtgctggggaatggaatggagcatgttgtaaagtaaagctc

SEQ ID NO: 17036 - protein, 191 aa, Zea mays subsp. mays
  peptide (1)..(191): Ceres Seq. ID no. 12355033
MMATSASGVSLLLLLAHPAPPPHPANGASSLWRGGGAALAPHPARFAAKRRTLRLVNVSVSCSAEALRSDGAGAEPAVPRSVPVRVAYELQQAGHRYLDVRTEGEFSAGHPEGAVNIPYMNKTGSGMTKNAHFLEQVSRAFGKDDEIIVGCQSGKRSLMAATELCSAGFTAVTDIAGGFSTWRENELPTVQ

SEQ ID NO: 17037 - protein, 190 aa, Zea mays subsp. mays
  peptide (1)..(190): Ceres Seq. ID no. 12355034
MATSASGVSLLLLLAHPAPPPHPANGASSLWRGGGAALAPHPARFAAKRRTLRLVNVSVSCSAEALRSDGAGAEPAVPRSVPVRVAYELQQAGHRYLDVRTEGEFSAGHPEGAVNIPYMNKTGSGMTKNAHFLEQVSRAFGKDDEIIVGCQSGKRSLMAATELCSAGFTAVTDIAGGFSTWRENELPTVQ

SEQ ID NO: 17038 - DNA, 1781 bp, Zea mays subsp. mays
  misc_feature (1)..(1781): Ceres Seq. ID no. 15175813
  misc_feature (1)..(1781): Ortholog of  Ceres SEQ ID NO 13655992 as cited in SEQ ID NO 65504
  misc_feature (1)..(1781): Ortholog of  Ceres SEQ ID NO 13587581 as cited in SEQ ID NO 0
acaacactcgtttgcctctcatctcgcttcgcttccattccatcgcgccagtcgccagactcacctgggagagtggggggaaatatcaattagaaacaacgaggaattagcaaagaaagaagaataactcccataagaaaaatcgccaaatacgccattcatcttcttcgcccgggtttcagaacgtacggcagtttagccaggatggtggcgatcgagaaccagagccaggccgcggtggcggcggaggcggtggcggcgccggcgtcgcggatccccagggaggcgcggcgcctgctgcacgagctggcggcggcgtgggcggacgtggccgactgccgcgcgctggaggtcgtgccgctcaagggggccatgaccaacgaggtctaccaggcgcgctggctcactgcaggccctgccggccagaaggaggagcccagggcggagagggaggtgaggaaggtgctcgtgcggatttacggcgacggcgtcgacctcttcttcgaccgcgaggacgaggtgcgcaccttcgagtgcatgtcacgccatggccagggtccccgcctcctcggccgctttccgaacggccgcgtcgaggagttcatccacgcaaggacattgtcagctgccgaccttcgcgatcctgaaatttcagctctggtggcttccaagctgagggagttccacaaccttgacatgcctggtcccaaatctgtgctcatttgggacagacttaggaactggctcagaactgccaagagcttgtgtccacctgaagaagccaaggaatttcggttggacagtctggagaaccagattactgcattggagaacgagtgttcaggtgattaccagtggattggtttctgtcacaatgatcttcagtatggcaatatcatgattgatgaagagaccaacgtgctgaccatcattgattatgagtatgcaagcttcaacccagttgcatatgacattgctaaccatttctgtgagatggcagcagactatcattcatcaaagcctcatatactggactacagcagatatccagatgttgatgagcagaagcgttttgttaagacctacctgaacatttctggtgaggaacctgatgcggaagttgtggagaacctgctccaaagcattgagaagcacacgctcgccagccatctagtatggggcctctggggaataatttcggaccatgttaacgacattgacttcgactacaaggagtatgcgaggcagagattcgagcagtactggcacaagtctgcgatcttaacatcttgaacatgtgtataaacacccgtacgtggtctcaggaactccctgagggcctgtggctgcacacacgaaattgtgcagtgccactgacacatagataagctgtgaaagaagaaatactgacgacgacgacgaataatcccgttttgggctcgggaggttatttctccgcaactcgatgagcttcaggcttcagcttcaggaaggaaggaaggagctatggggatttggctgcccgcttatgctgtaccaatgcaattaaaagataaagatccggtccggtgttgcgtgtgctatgtttagttttggctagcaccgccgagagccgtggtcctgttgtggtgtttctagtttctgtatgcttgatgttgttagtgtgctggataatttggttttgtgcttggggagtccttagctttgggacaacgcatacattgtatactgggtagatgtataaacataaaacagctatgggaatttggttctctaccttg

SEQ ID NO: 17039 - protein, 362 aa, Zea mays subsp. mays
  peptide (1)..(362): Ceres Seq. ID no. 15175814
MVAIENQSQAAVAAEAVAAPASRIPREARRLLHELAAAWADVADCRALEVVPLKGAMTNEVYQARWLTAGPAGQKEEPRAEREVRKVLVRIYGDGVDLFFDREDEVRTFECMSRHGQGPRLLGRFPNGRVEEFIHARTLSAADLRDPEISALVASKLREFHNLDMPGPKSVLIWDRLRNWLRTAKSLCPPEEAKEFRLDSLENQITALENECSGDYQWIGFCHNDLQYGNIMIDEETNVLTIIDYEYASFNPVAYDIANHFCEMAADYHSSKPHILDYSRYPDVDEQKRFVKTYLNISGEEPDAEVVENLLQSIEKHTLASHLVWGLWGIISDHVNDIDFDYKEYARQRFEQYWHKSAILTS

SEQ ID NO: 17040 - protein, 306 aa, Zea mays subsp. mays; identical to SEQ ID NO: 9245
  peptide (1)..(306): Ceres Seq. ID no. 15175815

SEQ ID NO: 17041 - protein, 251 aa, Zea mays subsp. mays
  peptide (1)..(251): Ceres Seq. ID no. 15175816
MSRHGQGPRLLGRFPNGRVEEFIHARTLSAADLRDPEISALVASKLREFHNLDMPGPKSVLIWDRLRNWLRTAKSLCPPEEAKEFRLDSLENQITALENECSGDYQWIGFCHNDLQYGNIMIDEETNVLTIIDYEYASFNPVAYDIANHFCEMAADYHSSKPHILDYSRYPDVDEQKRFVKTYLNISGEEPDAEVVENLLQSIEKHTLASHLVWGLWGIISDHVNDIDFDYKEYARQRFEQYWHKSAILTS

SEQ ID NO: 17042 - DNA, 1649 bp, Zea mays subsp. mays
  misc_feature (1)..(1649): Ceres Seq. ID no. 15180302
  misc_feature (1)..(1649): Ortholog of  Ceres SEQ ID NO 13594345 as cited in SEQ ID NO 58043
  misc_feature (1)..(1649): Ortholog of  Ceres SEQ ID NO 14308594 as cited in SEQ ID NO 60384
  misc_feature (1)..(1649): Ortholog of  Ceres SEQ ID NO 12614112 as cited in SEQ ID NO 60891
  misc_feature (1)..(1649): Ortholog of  Ceres SEQ ID NO 14302832 as cited in SEQ ID NO 64926
  misc_feature (1)..(1649): Ortholog of  Ceres SEQ ID NO 13662880 as cited in SEQ ID NO 65422
  misc_feature (1)..(1649): Ortholog of  Ceres SEQ ID NO 13596089 as cited in SEQ ID NO 68373
tagttcatttatgatttcctgcgagcacaaagctagcgaagataccaaacaatggggagcacgagcgccacaggcaccacgtcgtcttcctcatcggctgcccacgggggcggtgccgcacacgtactgctcctgccgtacccgggcgcgcagggccatacaaacccgctgctccagttcggccgctgcctcgcctaccacggcctccgccccacgctcgtcacctcgcggtacgtgctctccaccaccccgcctcccggggagcccttcagggtggccgccatttccgatggcttcgacgacggcggggcggccgcgtgccccgacctcgacgtgtactggcgccagctcgaggccgtcggctcggagacgctggcggagctgatccgctccgaggccgccgatgggcggcctgtgcgcgtgctggtttacgacccgcacctgccgtgggcgcgacgggtggcacaggcggccgggctggcggcagcggcgttcctatcgcagccatgcgccgtcgacgtcgtctacggggaggtgtgtgcaggacggctgccactgccggtggtggacgggatagagctgtttgcacgcgggctgctgggtgtcgagctcggtcccgacgacgttccgccgttcgcagcaaagccagactggtgccctgtgttccttcgggcatcattgcggcaatttgaggggctggaggacgccgacgacgtgctcgtcaactcattccacgagatcgaacccaaggaggcagattatatggccctaacatggcatgcaaagacaataggcccaactttgccatcattttatcttgatgatgaccgtttgcccttgaacaagacttacggtttcaacctcttcaacagcagcgagtcatgtctggcttggcttgacaaacagcttccgtgttctgttgttcttgtatcctatggtactgtctctgattatgatgaagcacagttagaggagcttggcaatggattgtacaattctggcaaaccattcatttgggttgtgaggtcaaacgaagaacacaagttgtccaatgaacttcgtgacaagtgcaaggaacgtggccttattgtttcttggtgcccccagctggaagttctagcacataaagctacaggttgtttcttcacacattgcggatggaactcgacattggaagcaattgttaatggtgtgccaatggtggcaataccacactgggcagaccagccgaccatatcaaaatatatggagagcatgttgggcttgggtgtccgagtgcgcaaggatgagaaaggcttggtaacgagggacgaggtggaaaggtgcatcaaggatgtcatggatggtgatagtaaggataagtataggaagagtgccactatgtggatgcaaaaggccaaggcagctatgcagaatggagggagctcggccaagaatattacagaattcgccgcgaagtattctttaagttaatttttcaaatatttcgtaaaaaaagttaattttcaaagatataatgatagtgttataattacttcctataccttcatggattgtatgccttcctgcatgttatatttttgtctcgggattgtgcgtattacgttttgacttgatgatgtacatgctacagcagcaacctccacgtc

SEQ ID NO: 17043 - protein, 473 aa, Zea mays subsp. mays
  peptide (1)..(473): Ceres Seq. ID no. 15180303
MGSTSATGTTSSSSSAAHGGGAAHVLLLPYPGAQGHTNPLLQFGRCLAYHGLRPTLVTSRYVLSTTPPPGEPFRVAAISDGFDDGGAAACPDLDVYWRQLEAVGSETLAELIRSEAADGRPVRVLVYDPHLPWARRVAQAAGLAAAAFLSQPCAVDVVYGEVCAGRLPLPVVDGIELFARGLLGVELGPDDVPPFAAKPDWCPVFLRASLRQFEGLEDADDVLVNSFHEIEPKEADYMALTWHAKTIGPTLPSFYLDDDRLPLNKTYGFNLFNSSESCLAWLDKQLPCSVVLVSYGTVSDYDEAQLEELGNGLYNSGKPFIWVVRSNEEHKLSNELRDKCKERGLIVSWCPQLEVLAHKATGCFFTHCGWNSTLEAIVNGVPMVAIPHWADQPTISKYMESMLGLGVRVRKDEKGLVTRDEVERCIKDVMDGDSKDKYRKSATMWMQKAKAAMQNGGSSAKNITEFAAKYSLS

SEQ ID NO: 17044 - protein, 236 aa, Zea mays subsp. mays
  peptide (1)..(236): Ceres Seq. ID no. 15180304
MALTWHAKTIGPTLPSFYLDDDRLPLNKTYGFNLFNSSESCLAWLDKQLPCSVVLVSYGTVSDYDEAQLEELGNGLYNSGKPFIWVVRSNEEHKLSNELRDKCKERGLIVSWCPQLEVLAHKATGCFFTHCGWNSTLEAIVNGVPMVAIPHWADQPTISKYMESMLGLGVRVRKDEKGLVTRDEVERCIKDVMDGDSKDKYRKSATMWMQKAKAAMQNGGSSAKNITEFAAKYSLS

SEQ ID NO: 17045 - DNA, 733 bp, Zea mays subsp. mays; identical to SEQ ID NO: 13847
  misc_feature (1)..(733): Ceres Seq. ID no. 12551453
  misc_feature (1)..(733): Ortholog of  Ceres SEQ ID NO 13663563 as cited in SEQ ID NO 66853

SEQ ID NO: 17046 - protein, 173 aa, Zea mays subsp. mays; identical to SEQ ID NO: 13848
  peptide (1)..(173): Ceres Seq. ID no. 12551454

SEQ ID NO: 17047 - protein, 161 aa, Zea mays subsp. mays; identical to SEQ ID NO: 13849
  peptide (1)..(161): Ceres Seq. ID no. 12551455

SEQ ID NO: 17048 - protein, 143 aa, Zea mays subsp. mays; identical to SEQ ID NO: 13850
  peptide (1)..(143): Ceres Seq. ID no. 12551456

SEQ ID NO: 17049 - DNA, 1835 bp, Zea mays subsp. mays
  misc_feature (1)..(1835): Ceres Seq. ID no. 12415689
  misc_feature (1)..(1835): Ortholog of  Ceres SEQ ID NO 14307991 as cited in SEQ ID NO 65737
  misc_feature (1)..(1835): Ortholog of  Ceres SEQ ID NO 15170167 as cited in SEQ ID NO 66224
  misc_feature (1)..(1835): Ortholog of  Ceres SEQ ID NO 13502874 as cited in SEQ ID NO 66298
  misc_feature (1)..(1835): Ortholog of  Ceres SEQ ID NO 12614124 as cited in SEQ ID NO 68392
gcacgagaccattacctagaacatcctaatcgaaaaaaaataatgctgcgcgcgcacgagcacgacacgagctttcttccatcaagacatggcgacgccggagctttggtggtactggtggctatgggtgacgacgatgctggccgtcgtcgtctcgaccgtcgtctgctacctgaccaaccagcaccgccgctgggggggctggggctcctcctcagggcgtcgctcggccgccgggcccgcgtcctctcccgctcatcggcaacctgctggacctgcggcgcgcgcccggcagcctccaccacacgctggcgcgcctggcccgcgcgcacggcgcccccgtcatgcgcctcgacctgggcctggtcccggccgtggtcgtctcctcccgcgacgctgcacgggaggcgttcgcggcgcacgaccgccgcatcgcggcacgccccgtcccggacagcaagcgcgcgctcggcttctgcgaccgctccatgctctcgctgcccagctcggccccgctctggcggaccctgcgcggcgtcatggccgcgcacgtcctgtcgccgcgcagcctcgcggcgtcgcgcgccgcgcgggagcgcaaggtcgccgacctgatcgggtacctccgcgcgcgggccgggaccgtggtggatcttaaagaggccgtctatggcggcgtcgccaacctcgtctcgactgccatgttctccatcgacgtcgtcgacgtgggcgccgccgagtcgtcgtcatcgtcgtcggcggcggcccacgggttgcaggagctcctggaggagctcatgcagtgcatggcccagcctaacgtctccgacttcttcccgttcctcagcgcactcgacctccaggggtgtcgtcgccgggtggccgtgcaactgggccaggtcctacaggtcttggacgacatcactgaccgccgtttggcctcctcctcctcctcctccacgtccagcaagggcggggacaggcgcggcgacttcctcgacatcctcctaggacctccagtccacgggcaagatcacgcgcgacaacgtgacgctgacgctcttcgacatcttcgcggccgggagcgacaccatggcgctgaccgtggtgtgggcgatggccgagctgctccgcaacccgggcgtgatggccaggctgcgcgcggaggtcagggacgcgctgggcggcagggacgccgtcgaggaggccgacgcggcgggcctgccgttcctgcaggccgtcgtgagggaggccatgcggctgcacccggcggcgcccgtgctgctgccgcacaaggccgtggaggacggggtacagataggcggctacgcggtgcccaggggttgcaccgtgatcttcaactcgtgggcgatcatgcgcgacccggcggcgtgggagaggcccgacgagttcctgccggagcggttcctggccagggacctggacttccgcgggaagcagctggagttcgtcccgttcggctccggccgtaggctgtgcccaggcgtgcccatggcggagcgggtggtgccgctggttctagcgtcgctggtgcacgcgttccagtggcagctgccggccggcatgtcggcggaccaggtcgacgtcagcgacaagttcaccaccaccagtgttttagccttccctcctatcaaagctgtgcctctgctctgatcaccacctagcaacccagcttgagtgtccagtcgattttggccagcaaaatcggaaaagaaatccctgcagccggctgcacacaagcaccacgcaggcttcgttcgtgacacgtatccacgcccaacaattttaaagcaatataacatcaatcttaaagc

SEQ ID NO: 17050 - protein, 382 aa, Zea mays subsp. mays
  peptide (1)..(382): Ceres Seq. ID no. 12415690
MRLDLGLVPAVVVSSRDAAREAFAAHDRRIAARPVPDSKRALGFCDRSMLSLPSSAPLWRTLRGVMAAHVLSPRSLAASRAARERKVADLIGYLRARAGTVVDLKEAVYGGVANLVSTAMFSIDVVDVGAAESSSSSSAAAHGLQELLEELMQCMAQPNVSDFFPFLSALDLQGCRRRVAVQLGQVLQVLDDITDRRLASSSSSSTSSKGGDRRGDFLDILLGPPVHGQDHARQRDADALRHLRGRERHHGADRGVGDGRAAPQPGRDGQAARGGQGRAGRQGRRRGGRRGGPAVPAGRREGGHAAAPGGARAAAAQGRGGRGTDRRLRGAQGLHRDLQLVGDHARPGGVGEARRVPAGAVPGQGPGLPREAAGVRPVRLRP

SEQ ID NO: 17051 - protein, 334 aa, Zea mays subsp. mays
  peptide (1)..(334): Ceres Seq. ID no. 12415691
MLSLPSSAPLWRTLRGVMAAHVLSPRSLAASRAARERKVADLIGYLRARAGTVVDLKEAVYGGVANLVSTAMFSIDVVDVGAAESSSSSSAAAHGLQELLEELMQCMAQPNVSDFFPFLSALDLQGCRRRVAVQLGQVLQVLDDITDRRLASSSSSSTSSKGGDRRGDFLDILLGPPVHGQDHARQRDADALRHLRGRERHHGADRGVGDGRAAPQPGRDGQAARGGQGRAGRQGRRRGGRRGGPAVPAGRREGGHAAAPGGARAAAAQGRGGRGTDRRLRGAQGLHRDLQLVGDHARPGGVGEARRVPAGAVPGQGPGLPREAAGVRPVRLRP

SEQ ID NO: 17052 - protein, 317 aa, Zea mays subsp. mays
  peptide (1)..(317): Ceres Seq. ID no. 12415692
MAAHVLSPRSLAASRAARERKVADLIGYLRARAGTVVDLKEAVYGGVANLVSTAMFSIDVVDVGAAESSSSSSAAAHGLQELLEELMQCMAQPNVSDFFPFLSALDLQGCRRRVAVQLGQVLQVLDDITDRRLASSSSSSTSSKGGDRRGDFLDILLGPPVHGQDHARQRDADALRHLRGRERHHGADRGVGDGRAAPQPGRDGQAARGGQGRAGRQGRRRGGRRGGPAVPAGRREGGHAAAPGGARAAAAQGRGGRGTDRRLRGAQGLHRDLQLVGDHARPGGVGEARRVPAGAVPGQGPGLPREAAGVRPVRLRP

SEQ ID NO: 17053 - DNA, 1731 bp, Zea mays subsp. mays
  misc_feature (1)..(1731): Ceres Seq. ID no. 12376833
  misc_feature (1)..(1731): Ortholog of  Ceres SEQ ID NO 12327642 as cited in SEQ ID NO 20497
gcacgagaccattacctagaacatcctaatcaaaagcccgattccccattcgctcctcacctctctgaacgccgatccacgctagaacgcgccatgccggccgatgccgctgccgctgccgccgcgcccgcccccgcaccgcatccacctccggcgatcctggacgctcgcacgggcggccgcatcctacgccgcgcggcggggcatctcgtccacccagcctctctcccgccgctcctcctcgcggcgctcctcctcctcctcttccgctccgctctcctggctggcacgctccgtctcgcctcctttgctgaccacgacccggccctccgctcccttctcgcccgcctctcctctcccaatccgccatcgccgccgcctcccccacaccacctcccgcgacgccgctcgccgttcacctccccctcgtcctctctctccgacgatgatatcctggtcagccccctcgatcccaccgcctcaactccctcccgccgccgcaactcctcctaccaccatgtccaattcacctcctactccaccgtgcccaaaccctatacgttgccgctcccggcctccgcttcccccttcttcatcgccgtctataatgagacggcgcctccgaagcccgcctcgcggcggggcagcgagcttggcctgcttgacttgaccaggcgggacgcagcggccatcgtcaacctcctcgcgctgctgtcggtccgcacatatcttcgcgatcctcgggtacatcgccgtgcactccattgcgctgggcgcagtgtttgcgtccgtggcggggcaccacagacctgggcagcgtctagtgttcctcctcaccggtgctgccaagggcgctaagagactcacagggttcgcgttcctccggtgggccacgagggacgccgttgtgcagatgctctgcctctggttctttgccgatgtgcacgaccaggcccagctgttcaggctctttgtggtcgccaaactcatgccattctccgcgtctgttaatccgtggcttggtgcagcggttgcaggcccagagctcggtggtttctttgttgcctgggctgtttttgatgcagttgtatcggttttgttcactgtggtgccttgggtggttgtcatggaccgtgatccacggccgcctgggcgcaatgctgtgaaggaagggtgctatcttgtatctctgatggcaactgatgccacaatgctcaagtgctgggaaacagttgtttgtggcagcatggggcggctcatcatggtgacatttggtggaaaggtttttggtggatttctgcattcaattgcgcaggtctacttcatggtggtatggctgctgttctactttgcagcaaggtgtaaggaggtgaggctgggtggtcgtcaatttggactggaggatgttgcagctgctcttgatggatttaggtagtgtctagttgccgcttgccgcctggatcatacatgaagagaggtatatttcatggcccatagtgcttattgatgaaacgctgctggtcttggctaagtagaggtttttgtagttatcttgatcttctaaatcttgctgagatggtaaatgatttggatgagagagagaacttgacaatgttgtatgtacagttttgccacagagtggtaatctgcttatagttccaccacatggcatacaaagaaaggatgtttggtccccttttccatggaaggttagaagcaagatacttggtg

SEQ ID NO: 17054 - protein, 285 aa, Zea mays subsp. mays
  peptide (1)..(285): Ceres Seq. ID no. 12376834
ARDHYLEHPNQKPDSPFAPHLSERRSTLERAMPADAAAAAAAPAPAPHPPPAILDARTGGRILRRAAGHLVHPASLPPLLLAALLLLLFRSALLAGTLRLASFADHDPALRSLLARLSSPNPPSPPPPPHHLPRRRSPFTSPSSSLSDDDILVSPLDPTASTPSRRRNSSYHHVQFTSYSTVPKPYTLPLPASASPFFIAVYNETAPPKPASRRGSELGLLDLTRRDAAAIVNLLALLSVRTYLRDPRVHRRALHCAGRSVCVRGGAPQTWAASSVPPHRCCQGR

SEQ ID NO: 17055 - protein, 254 aa, Zea mays subsp. mays
  peptide (1)..(254): Ceres Seq. ID no. 12376835
MPADAAAAAAAPAPAPHPPPAILDARTGGRILRRAAGHLVHPASLPPLLLAALLLLLFRSALLAGTLRLASFADHDPALRSLLARLSSPNPPSPPPPPHHLPRRRSPFTSPSSSLSDDDILVSPLDPTASTPSRRRNSSYHHVQFTSYSTVPKPYTLPLPASASPFFIAVYNETAPPKPASRRGSELGLLDLTRRDAAAIVNLLALLSVRTYLRDPRVHRRALHCAGRSVCVRGGAPQTWAASSVPPHRCCQGR

SEQ ID NO: 17056 - protein, 188 aa, Zea mays subsp. mays
  peptide (1)..(188): Ceres Seq. ID no. 12376836
MPLPLPPRPPPHRIHLRRSWTLARAAASYAARRGISSTQPLSRRSSSRRSSSSSSAPLSWLARSVSPPLLTTTRPSAPFSPASPLPIRHRRRLPHTTSRDAARRSPPPRPLSPTMISWSAPSIPPPQLPPAAATPPTTMSNSPPTPPCPNPIRCRSRPPLPPSSSPSIMRRRLRSPPRGGAASLACLT

SEQ ID NO: 17057 - DNA, 1480 bp, Zea mays subsp. mays
  misc_feature (1)..(1480): Ceres Seq. ID no. 12374638
  misc_feature (1)..(1480): Ortholog of  Ceres SEQ ID NO 13594176 as cited in SEQ ID NO 59144
gcacgagaccattacctagaacatcctaatcgaaaactcgagacgactcgtctccctctttcaataagttcggcagggtaggacggcttcttcctctgcgccttcaccttcgcctgcgctgccggggctcgtcgcatggtttttaaatcgggtttgtaagttttagatctttatgtcaactaccaatctgaggcggcgactccatcatggagacgttgatggaaggaaaaacgagcatgttgacatatccagtgctgattccctcaatgaacctctattagggaagtccaatgatgacaactttggatcagaggtgtatgatcctagaaaacaggatctgtgggatgatgatatgaagaaagaacaactacactggtcatttcttttctcaaacttgattacacaatgggcacaatggttagcaagcattattgtgagctcaggatctatctttggtagattatcccccttctcttcagagaaccaaataaatccagtatatcttagccctttacaggaacaaaggttggatactttaagacacagattgcaaatctcttttgatggctcccgtattgaacatcaagtgtgtattactgatgtagattggttttctaggttgacatcatctcatgaagtaaattaattaataatttatgggctttatcattattaggatgccttgaggcaactctggcgtttagcttatcccgctcgtgagattccaccactcaaatctgaattatggaaggagatgggttggcaaggcaacgatccatctactgatttcaggggtggtggactcatatcgttggagaacctcatcttttttgctaggaactaccctaattcatttcagatgcttctgaacaaagtacaagggcagagatcagattgggagtacccttttgcagttgctggtatcaacgtttcattcatgctggtccagatgttggatctgaagtcaagtgttccatcttctaagtatggaattcgtttccttgaattgcttggacgtgatgagaacgcctttgaccacctgtactgtgtggcctttcggttgcttgatgctcagtggcttgtgaaacgtgcctcctatatggaattcaatgaggtcttgaaatcaacaagaactcagctggagcgggaactggttctagatgatgtgctggaggtgaaggacctgccgtcctacactatgctggatgagtaagctaaagccgagctgttgaacttggacgctggagaattgactaagctggtctgatggctaatagttatctagcgtatgctgatgtctgatcctaaatgcttaggcggcccacatgccattttacattgccgcatattttttttcttgttgtatactgaggtcttatgaggtgtttatatatgattcctttgtaaatattgtgtttgttatatgttatccttttggacatgctggttccaaggaaataaagcaatcgatctcgtattc

SEQ ID NO: 17058 - protein, 157 aa, Zea mays subsp. mays
  peptide (1)..(157): Ceres Seq. ID no. 12374639
MSTTNLRRRLHHGDVDGRKNEHVDISSADSLNEPLLGKSNDDNFGSEVYDPRKQDLWDDDMKKEQLHWSFLFSNLITQWAQWLASIIVSSGSIFGRLSPFSSENQINPVYLSPLQEQRLDTLRHRLQISFDGSRIEHQVCITDVDWFSRLTSSHEVN

SEQ ID NO: 17059 - protein, 152 aa, Zea mays subsp. mays
  peptide (1)..(152): Ceres Seq. ID no. 12374640
MGWQGNDPSTDFRGGGLISLENLIFFARNYPNSFQMLLNKVQGQRSDWEYPFAVAGINVSFMLVQMLDLKSSVPSSKYGIRFLELLGRDENAFDHLYCVAFRLLDAQWLVKRASYMEFNEVLKSTRTQLERELVLDDVLEVKDLPSYTMLDE

SEQ ID NO: 17060 - protein, 117 aa, Zea mays subsp. mays
  peptide (1)..(117): Ceres Seq. ID no. 12374641
MLLNKVQGQRSDWEYPFAVAGINVSFMLVQMLDLKSSVPSSKYGIRFLELLGRDENAFDHLYCVAFRLLDAQWLVKRASYMEFNEVLKSTRTQLERELVLDDVLEVKDLPSYTMLDE

SEQ ID NO: 17061 - DNA, 511 bp, Zea mays subsp. mays
  misc_feature (1)..(511): Ceres Seq. ID no. 1669784
  misc_feature (1)..(511): Ortholog of  Ceres SEQ ID NO 12598739 as cited in SEQ ID NO 64558
  misc_feature (1)..(511): Ortholog of  Ceres SEQ ID NO 13586862 as cited in SEQ ID NO 0
agaattttcagaagagagcagaccgccaccgaagcacacaagcagcgtcgtcagggcgtgaaggcaccaccgaatctcgggagcagcagctatggcgaggttcaacccatacgagaacaacggcggcacgtgcttggccgtcgccggcgccgactactgcgtcgtcgccgccgacacccgcctctccatcggttacagcatcctgtcccgtgaccactctaaaatctctcagctgtcagacaaatgtgttttggcctcatctgggtttcaaggtgatatcaaagctttgcagaaggctctggctgctaaggaattaatctatgaacacaataataacaagaagatgagctgcccagcaatggctcaacttctgtcaaacacactctactacaagagatttttcccatactacgctttcaatgtgttggccggactggacacccaaggtaaaggatgtgtctttacatacgatgctgttggatcttatgagaggacaggctatagtgctcag

SEQ ID NO: 17062 - protein, 70 aa, Zea mays subsp. mays
  peptide (1)..(70): Ceres Seq. ID no. 1669785
RIFRREQTATEAHKQRRQGVKAPPNLGSSSYGEVQPIREQRRHVLGRRRRRLLRRRRRHPPLHRLQHPVP

SEQ ID NO: 17063 - protein, 104 aa, Zea mays subsp. mays
  peptide (1)..(104): Ceres Seq. ID no. 1669786
NFQKRADRHRSTQAASSGREGTTESREQQLWRGSTHTRTTAARAWPSPAPTTASSPPTPASPSVTASCPVTTLKSLSCQTNVFWPHLGFKVISKLCRRLWLLRN

SEQ ID NO: 17064 - protein, 140 aa, Zea mays subsp. mays
  peptide (1)..(140): Ceres Seq. ID no. 1669787
MARFNPYENNGGTCLAVAGADYCVVAADTRLSIGYSILSRDHSKISQLSDKCVLASSGFQGDIKALQKALAAKELIYEHNNNKKMSCPAMAQLLSNTLYYKRFFPYYAFNVLAGLDTQGKGCVFTYDAVGSYERTGYSAQ

SEQ ID NO: 17065 - DNA, 1640 bp, Zea mays subsp. mays
  misc_feature (1)..(1640): Ceres Seq. ID no. 12374684
  misc_feature (1)..(1640): Ortholog of  Ceres SEQ ID NO 13654431 as cited in SEQ ID NO 67761
aaaaaaaaacaatttcaaacctcgcgtcggccgccgagcccatttcaaacccggacgccccctccccaagcgcaccgaggaagcagcaaggccagcggtggtccctttcccctccactgcagtctccagagtctagagacctccaccgtccactccaaagacgagcagcgggcaaacccaagcacccgcccaatccggttcgccttccttctcaccccgcccggactctgcggagagatctggcagcggtggctatgccattgggcgacgacgcggcggcggacttcgcgctgccggacgagctcctggcggcgctgccgcgggacccctacgagcagctggatctggcgcgccgcatcaccgcgctggcggtggcggggcgggtgtccgggctggagcgggaggcggggcgcctgcgcgcggaggccgcggggaaggaccgcgagagcgccgagctccgggagcggggtggcgctgctcgacgccgcgcttcaggagaccaacgccaggctccgcgccgcgctcgaggacaatattaagctcagcaaggagcgggactcgctggcgcagacgtccaagaagctggcacgcgacctgcacaagctggagtcattcaagaggcatctgatgcagtcattgcgtgatgatagttcatcaacacaggaaacagttgacattacaacgtgtgatcagccagtagcatcaaaagcatcatccagtgcagatggtggatctgtcagcaaccctgcaacgaatatatttactgagtcattggatgtgggaagcacaaaccgagatggtgctgcagcaaggcctccgatccagaaatactctctcacaacacacatcactccccgccttaccccagaggccactcctaaagtaatgtccacttctgcttctccaaggcgaatgtctaccacaggaacacccaagttgatgtctggttctacatcaccgtcaaaaactcgaatcgaatctcacatgtcaatgacaccatggtatccatcaagcaagcaatcctcggcggcaaactcgcctccacgaggacgttcaaacccaggtcgcactcctcgaatcgatggaaaggagttctttcgtcaggccaggagtcgtctatcctacgagcaatttggagcattcttagccaacatcaaagagctcaatgcccataagcagtcacgtgaggaaactctcaagaaagctgaagagatctttggtccagacaataaagatctgtacctgtctttccaaggcctgctgaaccgtagcatggtggcataaggcttcacaggtcgcttcgcaagtccaatggagttccctcttccgcaacgctaataggatacgcaagttgttgctggctttgcagagataatgaggttgctgcattggcaacttatctagctgtggatctgaaggcccagctgcaagttttggccccgtaataatccatatcggtggaacgagcggatctctctgaacgactgagtgtgcaaaccagcagtgtcgcttctgtaaaagtggtgtgtgtacttgccgaaagcggatgacaaattcattgcctaaatcagggtgcagtctgtcatgaagcgcgtccttgtaaaaccgtgaaaaaggtaaccatgagagtaacaaactcc

SEQ ID NO: 17066 - protein, 427 aa, Zea mays subsp. mays
  peptide (1)..(427): Ceres Seq. ID no. 12374685
KKKQFQTSRRPPSPFQTRTPPPQAHRGSSKASGGPFPLHCSLQSLETSTVHSKDEQRANPSTRPIRFAFLLTPPGLCGEIWQRWLCHWATTRRRTSRCRTSSWRRCRGTPTSSWIWRAASPRWRWRGGCPGWSGRRGACARRPRGRTARAPSSGSGVALLDAALQETNARLRAALEDNIKLSKERDSLAQTSKKLARDLHKLESFKRHLMQSLRDDSSSTQETVDITTCDQPVASKASSSADGGSVSNPATNIFTESLDVGSTNRDGAAARPPIQKYSLTTHITPRLTPEATPKVMSTSASPRRMSTTGTPKLMSGSTSPSKTRIESHMSMTPWYPSSKQSSAANSPPRGRSNPGRTPRIDGKEFFRQARSRLSYEQFGAFLANIKELNAHKQSREETLKKAEEIFGPDNKDLYLSFQGLLNRSMVA

SEQ ID NO: 17067 - protein, 218 aa, Zea mays subsp. mays
  peptide (1)..(218): Ceres Seq. ID no. 12374686
MQSLRDDSSSTQETVDITTCDQPVASKASSSADGGSVSNPATNIFTESLDVGSTNRDGAAARPPIQKYSLTTHITPRLTPEATPKVMSTSASPRRMSTTGTPKLMSGSTSPSKTRIESHMSMTPWYPSSKQSSAANSPPRGRSNPGRTPRIDGKEFFRQARSRLSYEQFGAFLANIKELNAHKQSREETLKKAEEIFGPDNKDLYLSFQGLLNRSMVA

SEQ ID NO: 17068 - DNA, 1345 bp, Zea mays subsp. mays
  misc_feature (1)..(1345): Ceres Seq. ID no. 12415368
  misc_feature (1)..(1345): Ortholog of  Ceres SEQ ID NO 13639476 as cited in SEQ ID NO 58353
gcacgagaccattacctagaacatcctaatcgaaaaagaatccagatccagcgcccgcatctctctctctcgcgcgcgcgcgcgagcgcgatgagctgccgcgacgggcgatcgtgctagcggtaacagcgagcggtgcgcgagggcggagtgggagtgtggatccgaggggcggcaaatctggcaggcgccgcggtggggctgcgggcgcgggggagggcggggggctgggcggacggcggggagggaggggaggactgcggtaggctcaggccctggcgcaggaggctgctcgcgtccatggcgctctcgtggtcctcggccctccgcctcgccgtcgccgccgtcctgctcgtcgccgtcgtcgtcgcgctcttcactctccccatcgagaagattttgaaggactttctggtttggatcaaggagaatttgggtccatggggtcctttggtgttggccctcgcttacatccctctgacagtcttagctgttccagcatcaattcttacacttggagggggctatctatttggcttgccagtggggtttgttgctgattccattggagcagcaattggtgcgactgctgcatttctgcttggcaggacgattgggaggtcttatgttctctccaaatgcaaagattaccctaagtttcaagcagtagctattgccatccaaagatctggcttcaagatcgtgttgctactaaggcttgtacctttacttccgttcaacatgttgaactacctgttatctgtcactcctgttggtgttggagaatacatgctggcttcttggttgggaatgatgccaatcactcttgctctggtgtacgttggaacaacactaaaagatctatcagatgtgacacatgggtggagtgagatctcgactactcgacggattctgataatatctggttttgtattatctgtggtcttgattatctgcgtcacaaaaattgcaaaatcatctctggagaaggcattggctgagaatggagagctccatgtaggaacatcgcagcttccaggtgtaacctctcccttggatctgcaacaacctcttgtaatcaagattgacacatcaaatgaagaccacgagaagtaaaagtgttgtgtttacaatctcagatctaaattctttggttgttgagtcggtagactgtatatacacccatactctggtgaggcccgtaaatgggtaaaaaagacatcatccccccttccaaaaaagggaatgaagtttagtttactgataggttatagtaatacgatatgcgctttgtttcactccacgtgctaccttatctttggtgaaaatactcgcacttaactgg

SEQ ID NO: 17069 - protein, 271 aa, Zea mays subsp. mays
  peptide (1)..(271): Ceres Seq. ID no. 12415369
MALSWSSALRLAVAAVLLVAVVVALFTLPIEKILKDFLVWIKENLGPWGPLVLALAYIPLTVLAVPASILTLGGGYLFGLPVGFVADSIGAAIGATAAFLLGRTIGRSYVLSKCKDYPKFQAVAIAIQRSGFKIVLLLRLVPLLPFNMLNYLLSVTPVGVGEYMLASWLGMMPITLALVYVGTTLKDLSDVTHGWSEISTTRRILIISGFVLSVVLIICVTKIAKSSLEKALAENGELHVGTSQLPGVTSPLDLQQPLVIKIDTSNEDHEK

SEQ ID NO: 17070 - DNA, 992 bp, Zea mays subsp. mays
  misc_feature (1)..(992): Ceres Seq. ID no. 12358927
  misc_feature (1)..(992): Ortholog of  Ceres SEQ ID NO 13599613 as cited in SEQ ID NO 0
  misc_feature (1)..(992): Ortholog of  Ceres SEQ ID NO 15179570 as cited in SEQ ID NO 0
agtacaacgcgcgactccatacaacaatacaaacaaagctgtaacgtactgtaaaagtaagatatggaggccgccggcggcggcggcgaggttcacaaggctagcaacgacaaggaggagcatttcgtgctcgtgcacggcgccggccacggcgcctggtgctggttcaagctggcgtgcctgctccggggctccggccgccaccgcgtctcctgcgtcgacctcgccggggccgccggcagcctcgtcgacccggacgacgtccgctcgttcgacgagtacgacgcgccgctcctcgacttgatggccgccttgccggacgacggccgcaaggtggttctggtagggcatagcgcaggaggactgagcgtcacccacgcgatgcatctgttcagagacaagatcaagcaggccatcttcgtagcagcgaccatgctcccgttcgggtaccagtcggagcaagatatcaaagatggagcacctgatctatccgagttcggcgacgacgtttacgacctcaagttcagtctgggagacgaccgccctccgacgagcgtggcgctgagagaggagcaccagcgcgcgatcctgtaccagcaatgcacccacgaggactccacgctcgcatccattctgctgcgcccgtggccggcagctctgggcgccgccaggttcggcttcggccgcgccgacgacggcgccgtgaacactgtgcgtcgggtgtacgtgaagacggccaacgaccgcatgctgaagccggagcagcaggaggcgatggtccgccggtggccgccgagcgaggtggcggcgatggacaccgaccacagccccttcttctccgccccagagcgcctcttcgagctgatcatcaagtcattgtgaatctctcatctgtagtaatcgcttgtgttcttccagactccagtgcctggtgctgtcctgtatgccatgccaaccaataagttatcatttatttatcaataaattatctc

SEQ ID NO: 17071 - protein, 272 aa, Zea mays subsp. mays
  peptide (1)..(272): Ceres Seq. ID no. 12358928
MEAAGGGGEVHKASNDKEEHFVLVHGAGHGAWCWFKLACLLRGSGRHRVSCVDLAGAAGSLVDPDDVRSFDEYDAPLLDLMAALPDDGRKVVLVGHSAGGLSVTHAMHLFRDKIKQAIFVAATMLPFGYQSEQDIKDGAPDLSEFGDDVYDLKFSLGDDRPPTSVALREEHQRAILYQQCTHEDSTLASILLRPWPAALGAARFGFGRADDGAVNTVRRVYVKTANDRMLKPEQQEAMVRRWPPSEVAAMDTDHSPFFSAPERLFELIIKSL

SEQ ID NO: 17072 - protein, 192 aa, Zea mays subsp. mays
  peptide (1)..(192): Ceres Seq. ID no. 12358929
MAALPDDGRKVVLVGHSAGGLSVTHAMHLFRDKIKQAIFVAATMLPFGYQSEQDIKDGAPDLSEFGDDVYDLKFSLGDDRPPTSVALREEHQRAILYQQCTHEDSTLASILLRPWPAALGAARFGFGRADDGAVNTVRRVYVKTANDRMLKPEQQEAMVRRWPPSEVAAMDTDHSPFFSAPERLFELIIKSL

SEQ ID NO: 17073 - protein, 166 aa, Zea mays subsp. mays
  peptide (1)..(166): Ceres Seq. ID no. 12358930
MHLFRDKIKQAIFVAATMLPFGYQSEQDIKDGAPDLSEFGDDVYDLKFSLGDDRPPTSVALREEHQRAILYQQCTHEDSTLASILLRPWPAALGAARFGFGRADDGAVNTVRRVYVKTANDRMLKPEQQEAMVRRWPPSEVAAMDTDHSPFFSAPERLFELIIKSL

SEQ ID NO: 17074 - DNA, 1492 bp, Zea mays subsp. mays
  misc_feature (1)..(1492): Ceres Seq. ID no. 12366507
  misc_feature (1)..(1492): Ortholog of  Ceres SEQ ID NO 14312216 as cited in SEQ ID NO 53930
  misc_feature (1)..(1492): Ortholog of  Ceres SEQ ID NO 13656404 as cited in SEQ ID NO 65806
  misc_feature (1)..(1492): Ortholog of  Ceres SEQ ID NO 12779935 as cited in SEQ ID NO 66774
  misc_feature (1)..(1492): Ortholog of  Ceres SEQ ID NO 13598695 as cited in SEQ ID NO 67368
  misc_feature (1)..(1492): Ortholog of  Ceres SEQ ID NO 13591174 as cited in SEQ ID NO 68289
atccaccagcagctagcgtagcgagcgatggccaccgaactccggtcgccgctcctcccgccgccgccgcagcgacgactaagcccgcgggcagccgcgtgggcggcgctcgccgtctcggcgacggtcctgctcctccccttcctgatcggcagcagaagcaccaccaccagcaccagcagcacgagacacccccggccccgatcctccccaccatccaaccccgtggagctgaccctcctgaccgccgccagcgacaagggcgcggtgtgcctggacgggagccccccgggctaccacctgcaggcggggtccggcgccgggtccggcagctggctcatccatctcatggggggcggctggtgcgacaccgtccgcagctgctccgaccgcaggacgacctacctcggctcgtccctcttcatgcagaaagtcatggacttcactggcattctcagcaacgacccggcacagaatcctgatttctacagctggaacagagtgttcgttaggtactgcgacggggcatcgttttcgggggattcccagcgcgaggctgggcctgggaacggcacgctcttcttcagaggcctgcgcatctgggaggcagtcctcgacgagctcatgcacaagggcctcgcgcattccaaacaggccttgctcacaggttgttccgctggtggtctggccacgctgctgcactgcgacgattttcgcgcacggtttccccctgaggttcctgtgaaatgcctctccgatgccgggttctttgttgacgcgaaggatttgtcagggcagcgctccatgcgttctgtgtacagcggagttgttcatcttcagaacgttactaaagttttgcccaaggactgcctcctcgcaaacaaggacgatcccacgcagtgtttcttcccggcggagcttgttaagagcatcagcacgcccacgttgatcgtaaactctgcttacgactcttggcaggtacggtttgtcgttgcgccagacaggtcgtctcccgacgagtcatggcgcggctgcagagacgacgttcgcagatgcaattcctcccagatccaagtcctcaatgcatttaggaagacgatggtagatgacctcgtcgaggctgccgacggcaccaacagcagctggttcatcgactcttgcttcacacattgtcagactatcttcgacagctcaggatggaactcagcggccgcgccgaggatcgggaacaagacactgacggaggtgatcggggactggtactttggtaggagcccgagcccggtggtgaggcaggttggctgcgagtatccatgcaaccccacatgcaataggcagccaccagttgccggcttctacaacaaagctcttccgccgcgtgaacaagcgaacattcttgtattgggatgaaacatacaagtaaacggatgaaacatacaagtaaatgttgggtgtgtcctctacagctggtcatcagtgaccggattgggcc

SEQ ID NO: 17075 - protein, 460 aa, Zea mays subsp. mays
  peptide (1)..(460): Ceres Seq. ID no. 12366508
MATELRSPLLPPPPQRRLSPRAAAWAALAVSATVLLLPFLIGSRSTTTSTSSTRHPRPRSSPPSNPVELTLLTAASDKGAVCLDGSPPGYHLQAGSGAGSGSWLIHLMGGGWCDTVRSCSDRRTTYLGSSLFMQKVMDFTGILSNDPAQNPDFYSWNRVFVRYCDGASFSGDSQREAGPGNGTLFFRGLRIWEAVLDELMHKGLAHSKQALLTGCSAGGLATLLHCDDFRARFPPEVPVKCLSDAGFFVDAKDLSGQRSMRSVYSGVVHLQNVTKVLPKDCLLANKDDPTQCFFPAELVKSISTPTLIVNSAYDSWQVRFVVAPDRSSPDESWRGCRDDVRRCNSSQIQVLNAFRKTMVDDLVEAADGTNSSWFIDSCFTHCQTIFDSSGWNSAAAPRIGNKTLTEVIGDWYFGRSPSPVVRQVGCEYPCNPTCNRQPPVAGFYNKALPPREQANILVLG

SEQ ID NO: 17076 - protein, 353 aa, Zea mays subsp. mays
  peptide (1)..(353): Ceres Seq. ID no. 12366509
MGGGWCDTVRSCSDRRTTYLGSSLFMQKVMDFTGILSNDPAQNPDFYSWNRVFVRYCDGASFSGDSQREAGPGNGTLFFRGLRIWEAVLDELMHKGLAHSKQALLTGCSAGGLATLLHCDDFRARFPPEVPVKCLSDAGFFVDAKDLSGQRSMRSVYSGVVHLQNVTKVLPKDCLLANKDDPTQCFFPAELVKSISTPTLIVNSAYDSWQVRFVVAPDRSSPDESWRGCRDDVRRCNSSQIQVLNAFRKTMVDDLVEAADGTNSSWFIDSCFTHCQTIFDSSGWNSAAAPRIGNKTLTEVIGDWYFGRSPSPVVRQVGCEYPCNPTCNRQPPVAGFYNKALPPREQANILVLG

SEQ ID NO: 17077 - protein, 328 aa, Zea mays subsp. mays
  peptide (1)..(328): Ceres Seq. ID no. 12366510
MQKVMDFTGILSNDPAQNPDFYSWNRVFVRYCDGASFSGDSQREAGPGNGTLFFRGLRIWEAVLDELMHKGLAHSKQALLTGCSAGGLATLLHCDDFRARFPPEVPVKCLSDAGFFVDAKDLSGQRSMRSVYSGVVHLQNVTKVLPKDCLLANKDDPTQCFFPAELVKSISTPTLIVNSAYDSWQVRFVVAPDRSSPDESWRGCRDDVRRCNSSQIQVLNAFRKTMVDDLVEAADGTNSSWFIDSCFTHCQTIFDSSGWNSAAAPRIGNKTLTEVIGDWYFGRSPSPVVRQVGCEYPCNPTCNRQPPVAGFYNKALPPREQANILVLG

SEQ ID NO: 17078 - DNA, 1326 bp, Zea mays subsp. mays
  misc_feature (1)..(1326): Ceres Seq. ID no. 12424016
  misc_feature (1)..(1326): Ortholog of  Ceres SEQ ID NO 15171131 as cited in SEQ ID NO 58111
  misc_feature (1)..(1326): Ortholog of  Ceres SEQ ID NO 13655451 as cited in SEQ ID NO 68999
aatccaccggatccccacccacacctcgctaccccgaccgatgaaggcgtcgatcaagttccgcgacgacgagcggccgctggtgcgcgccaaggtgccgatcgtcgtgctggggctgccgttccagtcggggctcgcggcgggaagggacctgcgggagctccgcttcgacgtgtccacggcgttcgcatcgggcccggcgctccggctctcgtaccgccccaacgacccggcgctccccttcgcgctcgccgtgcgcgcggggctcggcccgctggggtccccggcacgcgcgcccttcgcgctcgccgccgagttcaacctcgtcgcccacgacccctcctcgtcgcccgccttcttcctccgcctcaagccgcggctcggcgacttctcgctctcccacacgctgcgctcccctgcggcggcgccagcgccacggaaggccggggagccgagctccgacggccggcgggaggtgaagcctctggantacatgcnnccgttcacgttcaccgggagcgggctcgcgnccgacgtggcggcggcggggaccggcagcggggtcggcacgctgctgtccggcatgcggctcacgaccaggagcgtgctcccgctgtggggccgggcgagcctgcggttcaactggggcctgcgcgtgccgccggagctgctcgccgccgacggcaagggcgcttgcgcgcccgtcagcaanatnccnntgctggtcatgagcaaggtttgcatcgagcagtccccgcgctccgtcacgggcaccaaggccggcggccgagcacctgcacccgccctggcctccacgnacgcggcgtcgnacggcgacgcggcgttctcgctggtgaggcggcagctggagtcgctgagcgtggacaacatgctgntccggcgcgccgtggaggacctccgcgcggaggtccgcagcagcaacagcagggccgcgccgcccgctgcttntgntgcggggcgtggcttgggcagggtggcggcgaccgcgccacaaatgcagacgcagacgcagccttaccacgtgacgaagccggaccaccgaccccggggcgccgcgagggaggctgcggccgcgccggacgacgtcggcgaggagctgaagaaggcgttggaggcccgcctgcgctgagcagccagccttggctgccaggccgcgtcgcgtgcgagcccggcagctcaccggcaccgctcgagtgaaggtgaagtgctagtgtcgctgttaggcgttgtaatctgttggtgtcagcagcaatttggagctgctgatttgatcgctgagaagaaggggatcggacttgtcttgcc

SEQ ID NO: 17079 - protein, 405 aa, Zea mays subsp. mays
  peptide (1)..(405): Ceres Seq. ID no. 12424017
  misc_feature (164)..(164): Xaa is any aa, unknown or other
  misc_feature (166)..(166): Xaa is any aa, unknown or other
  misc_feature (167)..(167): Xaa is any aa, unknown or other
  misc_feature (177)..(177): Xaa is any aa, unknown or other
  misc_feature (238)..(238): Xaa is any aa, unknown or other
  misc_feature (239)..(239): Xaa is any aa, unknown or other
  misc_feature (240)..(240): Xaa is any aa, unknown or other
  misc_feature (273)..(273): Xaa is any aa, unknown or other
  misc_feature (277)..(277): Xaa is any aa, unknown or other
  misc_feature (299)..(299): Xaa is any aa, unknown or other
  misc_feature (323)..(323): Xaa is any aa, unknown or other
  misc_feature (324)..(324): Xaa is any aa, unknown or other
NPPDPHPHLATPTDEGVDQVPRRRAAAGARQGADRRAGAAVPVGARGGKGPAGAPLRRVHGVRIGPGAPALVPPQRPGAPLRARRARGARPAGVPGTRALRARRRVQPRRPRPLLVARLLPPPQAAARRLLALPHAALPCGGASATEGRGAELRRPAGGEASGXHXXVHVHRERARXRRGGGGDRQRGRHAAVRHAAHDQERAPAVGPGEPAVQLGPARAAGAARRRRQGRLRARQQXXXAGHEQGLHRAVPALRHGHQGRRPSTCTRPGLHXRGVXRRRGVLAGEAAAGVAERGQHAXPARRGGPPRGGPQQQQQGRAARCXXCGAWLGQGGGDRATNADADAALPRDEAGPPTPGRREGGCGRAGRRRRGAEEGVGGPPALSSQPWLPGRVACEPGSSPAPLE

SEQ ID NO: 17080 - protein, 382 aa, Zea mays subsp. mays
  peptide (1)..(382): Ceres Seq. ID no. 12424018
  misc_feature (163)..(163): Xaa is any aa, unknown or other
  misc_feature (166)..(166): Xaa is any aa, unknown or other
  misc_feature (177)..(177): Xaa is any aa, unknown or other
  misc_feature (237)..(237): Xaa is any aa, unknown or other
  misc_feature (238)..(238): Xaa is any aa, unknown or other
  misc_feature (239)..(239): Xaa is any aa, unknown or other
  misc_feature (240)..(240): Xaa is any aa, unknown or other
  misc_feature (273)..(273): Xaa is any aa, unknown or other
  misc_feature (277)..(277): Xaa is any aa, unknown or other
  misc_feature (299)..(299): Xaa is any aa, unknown or other
  misc_feature (323)..(323): Xaa is any aa, unknown or other
  misc_feature (324)..(324): Xaa is any aa, unknown or other
IHRIPTHTSLPRPMKASIKFRDDERPLVRAKVPIVVLGLPFQSGLAAGRDLRELRFDVSTAFASGPALRLSYRPNDPALPFALAVRAGLGPLGSPARAPFALAAEFNLVAHDPSSSPAFFLRLKPRLGDFSLSHTLRSPAAAPAPRKAGEPSSDGRREVKPLXYMXPFTFTGSGLAXDVAAAGTGSGVGTLLSGMRLTTRSVLPLWGRASLRFNWGLRVPPELLAADGKGACAPVSXXXXLVMSKVCIEQSPRSVTGTKAGGRAPAPALASTXAASXGDAAFSLVRRQLESLSVDNMLXRRAVEDLRAEVRSSNSRAAPPAAXXAGRGLGRVAATAPQMQTQTQPYHVTKPDHRPRGAAREAAAAPDDVGEELKKALEARLR

SEQ ID NO: 17081 - protein, 369 aa, Zea mays subsp. mays
  peptide (1)..(369): Ceres Seq. ID no. 12424019
  misc_feature (150)..(150): Xaa is any aa, unknown or other
  misc_feature (153)..(153): Xaa is any aa, unknown or other
  misc_feature (164)..(164): Xaa is any aa, unknown or other
  misc_feature (224)..(224): Xaa is any aa, unknown or other
  misc_feature (225)..(225): Xaa is any aa, unknown or other
  misc_feature (226)..(226): Xaa is any aa, unknown or other
  misc_feature (227)..(227): Xaa is any aa, unknown or other
  misc_feature (260)..(260): Xaa is any aa, unknown or other
  misc_feature (264)..(264): Xaa is any aa, unknown or other
  misc_feature (286)..(286): Xaa is any aa, unknown or other
  misc_feature (310)..(310): Xaa is any aa, unknown or other
  misc_feature (311)..(311): Xaa is any aa, unknown or other
MKASIKFRDDERPLVRAKVPIVVLGLPFQSGLAAGRDLRELRFDVSTAFASGPALRLSYRPNDPALPFALAVRAGLGPLGSPARAPFALAAEFNLVAHDPSSSPAFFLRLKPRLGDFSLSHTLRSPAAAPAPRKAGEPSSDGRREVKPLXYMXPFTFTGSGLAXDVAAAGTGSGVGTLLSGMRLTTRSVLPLWGRASLRFNWGLRVPPELLAADGKGACAPVSXXXXLVMSKVCIEQSPRSVTGTKAGGRAPAPALASTXAASXGDAAFSLVRRQLESLSVDNMLXRRAVEDLRAEVRSSNSRAAPPAAXXAGRGLGRVAATAPQMQTQTQPYHVTKPDHRPRGAAREAAAAPDDVGEELKKALEARLR

SEQ ID NO: 17082 - DNA, 1789 bp, Zea mays subsp. mays
  misc_feature (1)..(1789): Ceres Seq. ID no. 13586275
  misc_feature (1)..(1789): Ortholog of  Ceres SEQ ID NO 14315241 as cited in SEQ ID NO 52516
  misc_feature (1)..(1789): Ortholog of  Ceres SEQ ID NO 13594349 as cited in SEQ ID NO 58161
  misc_feature (1)..(1789): Ortholog of  Ceres SEQ ID NO 13663419 as cited in SEQ ID NO 66561
  misc_feature (1)..(1789): Ortholog of  Ceres SEQ ID NO 15177892 as cited in SEQ ID NO 0
taaagggaacaaaagctggagctccaccgcggtggcggccgctctagaactagtggatcccccgggctgcaggaattcgcacgagaccattacctagaacatcctaatcgaaaaaagacaccaaacacccatgcacacgcaacctatcaagatgaaaagaggcctcctggtactttggtccttgttctacttcagtgttgcaaacgctgacactagaaaccaggccaagcagcctcttgagttcaatcaattgagagtatcaaggaaatatgttcaaggaaaacaagattcaactcccaagaacggaaccagtccatcagtgcatagaggctcaacaagcaatcaacgggagcaggataagatcatatgtatgcctgggcaaacaggggtagcagagtttgaccaatatgcaggatatgtgactgtggatgccaaggctggaagggctttgttctactactttgttgaggctcctcaagatccttcaaacaaacctcttgtcctatggctgaatggagggcctggctgttcatcctttggatctggggccatggttgaacttggacctttctctgttcatagtgacaacaagacactgtacaagaaanggcatgcatggaacagaatggccaacatgttgttcattgagatcccagctggtgttggatactcatattcaaacactacatcagattactataacactggtgaccaaagaacaacagatgatgcatatacctttcttattacttggctagagaaatttcctgaatatcaggaccgtgatttcttcataactggtgagagctatgcaggtcactatataccagaacttgcaaatctgattctctctaagaatagagccaccaatgtaactagtatcaagcttaaaggtgttgcgattggaaatgcanacttggatgataatttgactctaagagcatcatatgactactattggatgcatgctatgatttcgggaaaagcttataaagccgtcaaggataagtgcggctttaacgggacatacactgaagactgccaaaatgccatggacttagccacccaagaaaaaggaaatattgatgactatgacatctatgcaccaatatgccaagatgcctcaaacccttctaaatcaagtgactcgttagtgtttggtgatccatgcacaaaccactacgtctnctcttacctaaatcgtcctgaggtccaaagggcactccatgcaaacacaacagggttaggctacccatggatggactgtagtcagcagatatttgataattggaaagattcaccagagacaatgctgccatcaatcaagaaactcatttcaagtggcacgagaatatggctgtacagtggtgatatggatgcagtgtgctcattcatttcaacacaatatgtgctggacaatcttgggcttcctatagaagcagcttggcgtccatggcacgtcgacaatgaggttgctggctacgtcattgggtataaagggctggtcttcgcgacggtcagaggagctgtgcacatggtgccatactaccagcctcgcagggcattggcattattctcgtcattcctcgaaggggagctccctccacgctgatcgattaagctagcagggtttgtgaatgccatttactcattttccacagcctatggaatcataggcggtacatgaggcctagtgtttttactatacttgtagctggcctttattttttatataaatatataaaacaaaccaagcagggagctgacgattatattaataaaaaatgag

SEQ ID NO: 17083 - protein, 493 aa, Zea mays subsp. mays
  peptide (1)..(493): Ceres Seq. ID no. 13586276
  misc_feature (160)..(160): Xaa is any aa, unknown or other
  misc_feature (262)..(262): Xaa is any aa, unknown or other
  misc_feature (353)..(353): Xaa is any aa, unknown or other
MHTQPIKMKRGLLVLWSLFYFSVANADTRNQAKQPLEFNQLRVSRKYVQGKQDSTPKNGTSPSVHRGSTSNQREQDKIICMPGQTGVAEFDQYAGYVTVDAKAGRALFYYFVEAPQDPSNKPLVLWLNGGPGCSSFGSGAMVELGPFSVHSDNKTLYKKXHAWNRMANMLFIEIPAGVGYSYSNTTSDYYNTGDQRTTDDAYTFLITWLEKFPEYQDRDFFITGESYAGHYIPELANLILSKNRATNVTSIKLKGVAIGNAXLDDNLTLRASYDYYWMHAMISGKAYKAVKDKCGFNGTYTEDCQNAMDLATQEKGNIDDYDIYAPICQDASNPSKSSDSLVFGDPCTNHYVXSYLNRPEVQRALHANTTGLGYPWMDCSQQIFDNWKDSPETMLPSIKKLISSGTRIWLYSGDMDAVCSFISTQYVLDNLGLPIEAAWRPWHVDNEVAGYVIGYKGLVFATVRGAVHMVPYYQPRRALALFSSFLEGELPPR

SEQ ID NO: 17084 - protein, 486 aa, Zea mays subsp. mays
  peptide (1)..(486): Ceres Seq. ID no. 13586277
  misc_feature (153)..(153): Xaa is any aa, unknown or other
  misc_feature (255)..(255): Xaa is any aa, unknown or other
  misc_feature (346)..(346): Xaa is any aa, unknown or other
MKRGLLVLWSLFYFSVANADTRNQAKQPLEFNQLRVSRKYVQGKQDSTPKNGTSPSVHRGSTSNQREQDKIICMPGQTGVAEFDQYAGYVTVDAKAGRALFYYFVEAPQDPSNKPLVLWLNGGPGCSSFGSGAMVELGPFSVHSDNKTLYKKXHAWNRMANMLFIEIPAGVGYSYSNTTSDYYNTGDQRTTDDAYTFLITWLEKFPEYQDRDFFITGESYAGHYIPELANLILSKNRATNVTSIKLKGVAIGNAXLDDNLTLRASYDYYWMHAMISGKAYKAVKDKCGFNGTYTEDCQNAMDLATQEKGNIDDYDIYAPICQDASNPSKSSDSLVFGDPCTNHYVXSYLNRPEVQRALHANTTGLGYPWMDCSQQIFDNWKDSPETMLPSIKKLISSGTRIWLYSGDMDAVCSFISTQYVLDNLGLPIEAAWRPWHVDNEVAGYVIGYKGLVFATVRGAVHMVPYYQPRRALALFSSFLEGELPPR

SEQ ID NO: 17085 - protein, 413 aa, Zea mays subsp. mays
  peptide (1)..(413): Ceres Seq. ID no. 13586278
  misc_feature (80)..(80): Xaa is any aa, unknown or other
  misc_feature (182)..(182): Xaa is any aa, unknown or other
  misc_feature (273)..(273): Xaa is any aa, unknown or other
MPGQTGVAEFDQYAGYVTVDAKAGRALFYYFVEAPQDPSNKPLVLWLNGGPGCSSFGSGAMVELGPFSVHSDNKTLYKKXHAWNRMANMLFIEIPAGVGYSYSNTTSDYYNTGDQRTTDDAYTFLITWLEKFPEYQDRDFFITGESYAGHYIPELANLILSKNRATNVTSIKLKGVAIGNAXLDDNLTLRASYDYYWMHAMISGKAYKAVKDKCGFNGTYTEDCQNAMDLATQEKGNIDDYDIYAPICQDASNPSKSSDSLVFGDPCTNHYVXSYLNRPEVQRALHANTTGLGYPWMDCSQQIFDNWKDSPETMLPSIKKLISSGTRIWLYSGDMDAVCSFISTQYVLDNLGLPIEAAWRPWHVDNEVAGYVIGYKGLVFATVRGAVHMVPYYQPRRALALFSSFLEGELPPR

SEQ ID NO: 17086 - DNA, 1125 bp, Zea mays subsp. mays
  misc_feature (1)..(1125): Ceres Seq. ID no. 12368184
  misc_feature (1)..(1125): Ortholog of  Ceres SEQ ID NO 15177991 as cited in SEQ ID NO 53915
  misc_feature (1)..(1125): Ortholog of  Ceres SEQ ID NO 15174347 as cited in SEQ ID NO 58577
  misc_feature (1)..(1125): Ortholog of  Ceres SEQ ID NO 13596609 as cited in SEQ ID NO 63070
  misc_feature (1)..(1125): Ortholog of  Ceres SEQ ID NO 12616895 as cited in SEQ ID NO 63909
  misc_feature (1)..(1125): Ortholog of  Ceres SEQ ID NO 14302096 as cited in SEQ ID NO 68356
  misc_feature (1)..(1125): Ortholog of  Ceres SEQ ID NO 13598574 as cited in SEQ ID NO 69083
cacatagaccaccacgacacccttccccacaccagcagtcgagctgagcacgacacaaagccggctggggccgcctcgccatggcgatccggatgagcaacaacgtgatcggcgcgctgaacctggtgacactcctgctctcggtccccatcctcgtctcgggaatctggctgcggtcgcgcgccgacggcaccgagtgcgaccacctcctgtccaccccggccatcgcgctgggcgcggtgctcatggccgtcgctgtcgcgggtctcgccggcgcctgcttccgcgccacctggctgctatggctctacctcctcgccatgctcgtgttcatcgtcgcgctgctctgcttcaccgtcttcgccttcgccgtcaccaacaggggcgccggggaggccgtgtcgggggtaggctacagggagtaccgcctcggggactactccacctggctgcggcgccacgtcgaaagccgcaaggactgggcccggatccggagctgcctcgccgacgcgcacgtctgcaggcgcctggaggagagggagagggagagcaaggacgcggcgggtctggttcggctcggcctgtccccggtcgagtccgggtgctgcaanccgcccacgagntgcaacttcacgtacaccgncggcacggagtggaccaggacagcggcgggctccgcgcccgccggccgggactgcagcgcgtggggcaacgacgaggacgacctctgctacgggtgccagtcgtgcaaggccggcgtggtggacgcgctcaagcgggactggaagcgggccgccatcgtcaacgtcgtcatcctctccttcatcgtcgtcgtttactccgtcggctgctgcgccttcaagaacagccgccgggacaactacgcctaccacagcggccgcggatggaaacgaggcggtgacgcttaaatgcttaatcaaacttttccttatcatctgcgttagtgcaatttaccattatcttgtatattagcctgagttcgtgatctgctttagttcagtttaccattagcttgtatattattagcctcagtttgtatcacttagttgtttggcagcatattagcagaatttcgggcagtatatgagcagaatttcgctgccc

SEQ ID NO: 17087 - protein, 282 aa, Zea mays subsp. mays
  peptide (1)..(282): Ceres Seq. ID no. 12368185
  misc_feature (177)..(177): Xaa is any aa, unknown or other
  misc_feature (181)..(181): Xaa is any aa, unknown or other
  misc_feature (188)..(188): Xaa is any aa, unknown or other
MAIRMSNNVIGALNLVTLLLSVPILVSGIWLRSRADGTECDHLLSTPAIALGAVLMAVAVAGLAGACFRATWLLWLYLLAMLVFIVALLCFTVFAFAVTNRGAGEAVSGVGYREYRLGDYSTWLRRHVESRKDWARIRSCLADAHVCRRLEERERESKDAAGLVRLGLSPVESGCCXPPTXCNFTYTXGTEWTRTAAGSAPAGRDCSAWGNDEDDLCYGCQSCKAGVVDALKRDWKRAAIVNVVILSFIVVVYSVGCCAFKNSRRDNYAYHSGRGWKRGGDA

SEQ ID NO: 17088 - protein, 278 aa, Zea mays subsp. mays
  peptide (1)..(278): Ceres Seq. ID no. 12368186
  misc_feature (173)..(173): Xaa is any aa, unknown or other
  misc_feature (177)..(177): Xaa is any aa, unknown or other
  misc_feature (184)..(184): Xaa is any aa, unknown or other
MSNNVIGALNLVTLLLSVPILVSGIWLRSRADGTECDHLLSTPAIALGAVLMAVAVAGLAGACFRATWLLWLYLLAMLVFIVALLCFTVFAFAVTNRGAGEAVSGVGYREYRLGDYSTWLRRHVESRKDWARIRSCLADAHVCRRLEERERESKDAAGLVRLGLSPVESGCCXPPTXCNFTYTXGTEWTRTAAGSAPAGRDCSAWGNDEDDLCYGCQSCKAGVVDALKRDWKRAAIVNVVILSFIVVVYSVGCCAFKNSRRDNYAYHSGRGWKRGGDA

SEQ ID NO: 17089 - protein, 227 aa, Zea mays subsp. mays
  peptide (1)..(227): Ceres Seq. ID no. 12368187
  misc_feature (122)..(122): Xaa is any aa, unknown or other
  misc_feature (126)..(126): Xaa is any aa, unknown or other
  misc_feature (133)..(133): Xaa is any aa, unknown or other
MAVAVAGLAGACFRATWLLWLYLLAMLVFIVALLCFTVFAFAVTNRGAGEAVSGVGYREYRLGDYSTWLRRHVESRKDWARIRSCLADAHVCRRLEERERESKDAAGLVRLGLSPVESGCCXPPTXCNFTYTXGTEWTRTAAGSAPAGRDCSAWGNDEDDLCYGCQSCKAGVVDALKRDWKRAAIVNVVILSFIVVVYSVGCCAFKNSRRDNYAYHSGRGWKRGGDA

SEQ ID NO: 17090 - DNA, 1112 bp, Zea mays subsp. mays
  misc_feature (1)..(1112): Ceres Seq. ID no. 12387373
  misc_feature (1)..(1112): Ortholog of  Ceres SEQ ID NO 13584593 as cited in SEQ ID NO 65340
aaccgctcgccgcgtgctccctttgtgactaaaccgcatcctccccgcgccgacctgctccggcgagttaaacatggccgtcctcctccgcggcacctccgccgccgcctcgactgctggcccctcctcggcgctgctcgccaccaccttccgccgctcccgcggctgccttctgccccgtgccgcgccgcagcgccgcttgtatgtggcccgcgcctcggcccagccccttgaggtctgcgctaaggagtccatcaccatccctggccgcctcggagactgtcctttcacacagagggttttgttgactatagaggagaagcatctgccttatgatctgaagctagttgatctagctaataagccagattggttatttgaaatcaacccagaaggtaaagtgcctatcgtgaagctcgaggaaaaatggatcggtgattctgatgttataacacaagcattagaggagaaataccctgaaccacccttggcaactccaccagaaaaagcttcagttggatcaaaaatattttccactttcattggtttcctcaaaagcaaagatccaagcgatggaacagaagaggcactacttaatgagcttacttcatttgatagttatctaaaagacaatggtccatttattaatggtggaataatttctgctgctgatctctctctgggtcctaaactatatcacatggagataactctgggccactacaagaattggtctgttccagattcactttcttatgtaaaaacatatatgaagtcgattttctcaatggattcttttgtcaaaactcaagctctgacagaggatgtaattgctggatggcgcccaaaagtcatgggttaaattcatttctaaagttagacgttaaggagagggagagaggtgtcgattggcgaatggagggtctagatgcaaaggtttgtcgcatggctgtaatatgtacatgaattgtggtggattttgttaggaattttctagggcatagcatatctggtattcatatccaatctcctttgctttgtatgtcaaatggaaaacatctatacaattgtaaaacatatattttatgtaaatgagcattctcgttgaactt

SEQ ID NO: 17091 - protein, 262 aa, Zea mays subsp. mays
  peptide (1)..(262): Ceres Seq. ID no. 12387374
MAVLLRGTSAAASTAGPSSALLATTFRRSRGCLLPRAAPQRRLYVARASAQPLEVCAKESITIPGRLGDCPFTQRVLLTIEEKHLPYDLKLVDLANKPDWLFEINPEGKVPIVKLEEKWIGDSDVITQALEEKYPEPPLATPPEKASVGSKIFSTFIGFLKSKDPSDGTEEALLNELTSFDSYLKDNGPFINGGIISAADLSLGPKLYHMEITLGHYKNWSVPDSLSYVKTYMKSIFSMDSFVKTQALTEDVIAGWRPKVMG

SEQ ID NO: 17092 - DNA, 1393 bp, Zea mays subsp. mays
  misc_feature (1)..(1393): Ceres Seq. ID no. 12360042
  misc_feature (1)..(1393): Ortholog of  Ceres SEQ ID NO 15174547 as cited in SEQ ID NO 59586
  misc_feature (1)..(1393): Ortholog of  Ceres SEQ ID NO 15169470 as cited in SEQ ID NO 66036
ccaggacaaacaccgcgcacgcaccgccttctccactacttacccgaatcctaacgctattccactgcattctgctccgaaatggccctcgccaccaacgccgccgccgcagccgccatctccggagggtccgcctcacagccccgccgcgcgtcgccgtcgctgctcctgctcaggcgccgctgcgccgtcggcgccgtacacgccgcggagccgtcgaagaaccccggcgtcgtcccggccgccgcgaaggcctcgacgccgacggtcgtgcccgagaacgacaccgtcccggccccgtcccttggcccgaacgcgtcgttgcgcgcgaggtgggcggtggacagctggaggacgaagaaggccctgcagcagccagaatacccgaaccagacagagctcgaggaggcggtcaacacgatcgagaagtctccgccgatcgtctttgccggggaggcgcgtcacctggaggagcgcctcgccgacgccgccgtcggccgcgcattcctcctccagggcggcgactgcgccgaaagttttaaagagttcctgagggggatcgccaacccccttggcatcaaggtgagcgacaagatggagcccggcgagctggtgaagctgatcgacatactgaacccgacgaacaagcccgggaggatcaccgtcatcacaaggatgggggcagagaacatcagggtcaagttacctcaccttatccgcgcggtccgccaggctggacagagtgtcacctggatcactgacccgatgcacgggaacaccatcaagactccttgcggacgaaagactcggccatttgactccattctggccgaggtacgcccttcttcgatgtgcacgaccaagagggaagccagcctggaggtgtccaccttgagatgaccggtcagaacgtgaccgaatgcacgggcgggtcaagcaacgtcaccttcgacaacctgagagaccgctaccacacgcaatgcgaccccaggctgaacgcgtcccagtccctggagctcgccttcatactcgccgagaagcttaggaagcggaggatgcggcggtcgtcggtggcgtctgggctcggcggcagcatcttgcccttgccgccctttggcttttgatgtcttgcacgctggctgtgtgcatgcagggtgcagtgcaggggtgtggtaggagaatcttacgttgtcgtttgccttgctatgtagtatgtaatgctttaatttactgcattctacgtcgttttttcccttcttcttctatttgtttctttttgtacgtagctgcagctcataagagattgaataatactattgctgccacatatatagacggagttggctttgtgaattaataaagtccattgctgctgtcgtcaactgtttccttc

SEQ ID NO: 17093 - protein, 272 aa, Zea mays subsp. mays
  peptide (1)..(272): Ceres Seq. ID no. 12360043
MALATNAAAAAAISGGSASQPRRASPSLLLLRRRCAVGAVHAAEPSKNPGVVPAAAKASTPTVVPENDTVPAPSLGPNASLRARWAVDSWRTKKALQQPEYPNQTELEEAVNTIEKSPPIVFAGEARHLEERLADAAVGRAFLLQGGDCAESFKEFLRGIANPLGIKVSDKMEPGELVKLIDILNPTNKPGRITVITRMGAENIRVKLPHLIRAVRQAGQSVTWITDPMHGNTIKTPCGRKTRPFDSILAEVRPSSMCTTKREASLEVSTLR

SEQ ID NO: 17094 - protein, 183 aa, Zea mays subsp. mays
  peptide (1)..(183): Ceres Seq. ID no. 12360044
QDKHRARTAFSTTYPNPNAIPLHSAPKWPSPPTPPPQPPSPEGPPHSPAARRRRCSCSGAAAPSAPYTPRSRRRTPASSRPPRRPRRRRSCPRTTPSRPRPLARTRRCARGGRWTAGGRRRPCSSQNTRTRQSSRRRSTRSRSLRRSSLPGRRVTWRSASPTPPSAAHSSSRAATAPKVLKSS

SEQ ID NO: 17095 - protein, 179 aa, Zea mays subsp. mays
  peptide (1)..(179): Ceres Seq. ID no. 12360045
RTNTAHAPPSPLLTRILTLFHCILLRNGPRHQRRRRSRHLRRVRLTAPPRVAVAAPAQAPLRRRRRTRRGAVEEPRRRPGRREGLDADGRARERHRPGPVPWPERVVAREVGGGQLEDEEGPAAARIPEPDRARGGGQHDREVSADRLCRGGASPGGAPRRRRRRPRIPPPGRRLRRKF

SEQ ID NO: 17096 - DNA, 1391 bp, Zea mays subsp. mays
  misc_feature (1)..(1391): Ceres Seq. ID no. 12415942
  misc_feature (1)..(1391): Ortholog of  Ceres SEQ ID NO 14308615 as cited in SEQ ID NO 58538
  misc_feature (1)..(1391): Ortholog of  Ceres SEQ ID NO 13585342 as cited in SEQ ID NO 63601
  misc_feature (1)..(1391): Ortholog of  Ceres SEQ ID NO 15177459 as cited in SEQ ID NO 0
agtattcgaagagaagtctgatcgtcttatctgcggtctggcggcgtccgacgagagtggaaatgatcgctctctccaagatagccctggtgtctgcggtggcgctgctggggctgggctgggcgtaccaggccacccgcccgccgcccccggcgatcttgggcgccccaggagggccgccgatcagctcacctagaatccggctgaaagacggccggcaccttgcctacagggaggaaggagtgcgcagggagaacgccaggttcaggatcgttttcatccatggcttctcctccaccaaggagagcgggttccccgtgtcccaggagcttgtggagcagctgggcatatacatgctcttcttcgacagagccgggtatggcgacagcgacgccaacccgaagcgctgcctcaagagcgacgccacggacgtcgaggagctcgccgatgcgctgcagctcggggacaggttctacgtggtagggtgctccgtgggcggctacccagcatggagctgcctcaaatacattcccaacaggctggccggagtggccctggccgcgccggcggtgaactactggtggccgctgcctgctaacgtgtcgagggccgcgtacgggaggctccacgcccgggaccgtaggaccttctggatcgcgcaccacgcgccggcgctgctccacgcctggctcgcgcagaagtggttccgggtgtcgccgatcgtcagggccgagcgcgacgcgttcaccgccaaggactgggagatcctcaccgcgctctggaggaagcagcgcgagagcggcctggtggacccggccaaagcgacgcagcaggggatctacgagtcgctgtgccgggacgcgacgatcctgttcggcacgtgggagttcgaccccacggagatcgagaacccgttccccgacggggagggcggcgtcagcatctggcaggggcgccaggacaagatcgtccaggtggagatccagcggtacgtggcgcagaagctgccgtgggtgcggtaccacgagcaccccgaggccgggcacgcgctcccggacatggacgggatcggggacgagatcatcagggagctcctgctcggcgagagcgagctgcaccaggagcccagggcgcaggatgcctgagcctcaactgaacgttgggaagggttggtgaagagattaaactagctactgtagtagatagatactcgcgtataactggagaataaacggtgttggccccaaggcagtggttgatgaacttccagttgctggattttgctggccagtagtttgtcacgctacttattggtccccacatagatgggttaattaagagacgcttcataggtgggttgatgaactcagattcagcaaccttcatgttcc

SEQ ID NO: 17097 - protein, 380 aa, Zea mays subsp. mays
  peptide (1)..(380): Ceres Seq. ID no. 12415943
YSKRSLIVLSAVWRRPTRVEMIALSKIALVSAVALLGLGWAYQATRPPPPAILGAPGGPPISSPRIRLKDGRHLAYREEGVRRENARFRIVFIHGFSSTKESGFPVSQELVEQLGIYMLFFDRAGYGDSDANPKRCLKSDATDVEELADALQLGDRFYVVGCSVGGYPAWSCLKYIPNRLAGVALAAPAVNYWWPLPANVSRAAYGRLHARDRRTFWIAHHAPALLHAWLAQKWFRVSPIVRAERDAFTAKDWEILTALWRKQRESGLVDPAKATQQGIYESLCRDATILFGTWEFDPTEIENPFPDGEGGVSIWQGRQDKIVQVEIQRYVAQKLPWVRYHEHPEAGHALPDMDGIGDEIIRELLLGESELHQEPRAQDA

SEQ ID NO: 17098 - protein, 360 aa, Zea mays subsp. mays
  peptide (1)..(360): Ceres Seq. ID no. 12415944
MIALSKIALVSAVALLGLGWAYQATRPPPPAILGAPGGPPISSPRIRLKDGRHLAYREEGVRRENARFRIVFIHGFSSTKESGFPVSQELVEQLGIYMLFFDRAGYGDSDANPKRCLKSDATDVEELADALQLGDRFYVVGCSVGGYPAWSCLKYIPNRLAGVALAAPAVNYWWPLPANVSRAAYGRLHARDRRTFWIAHHAPALLHAWLAQKWFRVSPIVRAERDAFTAKDWEILTALWRKQRESGLVDPAKATQQGIYESLCRDATILFGTWEFDPTEIENPFPDGEGGVSIWQGRQDKIVQVEIQRYVAQKLPWVRYHEHPEAGHALPDMDGIGDEIIRELLLGESELHQEPRAQDA

SEQ ID NO: 17099 - protein, 263 aa, Zea mays subsp. mays
  peptide (1)..(263): Ceres Seq. ID no. 12415945
MLFFDRAGYGDSDANPKRCLKSDATDVEELADALQLGDRFYVVGCSVGGYPAWSCLKYIPNRLAGVALAAPAVNYWWPLPANVSRAAYGRLHARDRRTFWIAHHAPALLHAWLAQKWFRVSPIVRAERDAFTAKDWEILTALWRKQRESGLVDPAKATQQGIYESLCRDATILFGTWEFDPTEIENPFPDGEGGVSIWQGRQDKIVQVEIQRYVAQKLPWVRYHEHPEAGHALPDMDGIGDEIIRELLLGESELHQEPRAQDA

SEQ ID NO: 17100 - DNA, 990 bp, Zea mays subsp. mays
  misc_feature (1)..(990): Ceres Seq. ID no. 12382534
  misc_feature (1)..(990): Ortholog of  Ceres SEQ ID NO 13594100 as cited in SEQ ID NO 58827
aaactagccaaggtccaagtgaccatcacgtttcagtttcattctctgggtaggggagctgctgcagccgtgtgtatggcgtcctcttcctcctccctgacgcggttatttatcccgcctcaccgagcgcaccatgaggcagccatggccgcttcggccggcgcctctctgcgtaacggcggcgggatgcagatgctggatcttgtgatgcagaggtgggccgagatggtgttgtgctgcggcgcggattggaattgcgtgtcgcagctgtggaacagggtggtgctgcgcaagtggctaaacatcggcgcggggtccggggattccgacttcagcgccgacgagcacgatacctcggagggcgagaccgaccgcgaaggcatgtctggtttgaatcatgccctatgtaacgaagaaaggatattaggtggattgggtgcaagcacgactggtgacgaaatgagcgatttaccttactgccttagaatgcncagatcagagatcagtcgtgctcagtatgttgatgttagagaactcaggatttatgtagggacatggaatgttggaggcagatttccacccagtgacttggacattgaagaatggctggctacggaggagccagctgaaatttatgttatcggctttcaagagattgttccactcaatgctgggaatatatttggtgctgaagacaatcgtccagttgcagtatgggagcacatcatccgtgaaactttgaataagaattgttcagataaatcagggtttaagtgccatagtgatcctctttcaccatcaaggtttaatccatcagatgttgttctttccatggaacatggattgcttagtgagtctgacaaggatagtgatggggagcttcatccattgattgaacgagaccataattgtggacttcaagctaaaacaaatgaaaatnttgaagctttcccagaagataatttagcctgtgatgccatcattgataat

SEQ ID NO: 17101 - protein, 330 aa, Zea mays subsp. mays
  peptide (1)..(330): Ceres Seq. ID no. 12382535
  misc_feature (164)..(164): Xaa is any aa, unknown or other
  misc_feature (314)..(314): Xaa is any aa, unknown or other
KLAKVQVTITFQFHSLGRGAAAAVCMASSSSSLTRLFIPPHRAHHEAAMAASAGASLRNGGGMQMLDLVMQRWAEMVLCCGADWNCVSQLWNRVVLRKWLNIGAGSGDSDFSADEHDTSEGETDREGMSGLNHALCNEERILGGLGASTTGDEMSDLPYCLRMXRSEISRAQYVDVRELRIYVGTWNVGGRFPPSDLDIEEWLATEEPAEIYVIGFQEIVPLNAGNIFGAEDNRPVAVWEHIIRETLNKNCSDKSGFKCHSDPLSPSRFNPSDVVLSMEHGLLSESDKDSDGELHPLIERDHNCGLQAKTNENXEAFPEDNLACDAIIDN

SEQ ID NO: 17102 - protein, 305 aa, Zea mays subsp. mays
  peptide (1)..(305): Ceres Seq. ID no. 12382536
  misc_feature (139)..(139): Xaa is any aa, unknown or other
  misc_feature (289)..(289): Xaa is any aa, unknown or other
MASSSSSLTRLFIPPHRAHHEAAMAASAGASLRNGGGMQMLDLVMQRWAEMVLCCGADWNCVSQLWNRVVLRKWLNIGAGSGDSDFSADEHDTSEGETDREGMSGLNHALCNEERILGGLGASTTGDEMSDLPYCLRMXRSEISRAQYVDVRELRIYVGTWNVGGRFPPSDLDIEEWLATEEPAEIYVIGFQEIVPLNAGNIFGAEDNRPVAVWEHIIRETLNKNCSDKSGFKCHSDPLSPSRFNPSDVVLSMEHGLLSESDKDSDGELHPLIERDHNCGLQAKTNENXEAFPEDNLACDAIIDN

SEQ ID NO: 17103 - protein, 282 aa, Zea mays subsp. mays
  peptide (1)..(282): Ceres Seq. ID no. 12382537
  misc_feature (116)..(116): Xaa is any aa, unknown or other
  misc_feature (266)..(266): Xaa is any aa, unknown or other
MAASAGASLRNGGGMQMLDLVMQRWAEMVLCCGADWNCVSQLWNRVVLRKWLNIGAGSGDSDFSADEHDTSEGETDREGMSGLNHALCNEERILGGLGASTTGDEMSDLPYCLRMXRSEISRAQYVDVRELRIYVGTWNVGGRFPPSDLDIEEWLATEEPAEIYVIGFQEIVPLNAGNIFGAEDNRPVAVWEHIIRETLNKNCSDKSGFKCHSDPLSPSRFNPSDVVLSMEHGLLSESDKDSDGELHPLIERDHNCGLQAKTNENXEAFPEDNLACDAIIDN

SEQ ID NO: 17104 - DNA, 1642 bp, Zea mays subsp. mays
  misc_feature (1)..(1642): Ceres Seq. ID no. 13496541
  misc_feature (1)..(1642): Ortholog of  Ceres SEQ ID NO 15177969 as cited in SEQ ID NO 58823
  misc_feature (1)..(1642): Ortholog of  Ceres SEQ ID NO 15177963 as cited in SEQ ID NO 59105
  misc_feature (1)..(1642): Ortholog of  Ceres SEQ ID NO 14302746 as cited in SEQ ID NO 66646
cgcaattaaccctcactaaagggaacaaaagctggagctccaccgcggtggcggccgctctagaactagtggatcccccgggctgcaggaattcgcacgagaccattacctanaacatcctaatcgaaaaacgacacgcccttgtatccgacagcgaatctccactggcactactgctccgagcccgagacgaataatggcgggggcggcagcggcggcagtagctgtgctggtgctcgccgcggcgcacggcgcgctctgcgggtgctgggaccaccgccgcgcagcgccagcgccgtcgccgtcctgggaccaccgcgggacgaacagcacggcggcgctggagggttgcgggtgcgagccgtcgccgccgccgccgtggaggttcaggaacgacaagctgagggcgctgtacccggtgatccaggcgttcaagcagacgatcacgtgcgacccgctgggcgtgacggcgacgtggacgggcacggagctctgcgacagcttcttcaacaacggcagcaccaccacgtactacaggggattctactgcgactacccgccggacgcgccgggcgtgctgacggtggcgtccatcgacttcaacgggttcgggctgtgcgcgccgtcgctggccgggttcatcgacgcgttcccggacctggcgctgttccacgccaactccaacaacttctccggcgacgtgccggacctgacccagctgcgctacttctacgagctggacctgtccaacaacaacttctcgggcgcgttcccggaggccgtggtgccgctgggcgggctgctgttcctggacctccgcttcaaccggtacgcgggggaggtgccagcgccggtgttcgcgctcacggtggaggcgctcttcctcaacaacaacggctttggcgggcggatcccggacacgctcggcagcacgggcgcgcagtacctggtggtggccaacaaccagttcacgggccccatcccgcgctccatctacaacgcgtcggccacgctgtcggaggtgctgttcctcaacaaccgcctgtccgggtgcctcccctacgagatcgggctggtggaggggctggccgtgttcgacgccggcgggaacgagatcacggggcccgtgccgctgtcgttcggctgcctccgcgacgtggaggagctcaacctggcggggaaccagctgtacgggcaggtgcccgacgtggtgtgcctgctggcgcggacggggaagctgcagaacctgtcgctgtcggacaacttcttccactcggtggggcaccactgcatggagctggtgcgcagccgtgtcctggacgtgcggcgcaactgcattctggggttccccgaccagcggcccccgctcgagtgcgccgccttctacgtcgaccccagcaagcactgccccttcatcccgcacatcccctgcgagctgcctgggtacacggcgcacggccatcctcaccaaggccatgggggtgggaactgatccatggccacccatggtgatttggtagcctttttggggggaggaataagttccactgctgcattcatgacactgggtggggctcgaaaaactccatccgtgacaaataatattatccttttaataagaggtactagttatttacagcgt

SEQ ID NO: 17105 - protein, 431 aa, Zea mays subsp. mays
  peptide (1)..(431): Ceres Seq. ID no. 13496542
MAGAAAAAVAVLVLAAAHGALCGCWDHRRAAPAPSPSWDHRGTNSTAALEGCGCEPSPPPPWRFRNDKLRALYPVIQAFKQTITCDPLGVTATWTGTELCDSFFNNGSTTTYYRGFYCDYPPDAPGVLTVASIDFNGFGLCAPSLAGFIDAFPDLALFHANSNNFSGDVPDLTQLRYFYELDLSNNNFSGAFPEAVVPLGGLLFLDLRFNRYAGEVPAPVFALTVEALFLNNNGFGGRIPDTLGSTGAQYLVVANNQFTGPIPRSIYNASATLSEVLFLNNRLSGCLPYEIGLVEGLAVFDAGGNEITGPVPLSFGCLRDVEELNLAGNQLYGQVPDVVCLLARTGKLQNLSLSDNFFHSVGHHCMELVRSRVLDVRRNCILGFPDQRPPLECAAFYVDPSKHCPFIPHIPCELPGYTAHGHPHQGHGGGN

SEQ ID NO: 17106 - DNA, 1204 bp, Zea mays subsp. mays
  misc_feature (1)..(1204): Ceres Seq. ID no. 12360865
  misc_feature (1)..(1204): Ortholog of  Ceres SEQ ID NO 13597475 as cited in SEQ ID NO 65105
  misc_feature (1)..(1204): Ortholog of  Ceres SEQ ID NO 14301761 as cited in SEQ ID NO 66790
gcacgagaccattacctagaacatcctaatcaaaaaatacaaaaaaggcagacggctacccgttcgaaaaaaaaaacagcagcagccggcggcggccatagcccaggagcccggagctgtttcttcgtcgcaggaatgggcaaggacggcatccagtacgcagtggtggacgccttcacggcggagccgttcaagggcaacccagccgcggtgtgcctcctcgaggacgccgccaaggccgccgacgagcggtggatgcagtccgtcgccgccgagttcaacatctccgagaccgccttcctcctccgggaaaagtcctccgcggccggcgccgtcccgctgttccagctccgatggttcacccccgtcgctgaggtggagctctgcggccacgccacgctggcttccgcccacttcctcttcacatccgtcctcgcggagcacgagaagctcgtcgagttctcgaccaagtccgggattcttacggccaaaaaggtccctgcgccgcagagcacgggcgtgtcgggcgaggggaagctgttcattgagctggatttccccacgattgaccttgttgattgccatccttccgagctgccggcaatccccgacaccctcaacggagcctccattgtcagcgttcacaagtcaacgacggccggtgacctcattgtggagctttcatcaggaaaggaggttgctgatatcattcctaacattcatgaaattgaaaagtgttccggcagaggaattattgttacagggccagcgcctgctggatctggctacgacttcttcacgcgttttttctgcccaaaatttggaatagatgaggatcccgtttgtggcagtgcacattgtgttttagcaccttactggggtgggaagctggggaaacacaaactgatagcgtttcaagcatcccctcggagtggaatactatacctggagttagaagctacaggcaggagagtgcgaattcagggagaagcggtcagtgtgatgactggcaccctcttagcataacccctgctcaatgaacatcctatgtcttcacttcagttgtgtggcatgatttctctgcagctaggaataaattaagtctcttttcacctgtccaaaggtgttagatacactgcttccagactatgaagcagagtgtatgaggatgtttcttttgaataaatcagtgggtgttcaatgc

SEQ ID NO: 17107 - protein, 341 aa, Zea mays subsp. mays
  peptide (1)..(341): Ceres Seq. ID no. 12360866
ARDHYLEHPNQKIQKRQTATRSKKKTAAAGGGHSPGARSCFFVAGMGKDGIQYAVVDAFTAEPFKGNPAAVCLLEDAAKAADERWMQSVAAEFNISETAFLLREKSSAAGAVPLFQLRWFTPVAEVELCGHATLASAHFLFTSVLAEHEKLVEFSTKSGILTAKKVPAPQSTGVSGEGKLFIELDFPTIDLVDCHPSELPAIPDTLNGASIVSVHKSTTAGDLIVELSSGKEVADIIPNIHEIEKCSGRGIIVTGPAPAGSGYDFFTRFFCPKFGIDEDPVCGSAHCVLAPYWGGKLGKHKLIAFQASPRSGILYLELEATGRRVRIQGEAVSVMTGTLLA

SEQ ID NO: 17108 - protein, 296 aa, Zea mays subsp. mays
  peptide (1)..(296): Ceres Seq. ID no. 12360867
MGKDGIQYAVVDAFTAEPFKGNPAAVCLLEDAAKAADERWMQSVAAEFNISETAFLLREKSSAAGAVPLFQLRWFTPVAEVELCGHATLASAHFLFTSVLAEHEKLVEFSTKSGILTAKKVPAPQSTGVSGEGKLFIELDFPTIDLVDCHPSELPAIPDTLNGASIVSVHKSTTAGDLIVELSSGKEVADIIPNIHEIEKCSGRGIIVTGPAPAGSGYDFFTRFFCPKFGIDEDPVCGSAHCVLAPYWGGKLGKHKLIAFQASPRSGILYLELEATGRRVRIQGEAVSVMTGTLLA

SEQ ID NO: 17109 - protein, 256 aa, Zea mays subsp. mays
  peptide (1)..(256): Ceres Seq. ID no. 12360868
MQSVAAEFNISETAFLLREKSSAAGAVPLFQLRWFTPVAEVELCGHATLASAHFLFTSVLAEHEKLVEFSTKSGILTAKKVPAPQSTGVSGEGKLFIELDFPTIDLVDCHPSELPAIPDTLNGASIVSVHKSTTAGDLIVELSSGKEVADIIPNIHEIEKCSGRGIIVTGPAPAGSGYDFFTRFFCPKFGIDEDPVCGSAHCVLAPYWGGKLGKHKLIAFQASPRSGILYLELEATGRRVRIQGEAVSVMTGTLLA

SEQ ID NO: 17110 - DNA, 1410 bp, Zea mays subsp. mays
  misc_feature (1)..(1410): Ceres Seq. ID no. 12383255
  misc_feature (1)..(1410): Ortholog of  Ceres SEQ ID NO 13581701 as cited in SEQ ID NO 51151
gcacgagaccattacctagaacatcctaatcgaaaaaataatctagcaacagaaaataatgcacagagaagtaatccgagtggcgatcacaccacagagcgagagtgaggagagaactctcactgagaggggagtggatggtcggacggatgacaggagaaatgggagggctcagatcgaggatcctcaggaccttgcagtccttccccaccgccgctcccgcgcagtcgcccaacctcatcctcgcgccgctccctcccggcgccggcccctcgcctcagccgcccgcggcgccgtgcgtccgcctccaggaaccggcgccgctgggcgatgaagcgcgggccgcgcccgaggtgcccggcggcggaggcgatgacgacaaggagaacgtctcgccaggcgccaccccgcgcaaggccaagaagatgaagctcagctcggaccaccacgacagaagcccgggcctcggggaggagcagcgcgccgatggcgccacgcgctaccgccggccggacctcgcctcggcgacgctcttcgacccggacctcctcgccgccttccgccgcgccgtcgacgcctacgcgcaggccctggacgcggccaggcgccgcgacgtcgacgtcgacgacggggacggcgtccctggcggcggaggtgggccgggcgtcgcggaccccctggatgcgttcgagcggcggtgcccgcccggcggcgagcgcgcggtggtgctgtacaccacgtcgatccgcggcgtgcgcaggacgttcgaggactgcgcccgcgtgcgccgcctgctcggcggcctccgcgtcgcgttcctggagcgcgacgtctccatgcacgcgccctacagggaggagctccgggcgctgcttctctgcgagcggggggaggacggcggcggcgcgttccccgtgccgccgcggctgttcgtggacggccggtacctcggcggcgccgacgaggtcgtggcgctgcacgagcggtcccagctccggcccgtgctccggcgcgcggcgtggcgcggcgcaggggagggcccgtgcgcggtctgcggcggcgcgtggttcgtggtgtgcggcgcgtgcggcggcagtcattggctccatgacgccagcgccggcgccggccgcgtgccgtgctccgcgtgcaacgagaacggactcgtgccctgccctctctgcagctaagatcgaacgcgcggggaccgggatggttttggtttgggaggcgttctcttgattatttggtcatgtcatcgctacgatccttcccatggtcgctggaacgaaggattgatctctgtccgtccatcaaattgaacagactgtatttattaagatcattgtatgtccctgtttaagctcagctctcgatgagacgatttttactatttccagccaattctcc

SEQ ID NO: 17111 - protein, 350 aa, Zea mays subsp. mays
  peptide (1)..(350): Ceres Seq. ID no. 12383256
MVGRMTGEMGGLRSRILRTLQSFPTAAPAQSPNLILAPLPPGAGPSPQPPAAPCVRLQEPAPLGDEARAAPEVPGGGGDDDKENVSPGATPRKAKKMKLSSDHHDRSPGLGEEQRADGATRYRRPDLASATLFDPDLLAAFRRAVDAYAQALDAARRRDVDVDDGDGVPGGGGGPGVADPLDAFERRCPPGGERAVVLYTTSIRGVRRTFEDCARVRRLLGGLRVAFLERDVSMHAPYREELRALLLCERGEDGGGAFPVPPRLFVDGRYLGGADEVVALHERSQLRPVLRRAAWRGAGEGPCAVCGGAWFVVCGACGGSHWLHDASAGAGRVPCSACNENGLVPCPLCS

SEQ ID NO: 17112 - protein, 346 aa, Zea mays subsp. mays
  peptide (1)..(346): Ceres Seq. ID no. 12383257
MTGEMGGLRSRILRTLQSFPTAAPAQSPNLILAPLPPGAGPSPQPPAAPCVRLQEPAPLGDEARAAPEVPGGGGDDDKENVSPGATPRKAKKMKLSSDHHDRSPGLGEEQRADGATRYRRPDLASATLFDPDLLAAFRRAVDAYAQALDAARRRDVDVDDGDGVPGGGGGPGVADPLDAFERRCPPGGERAVVLYTTSIRGVRRTFEDCARVRRLLGGLRVAFLERDVSMHAPYREELRALLLCERGEDGGGAFPVPPRLFVDGRYLGGADEVVALHERSQLRPVLRRAAWRGAGEGPCAVCGGAWFVVCGACGGSHWLHDASAGAGRVPCSACNENGLVPCPLCS

SEQ ID NO: 17113 - protein, 342 aa, Zea mays subsp. mays
  peptide (1)..(342): Ceres Seq. ID no. 12383258
MGGLRSRILRTLQSFPTAAPAQSPNLILAPLPPGAGPSPQPPAAPCVRLQEPAPLGDEARAAPEVPGGGGDDDKENVSPGATPRKAKKMKLSSDHHDRSPGLGEEQRADGATRYRRPDLASATLFDPDLLAAFRRAVDAYAQALDAARRRDVDVDDGDGVPGGGGGPGVADPLDAFERRCPPGGERAVVLYTTSIRGVRRTFEDCARVRRLLGGLRVAFLERDVSMHAPYREELRALLLCERGEDGGGAFPVPPRLFVDGRYLGGADEVVALHERSQLRPVLRRAAWRGAGEGPCAVCGGAWFVVCGACGGSHWLHDASAGAGRVPCSACNENGLVPCPLCS

SEQ ID NO: 17114 - DNA, 1136 bp, Zea mays subsp. mays
  misc_feature (1)..(1136): Ceres Seq. ID no. 12383299
  misc_feature (1)..(1136): Ortholog of  Ceres SEQ ID NO 15178997 as cited in SEQ ID NO 0
gcacgagaccattacctagaacatcctaatcgaaaagggaacagctatagccctgcagttagtagcatctcgtttcagagcccagaggagggaggaagaagaagaagaagcagcagcagcagacatggattgctgcatctgcagccccgtggcgtccgtgtacaggctgccaaggaacgccatctgcgctccctgccaccaaggcgccaaggccatcatcggtttcctcgacagggatggtgagcgggaagaggacgacggcggtggccgttctgtccagcctcctcgcggctcggccaaggggctgagagatgcgtgggagcaggtgaaggagatgagagccagggaggaggagaccaggcagagagctgccttcctccagcacggcttcgcgtcggcgtggaaggagggaatccacaccgacatcgtcgtcaaacctggcaccggtcccgcgattcgagcccacaaggccatcctggccgcgcggtcggaggtgttccggcacatgctgtccggcgacgaccgctgcaaggcccccgccggcgactccatctcgctcccggagctctcccacgacgacctgtccctcctgctcgccttcctctacacaggcgctctggaggcgccaggaggaggaggaggagaggccagccaggaccaggagcggcagctgcacgcgctcttcgtcgcggccgacaagtacgacgtgccgttcctgaggcgggcatgcgaggcgcggctggcggcgggcgtggcgccccggaacgcgctgcggacgcttgaggtcgccgagctgagctccagctccgcgctcatggagcgcgccatgggcgccgtcgtggagcacgccgaggaggtcgtgttctcggcggaatacgagcggttcgccgcacggaacgcggggctgtgcgtcgagatcacccgcgcgctgctggccaggatgccgacgccggcgaggagtgatggcccgtgcttagagcttggaagcagctagctgatgcatgcagttgtattgtatcagatgatgatggatcggaaagaatactactcttgttccagtttcgagtcacgacaatatgtaattgtaaacgcataagttcttctgaaacacgggcgagcacgatgagctagactgt

SEQ ID NO: 17115 - protein, 289 aa, Zea mays subsp. mays
  peptide (1)..(289): Ceres Seq. ID no. 12383300
MDCCICSPVASVYRLPRNAICAPCHQGAKAIIGFLDRDGEREEDDGGGRSVQPPRGSAKGLRDAWEQVKEMRAREEETRQRAAFLQHGFASAWKEGIHTDIVVKPGTGPAIRAHKAILAARSEVFRHMLSGDDRCKAPAGDSISLPELSHDDLSLLLAFLYTGALEAPGGGGGEASQDQERQLHALFVAADKYDVPFLRRACEARLAAGVAPRNALRTLEVAELSSSSALMERAMGAVVEHAEEVVFSAEYERFAARNAGLCVEITRALLARMPTPARSDGPCLELGSS

SEQ ID NO: 17116 - protein, 219 aa, Zea mays subsp. mays
  peptide (1)..(219): Ceres Seq. ID no. 12383301
MRAREEETRQRAAFLQHGFASAWKEGIHTDIVVKPGTGPAIRAHKAILAARSEVFRHMLSGDDRCKAPAGDSISLPELSHDDLSLLLAFLYTGALEAPGGGGGEASQDQERQLHALFVAADKYDVPFLRRACEARLAAGVAPRNALRTLEVAELSSSSALMERAMGAVVEHAEEVVFSAEYERFAARNAGLCVEITRALLARMPTPARSDGPCLELGSS

SEQ ID NO: 17117 - protein, 162 aa, Zea mays subsp. mays
  peptide (1)..(162): Ceres Seq. ID no. 12383302
MLSGDDRCKAPAGDSISLPELSHDDLSLLLAFLYTGALEAPGGGGGEASQDQERQLHALFVAADKYDVPFLRRACEARLAAGVAPRNALRTLEVAELSSSSALMERAMGAVVEHAEEVVFSAEYERFAARNAGLCVEITRALLARMPTPARSDGPCLELGSS

SEQ ID NO: 17118 - DNA, 815 bp, Zea mays subsp. mays
  misc_feature (1)..(815): Ceres Seq. ID no. 12416420
  misc_feature (1)..(815): Ortholog of  Ceres SEQ ID NO 15179942 as cited in SEQ ID NO 0
aaatacccagtaagtgagacttgtcgtccattctgaagtccggcggcggcgacagcggcgaggcgaggcctctgcgacttccagatctccccgacgaggaggaagtctctacagcggaggggagggagatgtcgtacatgcggggtgacctgctgacgagaatgcggaagctggtgaagggcctcgccaggcccgagccccggtggctcaaggccttggaacgggctccgccagtgacatttcctcgcccagaggggaagatcaagactctggtgcttcctgaggatgtgtatgtcacgaagttcaacagaatacatccagattcgctttaccatgatgcaatcaagataagtggatttgatccaccgccagctcgagtgtttgcttggcgtgtcctggagttgaaagagcaaggagtcgatgaagatgttgcaatgggctgtagcagataacgagtaccggacagagaagaaggcaaagaagaaagcgtacaaggagctgaaagaaatcgcccgcagtgaagggaggaagccacctccgaatccatacccgagtgccataaaggaaatacaagcggaggaaaagaagtatgtcatggaccgtttgcataacccgaaggtaatcgagattgcgaacaagatgaaggaggagcgagacaggatgttgagggatagagcagcaggtcagcggtagtcgtagcagcaggtaatgtttggactggccgactgggtgttgttgttcacgacatgggccaactggcgtcataaataatggttgttggagattgatatggcaaatatgaaactcttgtttct

SEQ ID NO: 17119 - protein, 107 aa, Zea mays subsp. mays
  peptide (1)..(107): Ceres Seq. ID no. 12416421
MSYMRGDLLTRMRKLVKGLARPEPRWLKALERAPPVTFPRPEGKIKTLVLPEDVYVTKFNRIHPDSLYHDAIKISGFDPPPARVFAWRVLELKEQGVDEDVAMGCSR

SEQ ID NO: 17120 - protein, 104 aa, Zea mays subsp. mays
  peptide (1)..(104): Ceres Seq. ID no. 12416422
MRGDLLTRMRKLVKGLARPEPRWLKALERAPPVTFPRPEGKIKTLVLPEDVYVTKFNRIHPDSLYHDAIKISGFDPPPARVFAWRVLELKEQGVDEDVAMGCSR

SEQ ID NO: 17121 - protein, 96 aa, Zea mays subsp. mays
  peptide (1)..(96): Ceres Seq. ID no. 12416423
MRKLVKGLARPEPRWLKALERAPPVTFPRPEGKIKTLVLPEDVYVTKFNRIHPDSLYHDAIKISGFDPPPARVFAWRVLELKEQGVDEDVAMGCSR

SEQ ID NO: 17122 - DNA, 1952 bp, Zea mays subsp. mays
  misc_feature (1)..(1952): Ceres Seq. ID no. 12366144
  misc_feature (1)..(1952): Ortholog of  Ceres SEQ ID NO 14310419 as cited in SEQ ID NO 55050
  misc_feature (1)..(1952): Ortholog of  Ceres SEQ ID NO 13657789 as cited in SEQ ID NO 66154
gctctcctgcccgtgcccacctccacgactccacctccgcagcgcccgcagtaacctccccacgccacgccacatcgcgtgcgagccccaaccgtcgccggcctcccaattaagccgcccccgcggcgcgatccggtgtccaccgctgctccgccggaggagggggaaggggaagaaaagggagggggggagcacagggggatgctagaggcgaagccgccgtcgccgggctccggcgcggccggggcggcggcgcacatccacggtcaccggcggtgggcggcgccgctgctggcctcggttctgctctcgtcgctcctcatcaccgcgtcgctcttcttttcctcctcccgcgcgctgctactctccttctcgccgctcccctccgcggcctccgccgagcctctcttcgtcgaggccaagctccgccagcagatgcgggccgaggagcgccccacgcggggcgccgtgcccaggatcgcctacctcatctccggctccgcggggggacggagccgcgctgcgccggacgctcagggcgctctaccacccggtaaacacatacgtcgtgcacctcgacctcgaggcccccgccgccgagcgcgccgaactcgcctctgccatccacgcggaccccgtctacgctaggttccgcaacgtcaaggtcgtcacacgggccaacttggtcacctaccgtggcccgaccatggtggccaacacgctgcacgcggctgccatcctgctgcgcgagggcggtaattgggactggttcatcaacctctccgcctccgactatccgctcgtcacccaggacgatctattgcatgtgctttctgagttgcccaggcagcttaacttcattgagcataccagtgacatcggatggaaggagtaccagagggcgaagccagtgatcatcgaccctgggctatacagcctgcagaagtctgacgttttctggataacagagaaaaggagtgtcccaactgcattcaagctcttcaccggctcagcatggatgatgcttactcatcagttcattgaatattgtatatggggatgggacaatctcccaaggacagtcctgatgtattacgcaaattttctttcttcaccagagggttacttccacactgtcatctgcaatgtccccgagttccgcaacaccacagtcaaccatgatctacatttcatttcttgggacaacccaccaaagcaacaccctcattatctcacactcgctgacttcgatggtatggttaacagcaacgcaccctttgcaaggaagtttggaagagaggatcctgtgctggacaagattgaccaggaactgttggcccgccgacctgatggatttgtgcctggtggatggacagacctactgaacacaactgagaaagggaaacccttcacggttgagcgcgtgcaagatctccgcccaggtcctggtgtggacagattaaagaaactcgtcacaggattgctcacccaagaaggttttgatgacaagcattgcctgtgaaactcccagtaagatgattctggggcagtaggttacacgctcaaatttgaaggcatcgggccatttgctaggaatgcccctactagctgaggcagcagcacattagcgtcatgtacgcgaggatgcaacgataaggaaggtgctcttacagacaactgcttgagttgagttaccttacagcaggagaccacggatgtagcagtcggagatgattatacagaactagtagctcattagtttattagatgattataatcagccccccaaccatgaataatgttggaatttttgacatttctgcgcccgagggttgtgcaaggtagcccattctttgtttcgaagccatggcacctggtgcaccagctggtagcgtgagacttcgttgtattgactagtggatgtttctgagtaaactgatacatttgattgc

SEQ ID NO: 17123 - protein, 271 aa, Zea mays subsp. mays
  peptide (1)..(271): Ceres Seq. ID no. 12366145
MVANTLHAAAILLREGGNWDWFINLSASDYPLVTQDDLLHVLSELPRQLNFIEHTSDIGWKEYQRAKPVIIDPGLYSLQKSDVFWITEKRSVPTAFKLFTGSAWMMLTHQFIEYCIWGWDNLPRTVLMYYANFLSSPEGYFHTVICNVPEFRNTTVNHDLHFISWDNPPKQHPHYLTLADFDGMVNSNAPFARKFGREDPVLDKIDQELLARRPDGFVPGGWTDLLNTTEKGKPFTVERVQDLRPGPGVDRLKKLVTGLLTQEGFDDKHCL

SEQ ID NO: 17124 - protein, 167 aa, Zea mays subsp. mays
  peptide (1)..(167): Ceres Seq. ID no. 12366146
MMLTHQFIEYCIWGWDNLPRTVLMYYANFLSSPEGYFHTVICNVPEFRNTTVNHDLHFISWDNPPKQHPHYLTLADFDGMVNSNAPFARKFGREDPVLDKIDQELLARRPDGFVPGGWTDLLNTTEKGKPFTVERVQDLRPGPGVDRLKKLVTGLLTQEGFDDKHCL

SEQ ID NO: 17125 - protein, 166 aa, Zea mays subsp. mays
  peptide (1)..(166): Ceres Seq. ID no. 12366147
MLTHQFIEYCIWGWDNLPRTVLMYYANFLSSPEGYFHTVICNVPEFRNTTVNHDLHFISWDNPPKQHPHYLTLADFDGMVNSNAPFARKFGREDPVLDKIDQELLARRPDGFVPGGWTDLLNTTEKGKPFTVERVQDLRPGPGVDRLKKLVTGLLTQEGFDDKHCL

SEQ ID NO: 17126 - DNA, 1287 bp, Zea mays subsp. mays
  misc_feature (1)..(1287): Ceres Seq. ID no. 12364248
  misc_feature (1)..(1287): Ortholog of  Ceres SEQ ID NO 14308727 as cited in SEQ ID NO 58726
  misc_feature (1)..(1287): Ortholog of  Ceres SEQ ID NO 13663517 as cited in SEQ ID NO 66850
gcacgagaccattacctagaacatcctaatcgaaaaagcgatcccaatccccgactcctccggcagcccgcaacgactcgcgccgcctccggtcgcgccgggtccaggtaaagcggcttccatctcctcggtctcagcgcgtcatcccctcctccttcctcttccgtttcccttagggttggagtagacacgtcggctcaaggatccttcgagggtcaggacacttattgattttcaacaaagatctagcatggaaccatcctcacagcctcaaccaatgatgggtgttgggtcacaaccttatcctgctgctgctccctatgtgccagtacctggatctcttgctgttcctcctggctcacagccagcagcagcattccccaatccaactcaactcagtgctcagcaccagatggtgtaccagcaggctcagcaatttcatcaacaacttcagcaacagcaggaacaacagctcagggagttctggactacccagatggatgagatcaagcaagcaaatgacttcaagatccacaccttgccacttgcaaggataaagaagataatgaaggctgatgaggatgtgcggatgatctctgcagaagctcctgttgtgtttgcgaaggcatgcgaggtattcatattagagctgacattgaggtcatggatgcacacagaggagaacaagcgccggaccttgcagaagaacgacattgcagctgccatcaccaggactgatatatatgacttcctggtggacataatcccgagggatgaaatgaaagaggaggggctcggacataatcccatagttggcctgccgcctgctatgggggctccagctgatcatggttctcatccatattactatgtgccagctcagcaggtgcaaggagcaggtatgatgtatggtggccagcagggtcacccagtgacttatatgtggcagacgccgcaagggcaagcggcagagccccccgaagaggagcagcagcagtctgcctgaatgtagcaaatagacgataacagcgaagcaattacatcttatctgaagttctgaacttagttctctaaacaaacaaatatgatttggttatgttaattgtgcagatgattgcaggctgaaacaattgtcgctaattaggtgtcatagcctcatagggtttcctaatggtagtttcgactcccgacgctgccacggcagcagtagaaaatgattgtaatttgcagactaatgtagtaagattagccttttctgtctaatccaatatacgattgaggccctcg

SEQ ID NO: 17127 - protein, 251 aa, Zea mays subsp. mays
  peptide (1)..(251): Ceres Seq. ID no. 12364249
MEPSSQPQPMMGVGSQPYPAAAPYVPVPGSLAVPPGSQPAAAFPNPTQLSAQHQMVYQQAQQFHQQLQQQQEQQLREFWTTQMDEIKQANDFKIHTLPLARIKKIMKADEDVRMISAEAPVVFAKACEVFILELTLRSWMHTEENKRRTLQKNDIAAAITRTDIYDFLVDIIPRDEMKEEGLGHNPIVGLPPAMGAPADHGSHPYYYVPAQQVQGAGMMYGGQQGHPVTYMWQTPQGQAAEPPEEEQQQSA

SEQ ID NO: 17128 - protein, 242 aa, Zea mays subsp. mays
  peptide (1)..(242): Ceres Seq. ID no. 12364250
MMGVGSQPYPAAAPYVPVPGSLAVPPGSQPAAAFPNPTQLSAQHQMVYQQAQQFHQQLQQQQEQQLREFWTTQMDEIKQANDFKIHTLPLARIKKIMKADEDVRMISAEAPVVFAKACEVFILELTLRSWMHTEENKRRTLQKNDIAAAITRTDIYDFLVDIIPRDEMKEEGLGHNPIVGLPPAMGAPADHGSHPYYYVPAQQVQGAGMMYGGQQGHPVTYMWQTPQGQAAEPPEEEQQQSA

SEQ ID NO: 17129 - protein, 241 aa, Zea mays subsp. mays
  peptide (1)..(241): Ceres Seq. ID no. 12364251
MGVGSQPYPAAAPYVPVPGSLAVPPGSQPAAAFPNPTQLSAQHQMVYQQAQQFHQQLQQQQEQQLREFWTTQMDEIKQANDFKIHTLPLARIKKIMKADEDVRMISAEAPVVFAKACEVFILELTLRSWMHTEENKRRTLQKNDIAAAITRTDIYDFLVDIIPRDEMKEEGLGHNPIVGLPPAMGAPADHGSHPYYYVPAQQVQGAGMMYGGQQGHPVTYMWQTPQGQAAEPPEEEQQQSA

SEQ ID NO: 17130 - DNA, 1461 bp, Zea mays subsp. mays
  misc_feature (1)..(1461): Ceres Seq. ID no. 12424045
  misc_feature (1)..(1461): Ortholog of  Ceres SEQ ID NO 14303596 as cited in SEQ ID NO 65356
gcacgagaccattacctagaacatcctaatcaaaaaaccaagtcctaggaataacaccacggcgcaaaaactcgcaccaccaccgccactaccgccgcgctgtagctagctaccataccagctgcacgcctcagtgctagcttcgccgggcgggggcggctgggacaccagcagggcgtgctgcgctgcgcctctccctgccactcactcgaggagcaaccgtctcagctgcaagggcgacaagaggatcgaccagctgctagtagctagctcgcacatgttcccggtcgaagtgtcggcgctcgcggcgggcggtgcgggagcggggcgtcaggctgccggcgacgccgccgggacgatgctaccgccctttttcatgggctccatctggcccgcggccgctggcgccgctggctccgaggaggacgaggcggccgccgccgccgccgcccacgaccgcgcgctcgccgcgtcgcgcaaccaccgcgaggccgagaagcgccggcgcgagcgcattaagtcgcacctcgaccgcctccgcaacgtcctcgcctgcgaccccaagatagacaaggcttcgctgctggcgaaggcggtggagagggtgcgggacctgaagcagcgggcggcgggcgtcggggaggcggcgccggcgcacctgttcccgacggagcacgacgagatcgtggtgctcgcgtcgggcagcggcgccgtcttcgaggcctccgtctgctgcgacgaccgctccgacctcctcccggacctcatcgagacgctgcgcgcgctccgcctccgcacgctccgctccgagatggccaccctcggcggccgcgtccgcaacgtgctcgtcctggcgcgcgacgtcgtcgacggcggcggcggtgccgtcgcgggaggtgatgacggatacggtggacgcgctgctgactcggcgggcggtgccacagacggcggcggcggtgacttcctcaaggaagccctgcgggctctggtagagaggccaggcgctgccggagaccggcccaagaggcgacgggtctcggacatgaacatgcaagcggcagcatagctagcacgccgccgcaggaggcgggcagatcatctcgctcgattggtcgtcgtagctcaaatacctaattgcatgcatgctcatgtcgaatatataaaaatggtactacctccatcatctccatgtttagttagatgtcttcatgatgctagctagatatctcttcatctcccattctctcatgcatggctttcttcttgagatgccataccattattagggatagtatggtattgctattagggtttgcttgagcttgaaccaaatgttgttccaaagccaatgcaaatctacctttgagctataataacaaaaaagagtcaggcaaaggttgcggacttgttacccaactagttaataagcaatatatattctaagcaatatatatttgg

SEQ ID NO: 17131 - protein, 263 aa, Zea mays subsp. mays
  peptide (1)..(263): Ceres Seq. ID no. 12424046
MFPVEVSALAAGGAGAGRQAAGDAAGTMLPPFFMGSIWPAAAGAAGSEEDEAAAAAAAHDRALAASRNHREAEKRRRERIKSHLDRLRNVLACDPKIDKASLLAKAVERVRDLKQRAAGVGEAAPAHLFPTEHDEIVVLASGSGAVFEASVCCDDRSDLLPDLIETLRALRLRTLRSEMATLGGRVRNVLVLARDVVDGGGGAVAGGDDGYGGRAADSAGGATDGGGGDFLKEALRALVERPGAAGDRPKRRRVSDMNMQAAA

SEQ ID NO: 17132 - protein, 236 aa, Zea mays subsp. mays
  peptide (1)..(236): Ceres Seq. ID no. 12424047
MLPPFFMGSIWPAAAGAAGSEEDEAAAAAAAHDRALAASRNHREAEKRRRERIKSHLDRLRNVLACDPKIDKASLLAKAVERVRDLKQRAAGVGEAAPAHLFPTEHDEIVVLASGSGAVFEASVCCDDRSDLLPDLIETLRALRLRTLRSEMATLGGRVRNVLVLARDVVDGGGGAVAGGDDGYGGRAADSAGGATDGGGGDFLKEALRALVERPGAAGDRPKRRRVSDMNMQAAA

SEQ ID NO: 17133 - protein, 230 aa, Zea mays subsp. mays
  peptide (1)..(230): Ceres Seq. ID no. 12424048
MGSIWPAAAGAAGSEEDEAAAAAAAHDRALAASRNHREAEKRRRERIKSHLDRLRNVLACDPKIDKASLLAKAVERVRDLKQRAAGVGEAAPAHLFPTEHDEIVVLASGSGAVFEASVCCDDRSDLLPDLIETLRALRLRTLRSEMATLGGRVRNVLVLARDVVDGGGGAVAGGDDGYGGRAADSAGGATDGGGGDFLKEALRALVERPGAAGDRPKRRRVSDMNMQAAA

SEQ ID NO: 17134 - DNA, 893 bp, Zea mays subsp. mays
  misc_feature (1)..(893): Ceres Seq. ID no. 12355035
  misc_feature (1)..(893): Ortholog of  Ceres SEQ ID NO 13583459 as cited in SEQ ID NO 62680
acgttctcgcgcgggatctaattccaaacagcactgcccttgcttctaccgttccccaagtgcgctccctctctcgccatccatctcgtgcacgactgggcaacctttgccgctgtcgaggtgcccaggtcttcatcggtccctcgtcagttcttctccggcccttcgccgccgacaagctcccccagctactgaagagacaggagcaaagagttaacaggagatgaatgcccctgaccgttatgagcgtttcgtcgtgccagagggcaccaagaaagtgtcctatgagagggatacaaagattgtgaatgctgcatcattcactgtcgaacgcgaggatcacactgtaggcaatatcctccgcatgtaagtacaatttaatttcttttctttaacgcttcccatcttatggtttgtttggttgacatgatacaggcagttgcacagagacccaaatgttctctttgccgggtataagctccctcacccactccagtacaagatcattgttaggatccacacaacgagccagtcctccccgacgcaggcctacacccaggctatcaatgatctagacaaagagcttgagtaccttaagcaagcttttgaggatgagaagaacaggtacgaggacaggatgaagcaggggttctagatgaatggaatagtgtgggagataaacttcctgtgttagttttatcctaggcgagtcaacaatgaaacgaacgcccaaggatcgtgaatgtctgatccctgaactaaggttgcttgctgtcgttttactgtcatgcttgtgtcaatattcgtattattgcaaacacaccaatggagttttacattgacatcctcagattgttcgcaactagataattacatgcatgcctgtcttcaac

SEQ ID NO: 17135 - protein, 74 aa, Zea mays subsp. mays
  peptide (1)..(74): Ceres Seq. ID no. 12355036
VLARDLIPNSTALASTVPQVRSLSRHPSRARLGNLCRCRGAQVFIGPSSVLLRPFAADKLPQLLKRQEQRVNRR

SEQ ID NO: 17136 - protein, 71 aa, Zea mays subsp. mays
  peptide (1)..(71): Ceres Seq. ID no. 12355037
RSRAGSNSKQHCPCFYRSPSALPLSPSISCTTGQPLPLSRCPGLHRSLVSSSPALRRRQAPPATEETGAKS

SEQ ID NO: 17137 - protein, 48 aa, Zea mays subsp. mays
  peptide (1)..(48): Ceres Seq. ID no. 12355038
MNAPDRYERFVVPEGTKKVSYERDTKIVNAASFTVEREDHTVGNILRM

SEQ ID NO: 17138 - DNA, 832 bp, Zea mays subsp. mays
  misc_feature (1)..(832): Ceres Seq. ID no. 12415059
  misc_feature (1)..(832): Ortholog of  Ceres SEQ ID NO 15170822 as cited in SEQ ID NO 52758
  misc_feature (1)..(832): Ortholog of  Ceres SEQ ID NO 12584296 as cited in SEQ ID NO 67866
actcatcaattctttgctggcggcctaagaagaaggatgtgctccgccatattctcgatccaacaaccaggtcgttcagccgcagattagcaggccgcctgcgctcctcctttcccctcagcctcccctcctctccggtgtacgtctccgccgagatggccgccccgctccggcggagcctcccctcccttggtcgcgcgcttctcacgccggcgccggcgcggatgctctccgcggaggcctctgatgccctcgttgagatcaagcccggggagatcgggatggtctccggcatccctgaggagcatctccgccgtaaggttctaatttattcaccagctaggactgcatcccagcaaggttcaggcaaagtcgggaggtggaaaattaatttttttgtcaacccaaaagtgggagaacccgttgatgggatggacatctactggggatccatatgctaatgtcggtgaagcaggacttacgtttgacagtgcagagtcagcaaaggcgtttgccgaaaaacatggatggaattatgtggttcggaaacgccatgcacctcttctgaggcctaaggcctacgctgagaacttcaagtggagaggccctccgaaagcggagcaagcatgagctcgagacatctgtgatgctgacattggcacgatgtcgttttcctcctggctcgattttattttgctttcaaccgtgcccattgttaaagtacgaactagagtatgcatctatcaaacttgtaataagcatgatgtgcaatcaaacaaaatggtgtacttgtacttccannangttaattcgtggatgacattgcttttgc

SEQ ID NO: 17139 - protein, 152 aa, Zea mays subsp. mays
  peptide (1)..(152): Ceres Seq. ID no. 12415060
SSILCWRPKKKDVLRHILDPTTRSFSRRLAGRLRSSFPLSLPSSPVYVSAEMAAPLRRSLPSLGRALLTPAPARMLSAEASDALVEIKPGEIGMVSGIPEEHLRRKVLIYSPARTASQQGSGKVGRWKINFFVNPKVGEPVDGMDIYWGSIC

SEQ ID NO: 17140 - protein, 101 aa, Zea mays subsp. mays
  peptide (1)..(101): Ceres Seq. ID no. 12415061
MAAPLRRSLPSLGRALLTPAPARMLSAEASDALVEIKPGEIGMVSGIPEEHLRRKVLIYSPARTASQQGSGKVGRWKINFFVNPKVGEPVDGMDIYWGSIC

SEQ ID NO: 17141 - protein, 78 aa, Zea mays subsp. mays
  peptide (1)..(78): Ceres Seq. ID no. 12415062
MLSAEASDALVEIKPGEIGMVSGIPEEHLRRKVLIYSPARTASQQGSGKVGRWKINFFVNPKVGEPVDGMDIYWGSIC

SEQ ID NO: 17142 - DNA, 1155 bp, Zea mays subsp. mays
  misc_feature (1)..(1155): Ceres Seq. ID no. 12369606
  misc_feature (1)..(1155): Ortholog of  Ceres SEQ ID NO 15225158 as cited in SEQ ID NO 0
gcacgagaccattacctagaacatcctaatcgaaaaaaaccatagcttcgtaaaccctcgccgccgccgccgccgccgccgccgatgacatcggaggagcacccctcgtctgcgtcctcggacggcagcaccaccatcggctccgacgaacatcttgacccctcgccatcaccttcgacgtccttcgactctcctcctgaatccgacgactccgccgcctcctcgctgctctcagacggctcttcagagtccgagcccatcattttcaagaaaccccgcccacccgtgcgctcgtggccggcctccgacgagatcgcgatcctcgagaccgtcgcgtcgcaccggcagaagcacgggcgacttcccctggcagacgacctcgccgccgcggtgcggggccgcctcagcgtgggggaccgcctcagcgccgcgcagatcaccaggcggctgtgcgcgctccgcaaccggtacgacaacaccgttatccgcctcaaacgcggcacgatcccggcgaaggacagcgacgtcaccatctacaggctctccaagctcatctgggagggcacgcgcagggggaggatagagaagaagacccgtgtgcccgacgcgcgcaatgacccaagagggttcgacgatctggccgagctgtacccttgcctctccgcggaggtggaggcgattggtgcgaggtgcggctacggggcgctgaagagggcattcgggcgcatcggtgacgacacggcggcgcggctggaggcgaagctgaagaggcagcggatggcggagaccagggcgagcggaaagcttgaccggctgaggtcgagagtcgccaatgcgcttcagggatttaacaagtgaaatgaagtggcggactttgttgaaggagctgaacgtggacgtctggaggattattagacaatagacacgccaagtgaaagtggctttaagattttgtcaaggagaggaagctacataacatggaggacttgctttgatgttctgcttaggttctatttgggactgatctaactttaaaaaattaattttggagctggcatagcaggttattaggtttattaggtgatccagaaaatcctagacctgcagaacctttagaaaatatcttgataagtcattttatttatattttagatt

SEQ ID NO: 17143 - protein, 257 aa, Zea mays subsp. mays
  peptide (1)..(257): Ceres Seq. ID no. 12369607
MTSEEHPSSASSDGSTTIGSDEHLDPSPSPSTSFDSPPESDDSAASSLLSDGSSESEPIIFKKPRPPVRSWPASDEIAILETVASHRQKHGRLPLADDLAAAVRGRLSVGDRLSAAQITRRLCALRNRYDNTVIRLKRGTIPAKDSDVTIYRLSKLIWEGTRRGRIEKKTRVPDARNDPRGFDDLAELYPCLSAEVEAIGARCGYGALKRAFGRIGDDTAARLEAKLKRQRMAETRASGKLDRLRSRVANALQGFNK

SEQ ID NO: 17144 - DNA, 1406 bp, Zea mays subsp. mays
  misc_feature (1)..(1406): Ceres Seq. ID no. 12415054
  misc_feature (1)..(1406): Ortholog of  Ceres SEQ ID NO 12609394 as cited in SEQ ID NO 52095
gcacgagaccattacctagaacatcctaatcgaaaagcgcgcgcgcttgcgcttccttccttgcttcccctgccctcttctttttattccccgtctcctttgttcgcttgcgggctgcgggaagggggagggagaggacgtgacgaggggaggggaggggaggggaggagggagggcaggcgggccgacgaatgcacagtcccggagaatattggtgaagcaataacttgatatagggttctagaccaaagaagcaatggaaaaggaatcatctgccacatacgagccaaaaaggaacagtgaaataagggtttttgagagttcagatgagatttcaacggatcttgctgagtatatctcacaagtttcagaaatttctgtcaaagaaaggggatactttgccatcgccttatctggaggtcccctagtcagttttttggggaaactttgtgaagctccatacaacaagacactggattggtccaaatggtacatcttctggtctgatgaacgtgctgtggcaaaaaaccatgcagagagtaactataggttaacaaaagaaggattcctcgccaaggtacctattctgaatggccatgtctactccataaatgacaatgccacagtggaggatgcagcaacagactatgaattcatgatcaggcagctggttaaggtccgcacaataggagtctcagagagaaacgactgtcccaagttcgatctcatccttctcaccatgggctccgatgggcatgtggcctcgcttttcccgaaccaccctgccatggagctgaaagacgactgggtcacctacatcaccgactctccgcagcctcctcctgagaggatcaccttcactctcccagtgatcaactcagcatccaacatcgcaatagtgtccaccggtgatgacaaagcaaaggctgttcacatagcagtttctgacatggccgaaggtcttgatgctcctacatcgctgcctgctagaatggtccagccaacggacgggaagctggtatggtttctggacaaggcggcggcatcattccttgactccaagaacgacgatgacgacgcttgctacgagcgtcatgagtgactaactccgaggatccttggtcgttttgaagcgaatgaacggaggtgtgtgtaagtaggtggttgcgtatgatggaagacgcgctgttccccttttagctcgatgcatgggttaattttgttctgagggtttttagctccggaaatctgaaattgctcttggtccttttgcagtgaggtgatttaaagcgatgaaatgtgtatgcgatgttgagtcgtcaaagaacaccggaatttaactgtggtcgtataatattatgtgctacattctatgctatggcagtttgtttttttttttgttttgt

SEQ ID NO: 17145 - protein, 281 aa, Zea mays subsp. mays
  peptide (1)..(281): Ceres Seq. ID no. 12415055
MEKESSATYEPKRNSEIRVFESSDEISTDLAEYISQVSEISVKERGYFAIALSGGPLVSFLGKLCEAPYNKTLDWSKWYIFWSDERAVAKNHAESNYRLTKEGFLAKVPILNGHVYSINDNATVEDAATDYEFMIRQLVKVRTIGVSERNDCPKFDLILLTMGSDGHVASLFPNHPAMELKDDWVTYITDSPQPPPERITFTLPVINSASNIAIVSTGDDKAKAVHIAVSDMAEGLDAPTSLPARMVQPTDGKLVWFLDKAAASFLDSKNDDDDACYERHE

SEQ ID NO: 17146 - protein, 148 aa, Zea mays subsp. mays
  peptide (1)..(148): Ceres Seq. ID no. 12415056
MIRQLVKVRTIGVSERNDCPKFDLILLTMGSDGHVASLFPNHPAMELKDDWVTYITDSPQPPPERITFTLPVINSASNIAIVSTGDDKAKAVHIAVSDMAEGLDAPTSLPARMVQPTDGKLVWFLDKAAASFLDSKNDDDDACYERHE

SEQ ID NO: 17147 - DNA, 994 bp, Zea mays subsp. mays
  misc_feature (1)..(994): Ceres Seq. ID no. 12377725
  misc_feature (1)..(994): Ortholog of  Ceres SEQ ID NO 13595414 as cited in SEQ ID NO 56539
  misc_feature (1)..(994): Ortholog of  Ceres SEQ ID NO 14314396 as cited in SEQ ID NO 60048
gcacgagaccattacctagaacatcctaatcgaaaaaccatcctgcacacactgcaatctccgtccatccctccgtttccttttttcctctgttgccatcagttcagtagtagcctgcagctctcccaccttctcgctgcgctgtactgtgctggcaggggaggggccatggacgaccccgtcgagcgcttgaaggacgggttccacaagttcaagaccgaggtctatgacaagaagccggagctgttcgagcctctcaaggccggccaggcccccaagtacgtggtgttcgcctgctccgactcccgcgtgtgcccgtcggtgaccctgggcctgcagcccggcgaggccttcaccgtccgcaacatcgccgccatggtcccagcctacgacaagaccaagtacaccggcatcgggtccgccatcgagtacgccgtgtgcgcgctcaaggtggaggtcctcgtggtcattggccacagctgctgcggtggcatcagggcgctcctctccctccaggacggcgcacctgacaacttccacttcgttgagaactgggttaagatcggcttccctgccaagattaaggtgaagaaagaccacgcatcggtgccgttcgatgaccagtgctctattctagagaaggaggccgtgaacctgtccctggagaacctcaagacctaccccttcgtcaaggaagggctggccaacgggacgctcaagctggtcggcggccactacaacttcgtgtcaggggagttccacccttggcactgaagtgattttttttgtaattcctcggcactgaagtgaagttttgtctgaatattgcctcgtaacataattgcccggtccctgttctagttgtggcgcagtctggtttgttttgacatttgttttcaaggttcatccttatttgcattgcatttgtttatggcttgacgttaacatttggaacaagtatttgtcaccgctcatgtcgatggtgtaaaacatg

SEQ ID NO: 17148 - protein, 257 aa, Zea mays subsp. mays
  peptide (1)..(257): Ceres Seq. ID no. 12377726
ARDHYLEHPNRKTILHTLQSPSIPPFPFFLCCHQFSSSLQLSHLLAALYCAGRGGAMDDPVERLKDGFHKFKTEVYDKKPELFEPLKAGQAPKYVVFACSDSRVCPSVTLGLQPGEAFTVRNIAAMVPAYDKTKYTGIGSAIEYAVCALKVEVLVVIGHSCCGGIRALLSLQDGAPDNFHFVENWVKIGFPAKIKVKKDHASVPFDDQCSILEKEAVNLSLENLKTYPFVKEGLANGTLKLVGGHYNFVSGEFHPWH

SEQ ID NO: 17149 - protein, 201 aa, Zea mays subsp. mays
  peptide (1)..(201): Ceres Seq. ID no. 12377727
MDDPVERLKDGFHKFKTEVYDKKPELFEPLKAGQAPKYVVFACSDSRVCPSVTLGLQPGEAFTVRNIAAMVPAYDKTKYTGIGSAIEYAVCALKVEVLVVIGHSCCGGIRALLSLQDGAPDNFHFVENWVKIGFPAKIKVKKDHASVPFDDQCSILEKEAVNLSLENLKTYPFVKEGLANGTLKLVGGHYNFVSGEFHPWH

SEQ ID NO: 17150 - protein, 132 aa, Zea mays subsp. mays
  peptide (1)..(132): Ceres Seq. ID no. 12377728
MVPAYDKTKYTGIGSAIEYAVCALKVEVLVVIGHSCCGGIRALLSLQDGAPDNFHFVENWVKIGFPAKIKVKKDHASVPFDDQCSILEKEAVNLSLENLKTYPFVKEGLANGTLKLVGGHYNFVSGEFHPWH

SEQ ID NO: 17151 - DNA, 2485 bp, Zea mays subsp. mays
  misc_feature (1)..(2485): Ceres Seq. ID no. 12366523
  misc_feature (1)..(2485): Ortholog of  Ceres SEQ ID NO 15178728 as cited in SEQ ID NO 67280
gcacgagaccattacctagaacatcctaatcgaaaaaataagtgagcttccaggccggggagagggactggccggcggaccgccgatggaaaactttggaggctcctaacttccaagataccaactagctcccagcctcccaccgtcttctttccacccttggctgatgctagggagatgggatttttggagctctaagacaaatagttctgctccttgcgccctgcgtgttcttgatctggcctctaagtttgttggctgttttctcgtgtttgaggtgatatctcgattctaaaaagctaccagatttcttctccctgtttgtatggacaaatttgggaatgaaccctagtctgtgtgcaaagcagccaaattggtgttcttgcggatcaaagctaaagctgcagcagttggtgaggatacaagagatgcagggagaaacaagagaagggcttgttagattctgcagagacactcttattggttgatattttttccatcaactccggccagatttgcggaacctcgcaattttaggagccatttgatcttggacatggagaagcaacccagcgtgcgacatggtgccctagagaaactgaagagcttccgggggatggagaagcagagaagcttcaagttcttgtccatggagaagcagcagagcttcaaaaggaacaaggacagccctgggaagcggggtgacaccgcgctccacctcgcggcgagagctggcagtgtcgcacatgttcagaagatccttgcggagtgtgatccagaactggtggtggagttagctggccgcacgaatcaagacggcgagactgcgttgtatgtgtctgctgagaaagggcatgttgaggttgtgtgtgagattttgaaggcttcggatgtgcagtcagccgggatcaaggccagtaacagcttcgatgcattccatattgcggcaaagcagggccatttggatgtcttgaaggagctgttacaggcctttccctcattagcaatgacaacaaattctgtaaatgccacagctttggacactgctgcaactcagggccacgttgacattgttaatcttctgctagaaacagatgcaagccttgctaggattgcaagaaataatggcaagacagttttgcattcagcagcaagaatgggccatgtggaggtggtcactgcactgttaaataaggacccggggattgggtttagaacagataagaagggacaaacagctctacacatggcttcgaaaggccaaaatgcagaaattctgcttgagttgttgaagcctgatatctcagttatccatgtggaggacagcaaggggaatagaccattgcatgttgcaactcggaagggaaacaccattatggttcagaccctaatatcagttgaggggattgaaatcaatgcggttaatagagctggagagactgcttttgctattgcagataaacaaggtaatgaagagctcgtcaacatcctgagagaggtcggtggaggaactgcaaaagagcaagtaaatcctcctaatccagcaaagcagcttaagcagacagtcagcgatatcaggcatgatgttcaatcacagatgaagcaaacacgccagaccaagatgcaattccaaaaaatcaagaagaggattcagaagctccacattggtgggctaaacaatgccatcaactccaacactgttgttgcggtgcttattgccaccgttgcctttgctgccatattccaactccccggtaattttctggaggacatgactcaagcacctgacccagacatgaccttggggcaagcattgatagccagtgatccagcctttataatcttcttggttttcgatgctttggctctctttatctcgcttgctgtcgtagtagtccagacatctctaattgttgttgaacagaaggccaagaagaagatggtctttgtgataaacaagttgatgtggctcgcatgcctctgcatctcggcagccttcatagcgctaacctacgttgtcgtgggtcgagacgacgagtggctggcctggtgtactatggcaattggcactgttaccatggtggccactgtcggttccatgtgctactgcgttgtcgctcacaggatggaagagaagagcttgaggaagatcaggaggacctccatgagccagtcatggtccatatcaattgactcggaagcagagctgatgaacagtgagtacaagaagatgtatgccctttaggatgatgtctgttcttgtcggctgagtcttgtatatattggtacccatttgcctgagaccagtccatggcattgagtgggattgactcaatcagaactatatttagtcctagaacatggcacctgtatgtaactgtagtcttgcagcctccagacatgaacataggggtgaagtctaggtgataggtgtagtcactttttttgttggcaaaatacaaatattgccaagcatgatgtcccg

SEQ ID NO: 17152 - protein, 562 aa, Zea mays subsp. mays
  peptide (1)..(562): Ceres Seq. ID no. 12366524
MEKQPSVRHGALEKLKSFRGMEKQRSFKFLSMEKQQSFKRNKDSPGKRGDTALHLAARAGSVAHVQKILAECDPELVVELAGRTNQDGETALYVSAEKGHVEVVCEILKASDVQSAGIKASNSFDAFHIAAKQGHLDVLKELLQAFPSLAMTTNSVNATALDTAATQGHVDIVNLLLETDASLARIARNNGKTVLHSAARMGHVEVVTALLNKDPGIGFRTDKKGQTALHMASKGQNAEILLELLKPDISVIHVEDSKGNRPLHVATRKGNTIMVQTLISVEGIEINAVNRAGETAFAIADKQGNEELVNILREVGGGTAKEQVNPPNPAKQLKQTVSDIRHDVQSQMKQTRQTKMQFQKIKKRIQKLHIGGLNNAINSNTVVAVLIATVAFAAIFQLPGNFLEDMTQAPDPDMTLGQALIASDPAFIIFLVFDALALFISLAVVVVQTSLIVVEQKAKKKMVFVINKLMWLACLCISAAFIALTYVVVGRDDEWLAWCTMAIGTVTMVATVGSMCYCVVAHRMEEKSLRKIRRTSMSQSWSISIDSEAELMNSEYKKMYAL

SEQ ID NO: 17153 - protein, 542 aa, Zea mays subsp. mays
  peptide (1)..(542): Ceres Seq. ID no. 12366525
MEKQRSFKFLSMEKQQSFKRNKDSPGKRGDTALHLAARAGSVAHVQKILAECDPELVVELAGRTNQDGETALYVSAEKGHVEVVCEILKASDVQSAGIKASNSFDAFHIAAKQGHLDVLKELLQAFPSLAMTTNSVNATALDTAATQGHVDIVNLLLETDASLARIARNNGKTVLHSAARMGHVEVVTALLNKDPGIGFRTDKKGQTALHMASKGQNAEILLELLKPDISVIHVEDSKGNRPLHVATRKGNTIMVQTLISVEGIEINAVNRAGETAFAIADKQGNEELVNILREVGGGTAKEQVNPPNPAKQLKQTVSDIRHDVQSQMKQTRQTKMQFQKIKKRIQKLHIGGLNNAINSNTVVAVLIATVAFAAIFQLPGNFLEDMTQAPDPDMTLGQALIASDPAFIIFLVFDALALFISLAVVVVQTSLIVVEQKAKKKMVFVINKLMWLACLCISAAFIALTYVVVGRDDEWLAWCTMAIGTVTMVATVGSMCYCVVAHRMEEKSLRKIRRTSMSQSWSISIDSEAELMNSEYKKMYAL

SEQ ID NO: 17154 - protein, 531 aa, Zea mays subsp. mays
  peptide (1)..(531): Ceres Seq. ID no. 12366526
MEKQQSFKRNKDSPGKRGDTALHLAARAGSVAHVQKILAECDPELVVELAGRTNQDGETALYVSAEKGHVEVVCEILKASDVQSAGIKASNSFDAFHIAAKQGHLDVLKELLQAFPSLAMTTNSVNATALDTAATQGHVDIVNLLLETDASLARIARNNGKTVLHSAARMGHVEVVTALLNKDPGIGFRTDKKGQTALHMASKGQNAEILLELLKPDISVIHVEDSKGNRPLHVATRKGNTIMVQTLISVEGIEINAVNRAGETAFAIADKQGNEELVNILREVGGGTAKEQVNPPNPAKQLKQTVSDIRHDVQSQMKQTRQTKMQFQKIKKRIQKLHIGGLNNAINSNTVVAVLIATVAFAAIFQLPGNFLEDMTQAPDPDMTLGQALIASDPAFIIFLVFDALALFISLAVVVVQTSLIVVEQKAKKKMVFVINKLMWLACLCISAAFIALTYVVVGRDDEWLAWCTMAIGTVTMVATVGSMCYCVVAHRMEEKSLRKIRRTSMSQSWSISIDSEAELMNSEYKKMYAL

SEQ ID NO: 17155 - DNA, 1753 bp, Zea mays subsp. mays
  misc_feature (1)..(1753): Ceres Seq. ID no. 12417068
  misc_feature (1)..(1753): Ortholog of  Ceres SEQ ID NO 14307296 as cited in SEQ ID NO 53966
  misc_feature (1)..(1753): Ortholog of  Ceres SEQ ID NO 15225423 as cited in SEQ ID NO 64689
  misc_feature (1)..(1753): Ortholog of  Ceres SEQ ID NO 15179340 as cited in SEQ ID NO 0
gcacgagaccattacctagaacatcctaatcgaaaaacagcgacagcaacacagcctcgcaagagaaagcaaagcaaagccaggagggaaagaaagaaatccttttcctacacctaaagagaccaccaaaccctgcgagcccaaaaaaaagccatggagtacaagagatcatcgcatgcggaagaggaagaagaggatgaggaggaagaagaagacgacgagaacgaggaagaagaggaggatgaggatgaggccagaggccttcgctacaccacggcggcggtggcacccgtaggcgctccgcagcagcagcggcagcaggtgcacgcccaagctcttggcctcggctcacacccctcccagctgatggattctgccgccttctcgaggccgctcttgcctcccaactcatctctggtgatgcagccaccgctgcctccaccaggcttcccgccggctcaccgccaacaaccgccgcatgcgcagctccatccgaggaaagcggagagggagagggacagagccgcgggagcgcagccccatgtccggcgccaccaccaagaaccagccaagaatggcgttctcggcggtggcgccgcgccaacgtcggcaccctctacgctcggcctcgtgcccgtggtggaagcggcccagctgtggaggtaccgggagtgcctgcggaaccacgcggcgcggcttggcgcgcacgtgctcgacggctgctgcgagttcatgccgtccgggggcgaaggggccgccgcgctggcctgcgccgcctgcggctgccaccgcagcttccaccggcgcgaggcggtccccggcggcggcgtggcggtgtcgccctcggcggcagtaacccccaccgccggcgccggcgccaactcctcccgcgccattccgctgctgctggccccgccgcacatgcacacgcgcccgccgcaccacgtgccggcgtccccggcgtccgcgcccgccgcgctggccgagtcgtccagcgaggagctgcgcggccccgcgcccccgacgcacgcgcacgcgcacccgccccacgcgcaggtggccgtagtaggagggtcggcctccgctccccccgcgccgagcaagaagcgtttccggaccaagttcacggcggagcagaaggacctcatgcgcgagttcgcgcaccgcgtcgggtggcgcgtccacaagcccgacgccgacgccgtggacgccttctgcgcccaggtcggcgtctcccggcgcgtcctcaaggtgtggatgcacaacaacaagcacctcgccaaggtcccgccctcgcccccatcctcctcctacccacagccactgcctcgccaccacccgcctccacctccgctccacatccaccatcacccgccgccgccgccgcagcagcagccgcagcagcagcagcatgatgcatgagtaccgagtagccgcagagcaacgcgagaggatcagacgatgccattagcttattagctcctttatttatccttcttcttcttcttcccttgtaatttcagtgacatcccagttgttaaggagttgactcatcatgcagcagttaggagggattaatatgattgtgtgacctaatctcatctcagccatactcctactacaagtcatcccctcgtcctcgttgctttcttggacgacctacctccattattaggttattagcatcagtggcgcttgcattggtatcttgcttatggtaatgacctaataatgatcactgtgttttagagct

SEQ ID NO: 17156 - protein, 422 aa, Zea mays subsp. mays
  peptide (1)..(422): Ceres Seq. ID no. 12417069
MEYKRSSHAEEEEEDEEEEEDDENEEEEEDEDEARGLRYTTAAVAPVGAPQQQRQQVHAQALGLGSHPSQLMDSAAFSRPLLPPNSSLVMQPPLPPPGFPPAHRQQPPHAQLHPRKAERERDRAAGAQPHVRRHHQEPAKNGVLGGGAAPTSAPSTLGLVPVVEAAQLWRYRECLRNHAARLGAHVLDGCCEFMPSGGEGAAALACAACGCHRSFHRREAVPGGGVAVSPSAAVTPTAGAGANSSRAIPLLLAPPHMHTRPPHHVPASPASAPAALAESSSEELRGPAPPTHAHAHPPHAQVAVVGGSASAPPAPSKKRFRTKFTAEQKDLMREFAHRVGWRVHKPDADAVDAFCAQVGVSRRVLKVWMHNNKHLAKVPPSPPSSSYPQPLPRHHPPPPPLHIHHHPPPPPQQQPQQQQHDA

SEQ ID NO: 17157 - protein, 351 aa, Zea mays subsp. mays
  peptide (1)..(351): Ceres Seq. ID no. 12417070
MDSAAFSRPLLPPNSSLVMQPPLPPPGFPPAHRQQPPHAQLHPRKAERERDRAAGAQPHVRRHHQEPAKNGVLGGGAAPTSAPSTLGLVPVVEAAQLWRYRECLRNHAARLGAHVLDGCCEFMPSGGEGAAALACAACGCHRSFHRREAVPGGGVAVSPSAAVTPTAGAGANSSRAIPLLLAPPHMHTRPPHHVPASPASAPAALAESSSEELRGPAPPTHAHAHPPHAQVAVVGGSASAPPAPSKKRFRTKFTAEQKDLMREFAHRVGWRVHKPDADAVDAFCAQVGVSRRVLKVWMHNNKHLAKVPPSPPSSSYPQPLPRHHPPPPPLHIHHHPPPPPQQQPQQQQHDA

SEQ ID NO: 17158 - protein, 333 aa, Zea mays subsp. mays
  peptide (1)..(333): Ceres Seq. ID no. 12417071
MQPPLPPPGFPPAHRQQPPHAQLHPRKAERERDRAAGAQPHVRRHHQEPAKNGVLGGGAAPTSAPSTLGLVPVVEAAQLWRYRECLRNHAARLGAHVLDGCCEFMPSGGEGAAALACAACGCHRSFHRREAVPGGGVAVSPSAAVTPTAGAGANSSRAIPLLLAPPHMHTRPPHHVPASPASAPAALAESSSEELRGPAPPTHAHAHPPHAQVAVVGGSASAPPAPSKKRFRTKFTAEQKDLMREFAHRVGWRVHKPDADAVDAFCAQVGVSRRVLKVWMHNNKHLAKVPPSPPSSSYPQPLPRHHPPPPPLHIHHHPPPPPQQQPQQQQHDA

SEQ ID NO: 17159 - DNA, 2248 bp, Zea mays subsp. mays
  misc_feature (1)..(2248): Ceres Seq. ID no. 12368259
  misc_feature (1)..(2248): Ortholog of  Ceres SEQ ID NO 14302243 as cited in SEQ ID NO 64663
gcacgagaccattacctagaacatcctaatcgaaaagagctagcgtctcttgcacagagacaggcccagggaggccgcgatggcgaacctgacgaacggctttgcgagcctccattgcgcaggggcgatgcatgtggacaaagggcacatgcaagcatcgggactgccttttctctctttcagaagatgcgcccagcttgatatctccagactaggtagcgtgcctcgtttcatgggcgcaacatctgctactgtctcccaacatcatgtgaggcagaggatcagcgccatcagagcctctactctttcctgcctgcaagacgatgccacaaaattctttgattttgtggttattggcagcggtgttgctggcctaaggtatgctctggaagtttcaaagcacggctctgttgctattatcaccaaggcagagcctcatgagagcaacacaaactatgcacaaggcggtgttagtgccgttctatgcccctcggattctgtagaaagtcacatgaaagacacaattgttgcaggggcttatttgtgcgatgaagagattgtcagggtagtttgcacagaaggtccagagcgtgtcaaggaactaattgccatgggtgcctcattcgaccatggtgaagatggtaggctgcaccttgcaagggaaggtggtcattctcacaacagaattgtccattctgccgatatgactggaagagagattgaaagagcactgcttcaagcagttcacaatgatgataacatatctttgtttggtcatcactttgctattgatctattgacatgtcagaaaaatggtgaaatctattgctatggagtggattcaatagacattgaaacccagaaggtagtccgcttcatctcgaaagtgacattgcttgcatcaggaggagctggccatatatatcccacaaccaccaatccaccggtagctactggggacggaatcgcaatgtgtcatcgtgctcaggctgtaatatccaatatggagtttgtgcagttccatccaactgcactttcagatgagggcctgccaataaagccaaagacaagaagagagaatgcatttctcataacggaagcggtgagaggagacggaggaattctttacaaccagtccatggagagattcatgccgatgtacgatgaccgctcggagctggcgccgagagacgtggttgcgaggagcatagacgaccagctgaagaaacgaggcgaaaagtatgtcctcctggacatcagccacagaccaagagacaaggttcttgcccacttccccaacatcgccgccgagtgcctgcggtacggcctggacatcacccggcagcccatcccggtggtcccggcggcgcactacatgtgcggcggcgtccgggcagggctgcagggggagaccaacgtgaagggcctctacgtggccggcgaggtcgcgtgcacggggctgcacggtgccaaccggctagcaagcaactcgctgctggaagcgctggtgttcgccaggagggcggtgcagccgtccatcgacctcatggtggatgccgacggagatgccagaccgtcgctggtggcgaggtgggcacggccgacgctgccgcggtcggtgctgggcgacagcgtgctgtcggacatcgtggggcggacgaggcaggccaggatggagctgcaatcagtgatgtgggagtatgtcggcatcgtgcgctcgacggggcggctgaagcaggccgagtggaggatcggtgacctggagtcggagtgggaggagttcctgttccggcgggggtggaagccgaccacggtgggcgtcgaggtctgcgagatgcgcaacctcttctgctgcgccaagctcgtcgtcaggagcgcgctggccaggcgcgagagccgcggcctgcacttcaccgaggacttcccgtacctggaggagagcaggaggaagcctacggtcatcttcccggccgccgtgcaggagctcacgtggagctccaagccgttgcagaggcagctgcaagcagatgacaatgcatgcagttcatccggctgggccttggggattcgttaattcattcattaatttttaagaactctcagtcgacagcatacacaaaatccagacagttaggctgtagtagcctgcgtatctttgcaattcttgccagttccagctgttgcaacttgtaaacggtgttgttggagctgcattatggtttatgaaccttgatccgtagtatatgtt

SEQ ID NO: 17160 - protein, 664 aa, Zea mays subsp. mays
  peptide (1)..(664): Ceres Seq. ID no. 12368260
MANLTNGFASLHCAGAMHVDKGHMQASGLPFLSFRRCAQLDISRLGSVPRFMGATSATVSQHHVRQRISAIRASTLSCLQDDATKFFDFVVIGSGVAGLRYALEVSKHGSVAIITKAEPHESNTNYAQGGVSAVLCPSDSVESHMKDTIVAGAYLCDEEIVRVVCTEGPERVKELIAMGASFDHGEDGRLHLAREGGHSHNRIVHSADMTGREIERALLQAVHNDDNISLFGHHFAIDLLTCQKNGEIYCYGVDSIDIETQKVVRFISKVTLLASGGAGHIYPTTTNPPVATGDGIAMCHRAQAVISNMEFVQFHPTALSDEGLPIKPKTRRENAFLITEAVRGDGGILYNQSMERFMPMYDDRSELAPRDVVARSIDDQLKKRGEKYVLLDISHRPRDKVLAHFPNIAAECLRYGLDITRQPIPVVPAAHYMCGGVRAGLQGETNVKGLYVAGEVACTGLHGANRLASNSLLEALVFARRAVQPSIDLMVDADGDARPSLVARWARPTLPRSVLGDSVLSDIVGRTRQARMELQSVMWEYVGIVRSTGRLKQAEWRIGDLESEWEEFLFRRGWKPTTVGVEVCEMRNLFCCAKLVVRSALARRESRGLHFTEDFPYLEESRRKPTVIFPAAVQELTWSSKPLQRQLQADDNACSSSGWALGIR

SEQ ID NO: 17161 - protein, 648 aa, Zea mays subsp. mays
  peptide (1)..(648): Ceres Seq. ID no. 12368261
MHVDKGHMQASGLPFLSFRRCAQLDISRLGSVPRFMGATSATVSQHHVRQRISAIRASTLSCLQDDATKFFDFVVIGSGVAGLRYALEVSKHGSVAIITKAEPHESNTNYAQGGVSAVLCPSDSVESHMKDTIVAGAYLCDEEIVRVVCTEGPERVKELIAMGASFDHGEDGRLHLAREGGHSHNRIVHSADMTGREIERALLQAVHNDDNISLFGHHFAIDLLTCQKNGEIYCYGVDSIDIETQKVVRFISKVTLLASGGAGHIYPTTTNPPVATGDGIAMCHRAQAVISNMEFVQFHPTALSDEGLPIKPKTRRENAFLITEAVRGDGGILYNQSMERFMPMYDDRSELAPRDVVARSIDDQLKKRGEKYVLLDISHRPRDKVLAHFPNIAAECLRYGLDITRQPIPVVPAAHYMCGGVRAGLQGETNVKGLYVAGEVACTGLHGANRLASNSLLEALVFARRAVQPSIDLMVDADGDARPSLVARWARPTLPRSVLGDSVLSDIVGRTRQARMELQSVMWEYVGIVRSTGRLKQAEWRIGDLESEWEEFLFRRGWKPTTVGVEVCEMRNLFCCAKLVVRSALARRESRGLHFTEDFPYLEESRRKPTVIFPAAVQELTWSSKPLQRQLQADDNACSSSGWALGIR

SEQ ID NO: 17162 - protein, 641 aa, Zea mays subsp. mays
  peptide (1)..(641): Ceres Seq. ID no. 12368262
MQASGLPFLSFRRCAQLDISRLGSVPRFMGATSATVSQHHVRQRISAIRASTLSCLQDDATKFFDFVVIGSGVAGLRYALEVSKHGSVAIITKAEPHESNTNYAQGGVSAVLCPSDSVESHMKDTIVAGAYLCDEEIVRVVCTEGPERVKELIAMGASFDHGEDGRLHLAREGGHSHNRIVHSADMTGREIERALLQAVHNDDNISLFGHHFAIDLLTCQKNGEIYCYGVDSIDIETQKVVRFISKVTLLASGGAGHIYPTTTNPPVATGDGIAMCHRAQAVISNMEFVQFHPTALSDEGLPIKPKTRRENAFLITEAVRGDGGILYNQSMERFMPMYDDRSELAPRDVVARSIDDQLKKRGEKYVLLDISHRPRDKVLAHFPNIAAECLRYGLDITRQPIPVVPAAHYMCGGVRAGLQGETNVKGLYVAGEVACTGLHGANRLASNSLLEALVFARRAVQPSIDLMVDADGDARPSLVARWARPTLPRSVLGDSVLSDIVGRTRQARMELQSVMWEYVGIVRSTGRLKQAEWRIGDLESEWEEFLFRRGWKPTTVGVEVCEMRNLFCCAKLVVRSALARRESRGLHFTEDFPYLEESRRKPTVIFPAAVQELTWSSKPLQRQLQADDNACSSSGWALGIR

SEQ ID NO: 17163 - DNA, 705 bp, Zea mays subsp. mays
  misc_feature (1)..(705): Ceres Seq. ID no. 12354738
  misc_feature (1)..(705): Ortholog of  Ceres SEQ ID NO 12624601 as cited in SEQ ID NO 61524
atccgcacactgaatcacgaatctctcgagccgcagtccagtccatccggctgcaggctctctgctgattctgagtacgttggcgttccaggcgatagctagcttagcttggcttggcacagtcgatcgtctccgatggcggcggacatgcagattgtcctggccgcggggaggaagatcgaggcgcagtatgtgagatgaaggtgccgctctactcctacggctgcgagaagaagatcaagaaggcactgtcacatctcaaaggtatacattcggttcaggcagactaccacgagcagaaggtgaccgtgtgggggatctgcgaccgcgacgacgtgctcgctgccgtccggaagaagcgccgagccgcgcggttctgggatgatgatggcggcgaactgggtccacgcgagcgtgcgccgacgcccggccgagaagctcccaagcagtacctggcagccttcgccgcgtacaggtggaggaagtcgtggaagaagcttttcccgctgatccgcctctgaagctcaccgtgtgtgcttaagcttattggcttctagcttctccacaagtgagcagtgtgtgtgcctgcgtcttgacgacgtctcaggaaccggaaaaaggggttggaacatggaacttaagttctaacagtagcccgtgcttcttggtagcaaataaacatgcttcgttaccgaagccttttgg

SEQ ID NO: 17164 - protein, 107 aa, Zea mays subsp. mays
  peptide (1)..(107): Ceres Seq. ID no. 12354739
MKVPLYSYGCEKKIKKALSHLKGIHSVQADYHEQKVTVWGICDRDDVLAAVRKKRRAARFWDDDGGELGPRERAPTPGREAPKQYLAAFAAYRWRKSWKKLFPLIRL

SEQ ID NO: 17165 - DNA, 2501 bp, Zea mays subsp. mays
  misc_feature (1)..(2501): Ceres Seq. ID no. 12363395
  misc_feature (1)..(2501): Ortholog of  Ceres SEQ ID NO 12613725 as cited in SEQ ID NO 68196
gcacgagaccattacctagaacatcctaatcgaaaaatcggagctctataaatcgccccaaccccctccctcgttctgccaccattgccatatcctcgatcacaagagcagctactagctgcctctagctcgatcggttagtttgtcgtgttgcttacgtacgtcagcagaggccatcgtcgagtgtatccagtggtcgagaagagggaagaaatgtctgcgaacgacggcgccggcgacacgaagatgagggcgatcgtcgtcgtagaggaaggggagatgagcgcgccggcggcgacgccgaagcagggcaagtgctgcgagtacacgctggacggctccgtcgacatgaagggccggccggcggtcaaggggaaatcaggagggtggcttgccggtgctctaatcctcgtgaaccagggcctggcgacgctggctttcttcggcgtgaacgtgaacctggtgctgttccctgacccgggtgctggggcagagcaatggcgacgccgccaacaacgtcagcaagtggacgggcaccgtgtacatgttctccctcatcggcgccttcctcagcgactcctattggggacgctacaagacctgcgccatcttccaggccatctttgtcctcggcctcgcgctgctgtcggtgtcgtcgcacctctacctaatcaggccggacgggtgcggcatggagcacgcgccctgcggcccgcactccggcaaggagctggggatcttctacatcgcgctgtacatgatcgccttcggcaacggcgggtaccagcccaacatcgccaccctgggcgccgaccagttcgacgaggaggaccccgccgaggcgcactccaaggtctccttcttcagctacttctacctcgccctcaacctcggctcgctcttctccaacaccttcctcagctacctcgaggacaagggcagctgggcgctcggcttctgggcctccaccgccgccgccgccacagcgctcctgcttttcctcagcggcacgctccggtaccgctatttccagcccggagggaacccgatcggaaggattggccaggtcgccatcgccgcgtgcaggaactggaaggcgggcgtgtcgaccgaagtggtaagcctgtacgagggcgacgagaaggcggatgccggtggcaggaagcttctgcacacgcaagggttcagtttcttggaccgcgcggcgcacgcggacactgactccaagctcggcgcgcgcgatccctggaagctgtgctcggtgacgcaggtggaggaggtcaagagcatcctgaggctcctccccatctggctctgcaccatcctctactccgttgtcttcacccagatggcctcgctctttgtcgtgcagggcgccgcgatgcgccgcaccaccccgttctccggcttctccgtcccgccctccagcatgtcggccttcgacattctcacagtcgccgccacgattttcctgtaccgccgcactatctgcccgttcctagcgcggctcagcggccgcccggctggccccaccgagctgcagaggatgggcctcggcctggtcgtgggtgccctggccatgaccacggccgggacggtcgagcacttccggaaggccagggccaccgcagcgatgagcagcgacctgcatatcatgtggcaggtgccgcagtatgcgctgatcggcgtgtcggaggtgatgatgtacgtcgggcagctcgagttcttcaacggccagatgcccgacgggctcaaaagcttcggagcgcgctgtgcatgatgtccatgtcgctcggcaactacttcagtgacatcatcgtgagcgcggtgaccaggctcaccacgacgcgagggcggtccgggtggatcccggctgacctcaacgaggggcacctcgacaagttctacttcctgctcgccgtgctggccgtcgcggacttcgcggtgtacctcgtatgcgcgagccgctacgggagcggcaaagtggacgggaggagcagcgacgacgaggaggagggagcggccggtcaggtgacatccccggcttacgcatgaccatcaccggccgcccggccggcgggcatcgtacgtatgttgttcttgtcttcttgaggtggaggctggcaggctgcaaatctcgagggccattggttatttggttgacggagttcttccattgacgacgatagcacaagcatggggcgagcatggacatagtgatatgactaattaaagaataagcacttaagcaggactagctaaacactacatgctgcagcatcatgctcgcggtttttggccagtgtaacaacagacgacgattgttactgaccacgactgttctttgcgtggtctacagagttcgcttctgcaaaattcaataatgggcgagtgctgtatcatataaagtcgcaggttgcgccacgtagctacgatgtgactaacaaacaaatatgtattcaagttatgtattaaacggttaaccgtgtctttttaccgtt

SEQ ID NO: 17166 - protein, 411 aa, Zea mays subsp. mays
  peptide (1)..(411): Ceres Seq. ID no. 12363396
MFSLIGAFLSDSYWGRYKTCAIFQAIFVLGLALLSVSSHLYLIRPDGCGMEHAPCGPHSGKELGIFYIALYMIAFGNGGYQPNIATLGADQFDEEDPAEAHSKVSFFSYFYLALNLGSLFSNTFLSYLEDKGSWALGFWASTAAAATALLLFLSGTLRYRYFQPGGNPIGRIGQVAIAACRNWKAGVSTEVVSLYEGDEKADAGGRKLLHTQGFSFLDRAAHADTDSKLGARDPWKLCSVTQVEEVKSILRLLPIWLCTILYSVVFTQMASLFVVQGAAMRRTTPFSGFSVPPSSMSAFDILTVAATIFLYRRTICPFLARLSGRPAGPTELQRMGLGLVVGALAMTTAGTVEHFRKARATAAMSSDLHIMWQVPQYALIGVSEVMMYVGQLEFFNGQMPDGLKSFGARCA

SEQ ID NO: 17167 - protein, 362 aa, Zea mays subsp. mays
  peptide (1)..(362): Ceres Seq. ID no. 12363397
MEHAPCGPHSGKELGIFYIALYMIAFGNGGYQPNIATLGADQFDEEDPAEAHSKVSFFSYFYLALNLGSLFSNTFLSYLEDKGSWALGFWASTAAAATALLLFLSGTLRYRYFQPGGNPIGRIGQVAIAACRNWKAGVSTEVVSLYEGDEKADAGGRKLLHTQGFSFLDRAAHADTDSKLGARDPWKLCSVTQVEEVKSILRLLPIWLCTILYSVVFTQMASLFVVQGAAMRRTTPFSGFSVPPSSMSAFDILTVAATIFLYRRTICPFLARLSGRPAGPTELQRMGLGLVVGALAMTTAGTVEHFRKARATAAMSSDLHIMWQVPQYALIGVSEVMMYVGQLEFFNGQMPDGLKSFGARCA

SEQ ID NO: 17168 - protein, 340 aa, Zea mays subsp. mays
  peptide (1)..(340): Ceres Seq. ID no. 12363398
MIAFGNGGYQPNIATLGADQFDEEDPAEAHSKVSFFSYFYLALNLGSLFSNTFLSYLEDKGSWALGFWASTAAAATALLLFLSGTLRYRYFQPGGNPIGRIGQVAIAACRNWKAGVSTEVVSLYEGDEKADAGGRKLLHTQGFSFLDRAAHADTDSKLGARDPWKLCSVTQVEEVKSILRLLPIWLCTILYSVVFTQMASLFVVQGAAMRRTTPFSGFSVPPSSMSAFDILTVAATIFLYRRTICPFLARLSGRPAGPTELQRMGLGLVVGALAMTTAGTVEHFRKARATAAMSSDLHIMWQVPQYALIGVSEVMMYVGQLEFFNGQMPDGLKSFGARCA

SEQ ID NO: 17169 - DNA, 903 bp, Zea mays subsp. mays
  misc_feature (1)..(903): Ceres Seq. ID no. 12354714
  misc_feature (1)..(903): Ortholog of  Ceres SEQ ID NO 13598422 as cited in SEQ ID NO 68856
agttcttgcacctcacgattcgttcggtttcttttcgttctagcatcgtccagctctcacacgcagcctatttgtccctgcgccctctgatgaatataccagctcaaagttagaacaggcatgggtggatcggtttgtgattttaatagttagagcagccatgaataaacaactccggtctctgtcatctgtttatcatggcagtcgctctcgaccagcgtcggggatggagcgaaatggctggtgaacaagctgaagggcaagatgcagaagccgctggcggacctgctcaaggagcacaacctccccgtgggcctgttcccgcgcgaggcgaccaactacgagttcgtgccagagacgcggcgcctgacggtgtacatcccgtccccctgcgaggtcggctaccgcgacggctccgagctgcggttcgacgccacggtgtcgggcacgctgggcgagggccgcctcacggaggtggaagggatcaagaccaaggtgctcgtctgggccagggtcaccgccgtcaaggccgacgccgccaaggtccacttcaccgccgggatcaagaggtcgcgcagccgggacgcctacgaggtcgtcaggggcggcatcaccgtcgacgaattctagcttagttttgctttcgcggctcacatggatggacgggcttcctcttgctcgctgcacgctgagatggacagattgttgctttcagttgcaggaataaattctacacccattagctatgtgggagatctgcgtgcactgtgcatcgtgtgttttgtgctttgttgtgagaatgtaacacctgaaggattcagaacgtgtgctcattgcttatgatatatgtctcgtgtcaggttttagcaacaaaatgtcccgagcagagctcgatgcagctct

SEQ ID NO: 17170 - protein, 145 aa, Zea mays subsp. mays
  peptide (1)..(145): Ceres Seq. ID no. 12354715
MAVALDQRRGWSEMAGEQAEGQDAEAAGGPAQGAQPPRGPVPARGDQLRVRARDAAPDGVHPVPLRGRLPRRLRAAVRRHGVGHAGRGPPHGGGRDQDQGARLGQGHRRQGRRRQGPLHRRDQEVAQPGRLRGRQGRHHRRRILA

SEQ ID NO: 17171 - protein, 132 aa, Zea mays subsp. mays
  peptide (1)..(132): Ceres Seq. ID no. 12354716
MAGEQAEGQDAEAAGGPAQGAQPPRGPVPARGDQLRVRARDAAPDGVHPVPLRGRLPRRLRAAVRRHGVGHAGRGPPHGGGRDQDQGARLGQGHRRQGRRRQGPLHRRDQEVAQPGRLRGRQGRHHRRRILA

SEQ ID NO: 17172 - protein, 121 aa, Zea mays subsp. mays
  peptide (1)..(121): Ceres Seq. ID no. 12354717
MQKPLADLLKEHNLPVGLFPREATNYEFVPETRRLTVYIPSPCEVGYRDGSELRFDATVSGTLGEGRLTEVEGIKTKVLVWARVTAVKADAAKVHFTAGIKRSRSRDAYEVVRGGITVDEF

SEQ ID NO: 17173 - DNA, 1833 bp, Zea mays subsp. mays
  misc_feature (1)..(1833): Ceres Seq. ID no. 12424091
  misc_feature (1)..(1833): Ortholog of  Ceres SEQ ID NO 15176333 as cited in SEQ ID NO 52787
  misc_feature (1)..(1833): Ortholog of  Ceres SEQ ID NO 15170403 as cited in SEQ ID NO 53457
  misc_feature (1)..(1833): Ortholog of  Ceres SEQ ID NO 14303479 as cited in SEQ ID NO 54254
  misc_feature (1)..(1833): Ortholog of  Ceres SEQ ID NO 14312047 as cited in SEQ ID NO 55656
  misc_feature (1)..(1833): Ortholog of  Ceres SEQ ID NO 13660872 as cited in SEQ ID NO 60830
  misc_feature (1)..(1833): Ortholog of  Ceres SEQ ID NO 12616221 as cited in SEQ ID NO 63291
  misc_feature (1)..(1833): Ortholog of  Ceres SEQ ID NO 14302355 as cited in SEQ ID NO 65830
gcacgagaccattacctagaacatcctaatcgaaaaaaaaaatttcaatgcctctctagatctttcaagctatccttgcttcctagctccctttggcgtgctgtaccggacgacaggggtaggtaggtaggtaggtgtagctagctcggcgagcgagggagcaatccggccaacagcacacgcgtcgatcgccatgccgagaagcggcggcggcggcaatggcggtggcattagtagtagtagtagggtgatgcccaacctcccggccgggttccgcttccaccccacggacgaggagctcatggtgcactacctcatgaggcaggccgcctccatgccgtgccccgtccccatcatcgccgaggtcaacatctaccagtgcaacccctgggatctccctgccaaggcattgttcggcgacaaggagtggtttttcttcagcccccgggaccgcaagtaccccaacggcgcccgccccaaccgcgccgccgggtccgggtactggaaggccaccggcaccgacaaggccatcctgtcgtcgtccacgcccacgagccacggcggcgccaacatcgtcgtcggcgtcaagaaggcgctcgtcttctacggcggcaggccgcccaagggcaccaagacggactggatcatgcacgagtaccgcctctcgggcgcggcggacgacgactgcaagggcagcaccaggcgcagagtgtcttcctcctcgtcgtcctccatgaggctggacgactgggtgctgtgcaggatccacaagaagagcaacgatttccagttgtcgtcgtcgtcggagcatgagcacgagcaggaggagccggcggcgggcggctcagcgacgactgtggaggaactagacgctctcgtcgtcgtcgacaacagcagcagcagcgacaccaccaccaccaccaccaccaccaacaacaactctactgaaacagctgcgactcatcacgatcctcagacgatgatgatgctgagcaagtcgtgctcgctcaccgacctcctcgacagcatcgactacgcggcgctctcctcgcagatgctcctcctcgacgcgccccagccccacgctgatgacccgccgccacacatggtctactacccaccggcggcgtcggcgacgatgcaccagcaagcaataatagctaataacaccaacagtaatgactactatgacgacgacaacttgttgccgactgctgcggtagacgcggcgacggcggtgctactcagctcgtcgcctgcagacaccaacggtgtgaacaagaggaagcgagtgacggccgtggactactacggcgccgctgaaccgccgaccttcttccaccaccacctcgatgatggcggcaacagcttcttcagtacgaccaagaagctcaagccgccgccgccaagtgattcgaggcatggcggccatttcggcaccgccacagcgagcagctaccgcgacagccagcagctcgtggacagcgcgagcagcagcggcgtcttcttccatcagtatgggtacggctacagcagcagcaacccgttcttgaacttgaaccagcagcagcagctgctactcaacagccacatcgggatgcagtagagctcgagagatcgagagagagagagagagagagagatgatatatcattggaaggatcagcacgcgtacgtgcagattaattgcagcgagttctatcttgtttgctttcattattatatactccgtatgtgtcgttcatgtaaaattagtttaaattgtaaattagtgtgctgaaattcatgtgcctgctctctgctcatcaatgaatggatgatgacgacccatgc

SEQ ID NO: 17174 - protein, 470 aa, Zea mays subsp. mays
  peptide (1)..(470): Ceres Seq. ID no. 12424092
MPRSGGGGNGGGISSSSRVMPNLPAGFRFHPTDEELMVHYLMRQAASMPCPVPIIAEVNIYQCNPWDLPAKALFGDKEWFFFSPRDRKYPNGARPNRAAGSGYWKATGTDKAILSSSTPTSHGGANIVVGVKKALVFYGGRPPKGTKTDWIMHEYRLSGAADDDCKGSTRRRVSSSSSSSMRLDDWVLCRIHKKSNDFQLSSSSEHEHEQEEPAAGGSATTVEELDALVVVDNSSSSDTTTTTTTTNNNSTETAATHHDPQTMMMLSKSCSLTDLLDSIDYAALSSQMLLLDAPQPHADDPPPHMVYYPPAASATMHQQAIIANNTNSNDYYDDDNLLPTAAVDAATAVLLSSSPADTNGVNKRKRVTAVDYYGAAEPPTFFHHHLDDGGNSFFSTTKKLKPPPPSDSRHGGHFGTATASSYRDSQQLVDSASSSGVFFHQYGYGYSSSNPFLNLNQQQQLLLNSHIGMQ

SEQ ID NO: 17175 - protein, 451 aa, Zea mays subsp. mays
  peptide (1)..(451): Ceres Seq. ID no. 12424093
MPNLPAGFRFHPTDEELMVHYLMRQAASMPCPVPIIAEVNIYQCNPWDLPAKALFGDKEWFFFSPRDRKYPNGARPNRAAGSGYWKATGTDKAILSSSTPTSHGGANIVVGVKKALVFYGGRPPKGTKTDWIMHEYRLSGAADDDCKGSTRRRVSSSSSSSMRLDDWVLCRIHKKSNDFQLSSSSEHEHEQEEPAAGGSATTVEELDALVVVDNSSSSDTTTTTTTTNNNSTETAATHHDPQTMMMLSKSCSLTDLLDSIDYAALSSQMLLLDAPQPHADDPPPHMVYYPPAASATMHQQAIIANNTNSNDYYDDDNLLPTAAVDAATAVLLSSSPADTNGVNKRKRVTAVDYYGAAEPPTFFHHHLDDGGNSFFSTTKKLKPPPPSDSRHGGHFGTATASSYRDSQQLVDSASSSGVFFHQYGYGYSSSNPFLNLNQQQQLLLNSHIGMQ

SEQ ID NO: 17176 - protein, 434 aa, Zea mays subsp. mays
  peptide (1)..(434): Ceres Seq. ID no. 12424094
MVHYLMRQAASMPCPVPIIAEVNIYQCNPWDLPAKALFGDKEWFFFSPRDRKYPNGARPNRAAGSGYWKATGTDKAILSSSTPTSHGGANIVVGVKKALVFYGGRPPKGTKTDWIMHEYRLSGAADDDCKGSTRRRVSSSSSSSMRLDDWVLCRIHKKSNDFQLSSSSEHEHEQEEPAAGGSATTVEELDALVVVDNSSSSDTTTTTTTTNNNSTETAATHHDPQTMMMLSKSCSLTDLLDSIDYAALSSQMLLLDAPQPHADDPPPHMVYYPPAASATMHQQAIIANNTNSNDYYDDDNLLPTAAVDAATAVLLSSSPADTNGVNKRKRVTAVDYYGAAEPPTFFHHHLDDGGNSFFSTTKKLKPPPPSDSRHGGHFGTATASSYRDSQQLVDSASSSGVFFHQYGYGYSSSNPFLNLNQQQQLLLNSHIGMQ

SEQ ID NO: 17177 - DNA, 903 bp, Zea mays subsp. mays
  misc_feature (1)..(903): Ceres Seq. ID no. 12425306
  misc_feature (1)..(903): Ortholog of  Ceres SEQ ID NO 13593379 as cited in SEQ ID NO 20573
catatagcccacttacttggtacaagactacattttccacaccagtgggaagtgacgcagtgacactgaaccttagtggtatgggtaagggtgaagtatgggtcaatggagagagtatcggacgatattgggtctctttcaaggctcctagtggcaatccttcgcaatcactgtaagtagagttagctccaacttctactctgtcgcactatttcctacaatctcataagcaaatgtctcactgaccggacattcctaaggtatcacataccacgagaatttctaaaccctcaagacaataccctagccctttttgaggaaatgggaggtaacccacagctaataacagtgaacacaatgtcggtatcaagagtgtgtggcaatgtgaatgagctctcagctccatcacttgaatataaggataaggaaccagcagtagatctctggtgtacagaaggcaaacagatatcaacaattgagtttgcaagctatggaagtcctacgggtgactgcaaaaaatttggtttcggaagatgccatgcaggagcatcagaatctgttgtaaaacaggcttgcttgggtaaaagtggatgctcagttcccgtaacacctatcaaatttggaggcgatccatgtcctggaatccaaaaatctcttctagttgtggcgaactgcaggtgacactagacagtcacacaagtatacatcatagaaaagaagttggacgagtataaaaaataaaaagatgagttacaaaatcaacgagcaatagagtggagggaaagtataagtcaaaacatatagtaattgttattaggtaggcaattgatcacttgaggcttagttggtagaccccatgtaccgattgttttgacctggcatagatatatatgtgttatctgt

SEQ ID NO: 17178 - protein, 119 aa, Zea mays subsp. mays
  peptide (1)..(119): Ceres Seq. ID no. 12425307
MGGNPQLITVNTMSVSRVCGNVNELSAPSLEYKDKEPAVDLWCTEGKQISTIEFASYGSPTGDCKKFGFGRCHAGASESVVKQACLGKSGCSVPVTPIKFGGDPCPGIQKSLLVVANCR

SEQ ID NO: 17179 - protein, 107 aa, Zea mays subsp. mays
  peptide (1)..(107): Ceres Seq. ID no. 12425308
MSVSRVCGNVNELSAPSLEYKDKEPAVDLWCTEGKQISTIEFASYGSPTGDCKKFGFGRCHAGASESVVKQACLGKSGCSVPVTPIKFGGDPCPGIQKSLLVVANCR

SEQ ID NO: 17180 - DNA, 2275 bp, Zea mays subsp. mays
  misc_feature (1)..(2275): Ceres Seq. ID no. 13495441
  misc_feature (1)..(2275): Ortholog of  Ceres SEQ ID NO 15171212 as cited in SEQ ID NO 56899
  misc_feature (1)..(2275): Ortholog of  Ceres SEQ ID NO 12613725 as cited in SEQ ID NO 68196
  misc_feature (1)..(2275): Ortholog of  Ceres SEQ ID NO 14301486 as cited in SEQ ID NO 69222
aatgtcccttggtcctctctctgacatctcttgtctcctcttcattgcaaatgtttctcttcctctctcccacctctcctctcctctccattgcaaaccttcgggatgaaggttgagagcctgctctgaaacgacgtacgtaaagggaacaaggaaccggagagcgtgcggcgggcttctggattttagagtaggcacctgtcgcttggacgtgcttcggaggagtaggtgtccaaaagttgcctacagtgggtccagaggtcatgatatagactgtcatggaggcagctgcagatgaggagaggccactgattcagtacctggctccagaggatgatgaagcttcctcacgatacactagcgacggaacgctcgatatcaacaatcagcgtgctctgaagaagagcaccgggaactggagagcatgcttcatgattctgggtaccgagttcgccgaatgcctggcattttacgcgaccgcaaagaacctggtcacctacctcacggctgagcttggtgagagcaacatcgatgccgcgacgaacgtgtccacctcgattggcagctgctacctcacgccgctcatcggcgccttcttggccgacacgtactggggaagatacaagacgatgatagtcttcctcttgctctacatcgttgggatgcttactctgacagcgtcggcgtggctccccttggccatggaggacgactcgcctaacaacagcggacttcggcgtgccacagcgtacctggggctctacctcgtttccctaggcacaggaggcatcaagccctgcacggcggccctcggggccgaccagttcgacggcggcgacgcggcggagcgggtcaccaaggcctccttcttcaactggtactacttctgcaccaacatcggctccctgctgtcggggaccgtgctcgtctgggtgcaggaaaatattggatggggagtcgggtttacggtgcagacggtgttcatgctgttcggcctcgccgtgttcgtcgccggtcgcaaggtgtataggtacaagaagctgggcgggagccctctcacaagggtagcccaggtggttgtcgcggcggtgaggaactgccatctcgtgctgcctgatgatacgtcagccctgtaccacgataagcttctaccaactgaaccaaatttcaggattgagtctgccagacaattcagattctttgacaaggctgccataatcaccggcgagaagggtgcagcagcgccgacgagcccttggagactgtgcacggtgtcccaggtggaggagctgaagatgctgctccggttgctgccggtctgggcatccatggtgctcttcttcgccgtcagtgcgcagacggtaaccacgttcattgagcaggctagggtaatggacaaccgcatcggcccgttcatcattcctccggcgtcgatagcgaccttcgacgtgatcagcgtcatggtctgtgtccccgtctacgacgccgtgctggtgcctctggcccggcgtgccactggcaacgaccgcggcctgtcgcagctgcaccggctctccatcgggatcgcgctgtccgtggtcgtcatggtgtacgcggcgctgctcgagggcaggcgcctggccctcgcgcgggccaacatgcccgccatgaacatcgcgtggcaggcgcccatgttcgccgtgcacggcgcggcggcggtcttcgccaccgtcggcgtgctcgagttcttctacgaccagtcgccggacgggatgaagagcctcggcaacgcgctcgcgctgctctccatggcggccgggagctatttcaactcgcttgcgctcagcactgtcggggtgatcacggcgagcggcggggaacgcgggtggctcccggacgacctgaacaagggtcatatggactatttcttctggatgatggccgctctaggaacgctcaacctgctgcacttcttgcactactgcaacagacgatacacaggcaacaacaacaccacttcttgacgtgtgctgtcatgctgtgtgcaccatgtttctcaaaataatagtttgacaatactacactttgtaattattgttgagtttgtgatctaaattctgaagaaggcggccaagttaatgagcgaagcggaggcccgtcgccgggaggctttccctactcattttagggtttcacctctataaatatctttgtaagccgtaggagataattatctcaattgtaaatctcctgcgatctgtaaccacccgaaaatagtgagaagttgttggccggc

SEQ ID NO: 17181 - protein, 574 aa, Zea mays subsp. mays
  peptide (1)..(574): Ceres Seq. ID no. 13495442
MEAAADEERPLIQYLAPEDDEASSRYTSDGTLDINNQRALKKSTGNWRACFMILGTEFAECLAFYATAKNLVTYLTAELGESNIDAATNVSTSIGSCYLTPLIGAFLADTYWGRYKTMIVFLLLYIVGMLTLTASAWLPLAMEDDSPNNSGLRRATAYLGLYLVSLGTGGIKPCTAALGADQFDGGDAAERVTKASFFNWYYFCTNIGSLLSGTVLVWVQENIGWGVGFTVQTVFMLFGLAVFVAGRKVYRYKKLGGSPLTRVAQVVVAAVRNCHLVLPDDTSALYHDKLLPTEPNFRIESARQFRFFDKAAIITGEKGAAAPTSPWRLCTVSQVEELKMLLRLLPVWASMVLFFAVSAQTVTTFIEQARVMDNRIGPFIIPPASIATFDVISVMVCVPVYDAVLVPLARRATGNDRGLSQLHRLSIGIALSVVVMVYAALLEGRRLALARANMPAMNIAWQAPMFAVHGAAAVFATVGVLEFFYDQSPDGMKSLGNALALLSMAAGSYFNSLALSTVGVITASGGERGWLPDDLNKGHMDYFFWMMAALGTLNLLHFLHYCNRRYTGNNNTTS

SEQ ID NO: 17182 - protein, 523 aa, Zea mays subsp. mays
  peptide (1)..(523): Ceres Seq. ID no. 13495443
MILGTEFAECLAFYATAKNLVTYLTAELGESNIDAATNVSTSIGSCYLTPLIGAFLADTYWGRYKTMIVFLLLYIVGMLTLTASAWLPLAMEDDSPNNSGLRRATAYLGLYLVSLGTGGIKPCTAALGADQFDGGDAAERVTKASFFNWYYFCTNIGSLLSGTVLVWVQENIGWGVGFTVQTVFMLFGLAVFVAGRKVYRYKKLGGSPLTRVAQVVVAAVRNCHLVLPDDTSALYHDKLLPTEPNFRIESARQFRFFDKAAIITGEKGAAAPTSPWRLCTVSQVEELKMLLRLLPVWASMVLFFAVSAQTVTTFIEQARVMDNRIGPFIIPPASIATFDVISVMVCVPVYDAVLVPLARRATGNDRGLSQLHRLSIGIALSVVVMVYAALLEGRRLALARANMPAMNIAWQAPMFAVHGAAAVFATVGVLEFFYDQSPDGMKSLGNALALLSMAAGSYFNSLALSTVGVITASGGERGWLPDDLNKGHMDYFFWMMAALGTLNLLHFLHYCNRRYTGNNNTTS

SEQ ID NO: 17183 - protein, 457 aa, Zea mays subsp. mays
  peptide (1)..(457): Ceres Seq. ID no. 13495444
MIVFLLLYIVGMLTLTASAWLPLAMEDDSPNNSGLRRATAYLGLYLVSLGTGGIKPCTAALGADQFDGGDAAERVTKASFFNWYYFCTNIGSLLSGTVLVWVQENIGWGVGFTVQTVFMLFGLAVFVAGRKVYRYKKLGGSPLTRVAQVVVAAVRNCHLVLPDDTSALYHDKLLPTEPNFRIESARQFRFFDKAAIITGEKGAAAPTSPWRLCTVSQVEELKMLLRLLPVWASMVLFFAVSAQTVTTFIEQARVMDNRIGPFIIPPASIATFDVISVMVCVPVYDAVLVPLARRATGNDRGLSQLHRLSIGIALSVVVMVYAALLEGRRLALARANMPAMNIAWQAPMFAVHGAAAVFATVGVLEFFYDQSPDGMKSLGNALALLSMAAGSYFNSLALSTVGVITASGGERGWLPDDLNKGHMDYFFWMMAALGTLNLLHFLHYCNRRYTGNNNTTS

SEQ ID NO: 17184 - DNA, 2121 bp, Zea mays subsp. mays
  misc_feature (1)..(2121): Ceres Seq. ID no. 12362506
  misc_feature (1)..(2121): Ortholog of  Ceres SEQ ID NO 14306569 as cited in SEQ ID NO 53008
  misc_feature (1)..(2121): Ortholog of  Ceres SEQ ID NO 14304855 as cited in SEQ ID NO 53974
ctagaacatcctaatcgaaaaacagtcaaaagctccccattcctcttccccttctcacccggcactcgaactctgcggccctgcaaaccctagctttcgctccatggccgacggcgatccggagccggcgccagcgccggcaccggcactggctaacgagaagctccatgtccgggcggcggcctacgtggatgagacgcgcccgccgccaccgctggagccctccgggggtccggacgaggagaagcgcccgcccgaagaggtagaagcggaggtggagatccacccgccgcgggaaccaaccggggagccgcccgttgatcgcccgggggtggaggtggtggcggacatgaaggcgaacgaagtggagaaggaaaggggggatcgggcaaaggagaagcgggagaaggataaagggaaggggaaggaggagaaagagaaggtggacgaagaggcgaaggggaaagtgactgcggtgatgaaggtggatgggacggagaaggaggtcaagccgacccggcgggccagctggggccagcgcggagacgcccatcctagcggtgccggtggtggccgtgccttgcttcatcgcgcctccagggtttgcgggccagtttgcaatgactcatcaagcagctttggcaagtgttacagcacaggcacaaatgcacttgcagtcaccaactccatctgcatgttcggaagtgccatcaagtccattttatatgacaccaagatctctagtgccattgcagcattcaccatcagtaactgaaggaaatatttgtacaccaattgctgacaagtcattttcatctgattcaaaatcacaccatgttgtaaatatggtagctgatggcttcaactggaggaaatatggtcagaagcaggtgaagagtagtgataattccaggagctactatagatgcacaaactctggttgtctcgctaaaaagaaggttgagcatttccctgatggccgcgttgtggaaatcatttacagaggagcccataatcatgaaccaccacagaagaccagatttgcaaaggaaagagtgactcctattagtgttccctctggaggcgaaaccttgaggcttgtgaacacagaaattgtagaatctagcacgcctacctgtgaattggaacggagtgccatctcagaaacttctgagcagcatctcttttgctcaagtgactgcgaaggggatgctggtaacaaatctgaagatgaacatcctagcgcggaagccctgccaaagcgaagaacacttgaggctacagcaccaaatttaacgccggttcgcagaactgttagagagcaaaagattattgtgcaggctggaaagatgagtgatggatacagatggcgtaagtatggacagaaaattgtgaagggaaatccaaaccccaggagttattaccgctgcacgcacggtggatgccctgtccgtaagcatgtggagaaggcgccagatgatgttaacaatattgttgtaacgtatgaaggcaaacacaaccacgacgaacctttcagaagcagcagcataccagtttctgtaatcagtccatcagcgacagccactgagcaacccaacacatcaagtacgtcagatgagagacctccaaccattacccagaaggacgccaacagtgagtctgataaggagacaaccttgaaatttggaggcgagaaggcactcgaatctgcgcaaacgctgctcagcatcaaaactaactccgatgacatgaagaactctgtcctgaaggaaacttctgctgcagttccagtccaaaacaattgagcatgctgagatagggtgattctattgacatctcttaggctgtcatatttattggttgagtgatatgctattatgttaacttgtatgacgtgaggcttggtgttcggtattccgtgtggagcatttgaggaagcattaggtttcaggaagccacgactggttgtttctgcctgtatagattcccattccctagtgtgtacaggtactgtattttatctgaggccagataacatgtgtggggtggttcttgagaacctgtgtgtgctgtattgttctagctcgatctattgcaatagctgatacgagattgtcattt

SEQ ID NO: 17185 - protein, 438 aa, Zea mays subsp. mays
  peptide (1)..(438): Ceres Seq. ID no. 12362507
MGRRRRSSRPGGPAGASAETPILAVPVVAVPCFIAPPGFAGQFAMTHQAALASVTAQAQMHLQSPTPSACSEVPSSPFYMTPRSLVPLQHSPSVTEGNICTPIADKSFSSDSKSHHVVNMVADGFNWRKYGQKQVKSSDNSRSYYRCTNSGCLAKKKVEHFPDGRVVEIIYRGAHNHEPPQKTRFAKERVTPISVPSGGETLRLVNTEIVESSTPTCELERSAISETSEQHLFCSSDCEGDAGNKSEDEHPSAEALPKRRTLEATAPNLTPVRRTVREQKIIVQAGKMSDGYRWRKYGQKIVKGNPNPRSYYRCTHGGCPVRKHVEKAPDDVNNIVVTYEGKHNHDEPFRSSSIPVSVISPSATATEQPNTSSTSDERPPTITQKDANSESDKETTLKFGGEKALESAQTLLSIKTNSDDMKNSVLKETSAAVPVQNN

SEQ ID NO: 17186 - protein, 394 aa, Zea mays subsp. mays
  peptide (1)..(394): Ceres Seq. ID no. 12362508
MTHQAALASVTAQAQMHLQSPTPSACSEVPSSPFYMTPRSLVPLQHSPSVTEGNICTPIADKSFSSDSKSHHVVNMVADGFNWRKYGQKQVKSSDNSRSYYRCTNSGCLAKKKVEHFPDGRVVEIIYRGAHNHEPPQKTRFAKERVTPISVPSGGETLRLVNTEIVESSTPTCELERSAISETSEQHLFCSSDCEGDAGNKSEDEHPSAEALPKRRTLEATAPNLTPVRRTVREQKIIVQAGKMSDGYRWRKYGQKIVKGNPNPRSYYRCTHGGCPVRKHVEKAPDDVNNIVVTYEGKHNHDEPFRSSSIPVSVISPSATATEQPNTSSTSDERPPTITQKDANSESDKETTLKFGGEKALESAQTLLSIKTNSDDMKNSVLKETSAAVPVQNN

SEQ ID NO: 17187 - protein, 379 aa, Zea mays subsp. mays
  peptide (1)..(379): Ceres Seq. ID no. 12362509
MHLQSPTPSACSEVPSSPFYMTPRSLVPLQHSPSVTEGNICTPIADKSFSSDSKSHHVVNMVADGFNWRKYGQKQVKSSDNSRSYYRCTNSGCLAKKKVEHFPDGRVVEIIYRGAHNHEPPQKTRFAKERVTPISVPSGGETLRLVNTEIVESSTPTCELERSAISETSEQHLFCSSDCEGDAGNKSEDEHPSAEALPKRRTLEATAPNLTPVRRTVREQKIIVQAGKMSDGYRWRKYGQKIVKGNPNPRSYYRCTHGGCPVRKHVEKAPDDVNNIVVTYEGKHNHDEPFRSSSIPVSVISPSATATEQPNTSSTSDERPPTITQKDANSESDKETTLKFGGEKALESAQTLLSIKTNSDDMKNSVLKETSAAVPVQNN

SEQ ID NO: 17188 - DNA, 516 bp, Zea mays subsp. mays
  misc_feature (1)..(516): Ceres Seq. ID no. 2789554
  misc_feature (1)..(516): Ortholog of  Ceres SEQ ID NO 12626078 as cited in SEQ ID NO 69113
cagctggaaatgatgaatttgttgggactatgatcgccgaagctattgacaaggttggccctgatggtgtcctctcaattgagtcgtcatcgtcgtttgagaccacagttgaagttgaagaagggatggagcttgacagaggatatatctcccctcagtttgtcactaaccttgaaaaatctattgttgagttcgaaaatgctcggattcttgtcactgatcagaagatatcatcgataaaagaaattattcctctgttggagcagacaacacagttaagagcaccacttcttataattgcagaggatgtaagtggcgaggcgctggcaacattagtcataaacaagcttagaggaattttaaatgtggctgcaatcaaagctcctggttttggtgagaggcgtaaagctcttcttcaggacattgccattgttacaggtgctgaatatcaatccaaagatcttggtctactagttgaggatacaacagtggagcagcttggcatagctccgaaag

SEQ ID NO: 17189 - protein, 171 aa, Zea mays subsp. mays
  peptide (1)..(171): Ceres Seq. ID no. 2789555
AGNDEFVGTMIAEAIDKVGPDGVLSIESSSSFETTVEVEEGMELDRGYISPQFVTNLEKSIVEFENARILVTDQKISSIKEIIPLLEQTTQLRAPLLIIAEDVSGEALATLVINKLRGILNVAAIKAPGFGERRKALLQDIAIVTGAEYQSKDLGLLVEDTTVEQLGIAPK

SEQ ID NO: 17190 - protein, 162 aa, Zea mays subsp. mays
  peptide (1)..(162): Ceres Seq. ID no. 2789556
MIAEAIDKVGPDGVLSIESSSSFETTVEVEEGMELDRGYISPQFVTNLEKSIVEFENARILVTDQKISSIKEIIPLLEQTTQLRAPLLIIAEDVSGEALATLVINKLRGILNVAAIKAPGFGERRKALLQDIAIVTGAEYQSKDLGLLVEDTTVEQLGIAPK

SEQ ID NO: 17191 - protein, 130 aa, Zea mays subsp. mays
  peptide (1)..(130): Ceres Seq. ID no. 2789557
MELDRGYISPQFVTNLEKSIVEFENARILVTDQKISSIKEIIPLLEQTTQLRAPLLIIAEDVSGEALATLVINKLRGILNVAAIKAPGFGERRKALLQDIAIVTGAEYQSKDLGLLVEDTTVEQLGIAPK

SEQ ID NO: 17192 - DNA, 499 bp, Zea mays subsp. mays
  misc_feature (1)..(499): Ceres Seq. ID no. 1940669
  misc_feature (1)..(499): Ortholog of  Ceres SEQ ID NO 14312324 as cited in SEQ ID NO 60453
  misc_feature (1)..(499): Ortholog of  Ceres SEQ ID NO 12624791 as cited in SEQ ID NO 63574
  misc_feature (1)..(499): Ortholog of  Ceres SEQ ID NO 12780574 as cited in SEQ ID NO 65624
acaccacgcgctgcagctgctcacacacagtgcaacagaccccctccacctccacgcgatcggacgacacgaagcggccatcggggatcccctccgctacgcctctcgatggtctcctccagcgcgccgccgccgcaggcccagtccgacgcggccgggtcgggggaggaagcgagcaagaaggtgcggaagccgtacacaatcaccaagtcccgggagagctggacggagcaggagcacgacaagttcctcgaggccctgcagctctttgatcgtgactggaagaagatagaggcttttgttggctccaagactgtcatccagattaggagccatgcacagaagtaccttttgaaggttcagaaaaatggaaccagcgaacatgtcccacctccacgaccaaagcgaaaagctgcncatccatatcctcagaaggcttccaagaatgttatgccagattttgcgggagtgtacagcttcttaggtagtgtttcgatcc

SEQ ID NO: 17193 - protein, 166 aa, Zea mays subsp. mays
  peptide (1)..(166): Ceres Seq. ID no. 1940670
  misc_feature (139)..(139): Xaa is any aa, unknown or other
TPRAAAAHTQCNRPPPPPRDRTTRSGHRGSPPLRLSMVSSSAPPPQAQSDAAGSGEEASKKVRKPYTITKSRESWTEQEHDKFLEALQLFDRDWKKIEAFVGSKTVIQIRSHAQKYLLKVQKNGTSEHVPPPRPKRKAXHPYPQKASKNVMPDFAGVYSFLGSVSI

SEQ ID NO: 17194 - protein, 96 aa, Zea mays subsp. mays
  peptide (1)..(96): Ceres Seq. ID no. 1940671
HHALQLLTHSATDPLHLHAIGRHEAAIGDPLRYASRWSPPARRRRRPSPTRPGRGRKRARRCGSRTQSPSPGRAGRSRSTTSSSRPCSSLIVTGRR

SEQ ID NO: 17195 - protein, 130 aa, Zea mays subsp. mays
  peptide (1)..(130): Ceres Seq. ID no. 1940672
  misc_feature (103)..(103): Xaa is any aa, unknown or other
MVSSSAPPPQAQSDAAGSGEEASKKVRKPYTITKSRESWTEQEHDKFLEALQLFDRDWKKIEAFVGSKTVIQIRSHAQKYLLKVQKNGTSEHVPPPRPKRKAXHPYPQKASKNVMPDFAGVYSFLGSVSI

SEQ ID NO: 17196 - DNA, 2378 bp, Zea mays subsp. mays
  misc_feature (1)..(2378): Ceres Seq. ID no. 12362946
  misc_feature (1)..(2378): Ortholog of  Ceres SEQ ID NO 13596857 as cited in SEQ ID NO 62924
gcacgagaccattacctagaacatcctaatcgaaaagcactctcctccccgctctcgacttcccatcccctgcggccccgccccccggactcttctcgtcgcggcgcgcccaatcggctcggtggcaggcttgcgcaccggctcggctcgggtccggttctaccgccaacgcgggccgccgcgctcccggatctcggtctagtcagagagttagcagacaaagatggcgacttatgagcccaagaacattctcataactggtgctgctggtttcattgcatcgcatgtcgccaaccgtctggtcaggaactatccccaatacaagatcgttgtccttgacaagattgactactgctccaacctaaagaacctcaatccttcacggtcttcaccaaatttcaaatttgtcaagggtgatattgcaagtgctgacctggtgaattaccttctgatcaccgagtcaattgacaccatcatgcactttgctgcccagacgcatgttgataattcttttggcaattcatttgagttcacaaaaaacaatatatatggcacccatgttcttcttgaggcttgcaaggttactggtcagatcaggaggtttattcatgtcagtaccgacgaggtgtatggtgaaactgatgaagatgctgtggttggtaaccatgaggcctcacagctgcttccaacaaatccatattcagctacaaaggctggggctgaaatgcttgtgatggcatacggaaggtcttatggtcttcctgtgattaccactcgtggcaacaatgtgtatgggccaaatcaatttcctgagaaactcattcccaaattcattcttttggccatgcaaggtctgcctcttccaattcatggagatggctccaacgtcaggagctacctgtactgtgaggatgtggccgaagcttttgaggtggtccttcacaaaggagaagttggacatgtgtataatattggtactgtgaaggagaggagggtgattgatgtagccaaggacatatgcaagctctttggcttggatactgagaaagtcatcaggtttgttgagaacaggcccttcaatgaccagaggtacttcttagatgatcagaagctaaagagattgggatgggcagagcgcacaccatgggaagagggcttgaagaagacgatggagtggtacaccaccaatcctgattactggggagatgtcactggtgcgctgcttcctcatccaaggatgttgatgactcctggagttgaaaggcataactgggctgaagaaatcaagtctctggcttcttcgccagctgaagctagtacaatagctccagcaaccagtaccaaaagcatctctgatgcccctcagaagccttcctacaggtttttaatctatggtaggactggatggattggtggcctccttggaaagatttgtgaaaagcaagggataccatatgagtatgggaaaggacgcttggaagagcgctctcagctgttggaggatattaggaatgtgaagccgactcatgttttcaatgctgccggagtcactgggagaccaaatgttgactggtgcgagacccataaacaggacactatccgcaccaatgttgtaggcactttgaatcttgctgatgtctgtcgcaagcagggtctgctcatgattaattatgctacaggctgtatatttgagtatgatgctaagcaccctgaagggtctggtattggctttaaagaggaagacacgcccaactttattggttccttttattccaaaactaaagcaatggtggaagagctattgaaggagtatgataatgtctgtactcttagggtcaggatgcctatatcatcagatctaagcaaccctcgtaacttcatcacaaagatagctcgttacgacaaggtggtgaacattcccaacagcatgacaatcttggatgagcttctgcctatctccattgagatggcgaaacgggactgcaggggcatatggaacttcaccaaccctggcgctgtaagccacaacgagattctagagatgtacaagaaatacatcaatcctgatttcaagtggaccaatttcacactcgaagaacaggccaaggtgatagtcgcgcctagaagcaacaacgagatggacacgtcgaaactgaaggccgagttccctcagctgctgtccatcaaggattctttgatcaagtacgtctttgagcccaacaggaaggttcctgttaattgaggatttacgttgcgtggatgcggaggttatttgtgttggttattggactctaaattagctaatgttgcaccgtggtgcgtactagttgtgttcgattcttttgggacaatagcaagcatacctctttctggtcgtc

SEQ ID NO: 17197 - protein, 672 aa, Zea mays subsp. mays
  peptide (1)..(672): Ceres Seq. ID no. 12362947
MATYEPKNILITGAAGFIASHVANRLVRNYPQYKIVVLDKIDYCSNLKNLNPSRSSPNFKFVKGDIASADLVNYLLITESIDTIMHFAAQTHVDNSFGNSFEFTKNNIYGTHVLLEACKVTGQIRRFIHVSTDEVYGETDEDAVVGNHEASQLLPTNPYSATKAGAEMLVMAYGRSYGLPVITTRGNNVYGPNQFPEKLIPKFILLAMQGLPLPIHGDGSNVRSYLYCEDVAEAFEVVLHKGEVGHVYNIGTVKERRVIDVAKDICKLFGLDTEKVIRFVENRPFNDQRYFLDDQKLKRLGWAERTPWEEGLKKTMEWYTTNPDYWGDVTGALLPHPRMLMTPGVERHNWAEEIKSLASSPAEASTIAPATSTKSISDAPQKPSYRFLIYGRTGWIGGLLGKICEKQGIPYEYGKGRLEERSQLLEDIRNVKPTHVFNAAGVTGRPNVDWCETHKQDTIRTNVVGTLNLADVCRKQGLLMINYATGCIFEYDAKHPEGSGIGFKEEDTPNFIGSFYSKTKAMVEELLKEYDNVCTLRVRMPISSDLSNPRNFITKIARYDKVVNIPNSMTILDELLPISIEMAKRDCRGIWNFTNPGAVSHNEILEMYKKYINPDFKWTNFTLEEQAKVIVAPRSNNEMDTSKLKAEFPQLLSIKDSLIKYVFEPNRKVPVN

SEQ ID NO: 17198 - protein, 588 aa, Zea mays subsp. mays
  peptide (1)..(588): Ceres Seq. ID no. 12362948
MHFAAQTHVDNSFGNSFEFTKNNIYGTHVLLEACKVTGQIRRFIHVSTDEVYGETDEDAVVGNHEASQLLPTNPYSATKAGAEMLVMAYGRSYGLPVITTRGNNVYGPNQFPEKLIPKFILLAMQGLPLPIHGDGSNVRSYLYCEDVAEAFEVVLHKGEVGHVYNIGTVKERRVIDVAKDICKLFGLDTEKVIRFVENRPFNDQRYFLDDQKLKRLGWAERTPWEEGLKKTMEWYTTNPDYWGDVTGALLPHPRMLMTPGVERHNWAEEIKSLASSPAEASTIAPATSTKSISDAPQKPSYRFLIYGRTGWIGGLLGKICEKQGIPYEYGKGRLEERSQLLEDIRNVKPTHVFNAAGVTGRPNVDWCETHKQDTIRTNVVGTLNLADVCRKQGLLMINYATGCIFEYDAKHPEGSGIGFKEEDTPNFIGSFYSKTKAMVEELLKEYDNVCTLRVRMPISSDLSNPRNFITKIARYDKVVNIPNSMTILDELLPISIEMAKRDCRGIWNFTNPGAVSHNEILEMYKKYINPDFKWTNFTLEEQAKVIVAPRSNNEMDTSKLKAEFPQLLSIKDSLIKYVFEPNRKVPVN

SEQ ID NO: 17199 - protein, 505 aa, Zea mays subsp. mays
  peptide (1)..(505): Ceres Seq. ID no. 12362949
MLVMAYGRSYGLPVITTRGNNVYGPNQFPEKLIPKFILLAMQGLPLPIHGDGSNVRSYLYCEDVAEAFEVVLHKGEVGHVYNIGTVKERRVIDVAKDICKLFGLDTEKVIRFVENRPFNDQRYFLDDQKLKRLGWAERTPWEEGLKKTMEWYTTNPDYWGDVTGALLPHPRMLMTPGVERHNWAEEIKSLASSPAEASTIAPATSTKSISDAPQKPSYRFLIYGRTGWIGGLLGKICEKQGIPYEYGKGRLEERSQLLEDIRNVKPTHVFNAAGVTGRPNVDWCETHKQDTIRTNVVGTLNLADVCRKQGLLMINYATGCIFEYDAKHPEGSGIGFKEEDTPNFIGSFYSKTKAMVEELLKEYDNVCTLRVRMPISSDLSNPRNFITKIARYDKVVNIPNSMTILDELLPISIEMAKRDCRGIWNFTNPGAVSHNEILEMYKKYINPDFKWTNFTLEEQAKVIVAPRSNNEMDTSKLKAEFPQLLSIKDSLIKYVFEPNRKVPVN

SEQ ID NO: 17200 - DNA, 493 bp, Zea mays subsp. mays
  misc_feature (1)..(493): Ceres Seq. ID no. 1671328
  misc_feature (1)..(493): Ortholog of  Ceres SEQ ID NO 13656161 as cited in SEQ ID NO 64908
cggtgtctgctaatatattcatattaacaaaggtctgtctgctgtttattggtatttacacttgtgtcaccagcttctttacaaatacgctcattctgcctacaataaatggaccaacggagggcctgatgctgatctatgtatcacatttgtttacattttttactggcgctgaatggtgggcacaggattttcggaaatcactaccctttttcggttggattccacttccatttctttctgaaattgaaattcctttatatgttcttgtgctgattcttatgatcgtatgtgctgttatacctactgttagatccaatgtcagtaatgtccaagaggtagttgaggcacgaaaaggaagcatggcattagcattagccatgatccttccttttattgtactgttagctggagttgctatctggtgttatctttctccttcaagtataatgaggaaccagccacatttgctcgtgattggaactggcttaat

SEQ ID NO: 17201 - protein, 163 aa, Zea mays subsp. mays
  peptide (1)..(163): Ceres Seq. ID no. 1671329
VSANIFILTKVCLLFIGIYTCVTSFFTNTLILPTINGPTEGLMLIYVSHLFTFFTGAEWWAQDFRKSLPFFGWIPLPFLSEIEIPLYVLVLILMIVCAVIPTVRSNVSNVQEVVEARKGSMALALAMILPFIVLLAGVAIWCYLSPSSIMRNQPHLLVIGTGL

SEQ ID NO: 17202 - protein, 121 aa, Zea mays subsp. mays
  peptide (1)..(121): Ceres Seq. ID no. 1671330
MLIYVSHLFTFFTGAEWWAQDFRKSLPFFGWIPLPFLSEIEIPLYVLVLILMIVCAVIPTVRSNVSNVQEVVEARKGSMALALAMILPFIVLLAGVAIWCYLSPSSIMRNQPHLLVIGTGL

SEQ ID NO: 17203 - DNA, 1953 bp, Zea mays subsp. mays
  misc_feature (1)..(1953): Ceres Seq. ID no. 12387587
  misc_feature (1)..(1953): Ortholog of  Ceres SEQ ID NO 15171476 as cited in SEQ ID NO 55569
  misc_feature (1)..(1953): Ortholog of  Ceres SEQ ID NO 14312069 as cited in SEQ ID NO 59191
gcacgagaccattacctagaacatcctaatcgaaaaaagcgaggaggcagtgcggagacgggagccagtggccagtgacagtgagcggcgacgttccagtgtccactgtccagtaggcgagcgaggaggtggtccattggccggccatggctcgtctccgctgcgtcttcgtcgtcttcgtcctgctctcgtctgccctccgccttccaggcgacgccattgcctcccgggggcaccatggccccgccgcacacgactacagggactcgctcgtcaagtccatcctcttcttcgagggccagcggtcgggcaagctgccgccgtcgcagcgcgtgtcctggcgcagggactcgggactctccgacggtcactccgccaaggtggacctggtgggcgggtaccacgacgctggtgacaacgtcaagttcgggttcccgatggcgttcagcatgacgatgctggcgtggagcgtggtggagtttggcggcctcatgaagtcggagctgcagcacgccagggacgccgtccgctggggcgccgactacctgctcaaggccacggcgcacccggacaccatctacgtccaggtcggtgacgcgaccaaggaccacgcgtgctgggagcggccggaggacatggacacccccaggacggtgtacaaggtggaccgtggcaccccgggatccgacgtcgccgccgagactgccgcggctctcgccgccgcctccctcgtcttccgcaagtccgacccggcctacgccagccgccttgtcgccagggccaagagggtgttcgagttcgcggacaagcaccgcggctcctacagcaccgggctggcggcggacgtgtgcccgtactactgctcctactccgggtaccaggacgagctcctgtggggcgcggcgtggcttcaccgcgccaccaagagcccctcttacctgagctacatccagacgaacgggcaggtgctgggcgcggacgagtcggacaacacgttcgggtgggacaacaagcacgcgggcgcgcgggtgctcatctccaagtcgttcctggtgcagcgcctgggcgcgctccacgagtacaagggccacgccgacggcttcatttgctccatggtgcccggcacggccacggaccagacgcagtacacccggggcgggctgctgttcaggcttagcgacagcaacatgcagtacgtgacgtcgagctctttcctcctgctcacctacgccaagtacctggcgttcgccaagcagacggtgcgctgcggcggcgtggcggtcacgccgcagcggctgcgcgccatcgcgcgcaggcaggtggactacctgctggggagcaacccgatggggatgtcctacatggtgggctacggcgccaagtacccgcgccgcatccaccaccgcgcttcgtcgctgccgtccgtggcggcgcacccggctaggatcggttgctcgcaggggttcaccgcgctgtacgcgggtggggccaatcccaacctgctcgtcggtgccgtcgtcgggggacccgacatgcaggacaggttccccgacgagcggaacgaccacgagcactcggagccggccacctacatcaacgcgccgctcgtcggcgcgctcgcctacctcgcgcactcctacggccagctctaagctccctagcgttaattgttgccgtgttgattgattgttcggaaattagagcatcgcgatttgacgaccccagtgcaagcaaaaccaaggaccttcgcttgtgggtcttaatatattgccactagtactcgtaggcgtgatttgtttgttacgcgacgccgctgctggcgcacgtatgtaagcgcggagacaaactgtgctccacggctccaccaagtgtactgctactaaggttgcagctcgcaactctatctgatgctatctactgttttgtttaattacatccacgaacctatccgcc

SEQ ID NO: 17204 - protein, 501 aa, Zea mays subsp. mays
  peptide (1)..(501): Ceres Seq. ID no. 12387588
MARLRCVFVVFVLLSSALRLPGDAIASRGHHGPAAHDYRDSLVKSILFFEGQRSGKLPPSQRVSWRRDSGLSDGHSAKVDLVGGYHDAGDNVKFGFPMAFSMTMLAWSVVEFGGLMKSELQHARDAVRWGADYLLKATAHPDTIYVQVGDATKDHACWERPEDMDTPRTVYKVDRGTPGSDVAAETAAALAAASLVFRKSDPAYASRLVARAKRVFEFADKHRGSYSTGLAADVCPYYCSYSGYQDELLWGAAWLHRATKSPSYLSYIQTNGQVLGADESDNTFGWDNKHAGARVLISKSFLVQRLGALHEYKGHADGFICSMVPGTATDQTQYTRGGLLFRLSDSNMQYVTSSSFLLLTYAKYLAFAKQTVRCGGVAVTPQRLRAIARRQVDYLLGSNPMGMSYMVGYGAKYPRRIHHRASSLPSVAAHPARIGCSQGFTALYAGGANPNLLVGAVVGGPDMQDRFPDERNDHEHSEPATYINAPLVGALAYLAHSYGQL

SEQ ID NO: 17205 - protein, 404 aa, Zea mays subsp. mays
  peptide (1)..(404): Ceres Seq. ID no. 12387589
MAFSMTMLAWSVVEFGGLMKSELQHARDAVRWGADYLLKATAHPDTIYVQVGDATKDHACWERPEDMDTPRTVYKVDRGTPGSDVAAETAAALAAASLVFRKSDPAYASRLVARAKRVFEFADKHRGSYSTGLAADVCPYYCSYSGYQDELLWGAAWLHRATKSPSYLSYIQTNGQVLGADESDNTFGWDNKHAGARVLISKSFLVQRLGALHEYKGHADGFICSMVPGTATDQTQYTRGGLLFRLSDSNMQYVTSSSFLLLTYAKYLAFAKQTVRCGGVAVTPQRLRAIARRQVDYLLGSNPMGMSYMVGYGAKYPRRIHHRASSLPSVAAHPARIGCSQGFTALYAGGANPNLLVGAVVGGPDMQDRFPDERNDHEHSEPATYINAPLVGALAYLAHSYGQL

SEQ ID NO: 17206 - protein, 400 aa, Zea mays subsp. mays
  peptide (1)..(400): Ceres Seq. ID no. 12387590
MTMLAWSVVEFGGLMKSELQHARDAVRWGADYLLKATAHPDTIYVQVGDATKDHACWERPEDMDTPRTVYKVDRGTPGSDVAAETAAALAAASLVFRKSDPAYASRLVARAKRVFEFADKHRGSYSTGLAADVCPYYCSYSGYQDELLWGAAWLHRATKSPSYLSYIQTNGQVLGADESDNTFGWDNKHAGARVLISKSFLVQRLGALHEYKGHADGFICSMVPGTATDQTQYTRGGLLFRLSDSNMQYVTSSSFLLLTYAKYLAFAKQTVRCGGVAVTPQRLRAIARRQVDYLLGSNPMGMSYMVGYGAKYPRRIHHRASSLPSVAAHPARIGCSQGFTALYAGGANPNLLVGAVVGGPDMQDRFPDERNDHEHSEPATYINAPLVGALAYLAHSYGQL

SEQ ID NO: 17207 - DNA, 1959 bp, Zea mays subsp. mays; identical to SEQ ID NO: 10575
  misc_feature (1)..(1959): Ceres Seq. ID no. 12387609
  misc_feature (1)..(1959): Ortholog of  Ceres SEQ ID NO 14314108 as cited in SEQ ID NO 63184

SEQ ID NO: 17208 - protein, 350 aa, Zea mays subsp. mays; identical to SEQ ID NO: 10576
  peptide (1)..(350): Ceres Seq. ID no. 12387610

SEQ ID NO: 17209 - protein, 275 aa, Zea mays subsp. mays; identical to SEQ ID NO: 10577
  peptide (1)..(275): Ceres Seq. ID no. 12387611

SEQ ID NO: 17210 - protein, 227 aa, Zea mays subsp. mays; identical to SEQ ID NO: 10578
  peptide (1)..(227): Ceres Seq. ID no. 12387612

SEQ ID NO: 17211 - DNA, 2051 bp, Zea mays subsp. mays
  misc_feature (1)..(2051): Ceres Seq. ID no. 12417588
  misc_feature (1)..(2051): Ortholog of  Ceres SEQ ID NO 14308370 as cited in SEQ ID NO 55399
gcacgagaccattacctagaacatcctaatcgaaaacaccccaaccaaaaccccacggacggaacccaagaaagaagagaggggcacgagtccccatgaacgacgccggcgaggccgaggcgcaagaactcgccccacccggcgcctccgccgccgccggcctgcaaggcagggcggaggtcgacacctcgacgcccttcaagtcggtgcgcgaggccgtcgaccgcttcggcggcagcgccgcctggagctccgacctcatcaagcgtatgttcgcgctgcccccgagcccaaagaagcaggaggggggcgacgaactggccgatctggaggagcagaccgcgcagctagagaaggagctcggcgtcaaggaaagggagacgcttgatgtgctcaaagagttggagtccaccaagaaggtggtcgcagatttgaagctaaagatacagaacgaaggtgccggtgcattttgcatccctgaagagagtgttcgggggtcaagccgagctgcccactgccgctgaagaggttgcagaagtgcagcctgagaatgctgaaactgatgtggttatgggcgcgcttcatgtgcagctgcaccagtctcctggtacttcagtgctgaagggccttgagcaggcaaaagccaatctaaacaggaccacgagtgatcttgcagctataagggcctccgtcgagtcgctgcggaacgacattgcgaaagagagaatcttggtggagagaagccgagagaaggtatgtgccaacacgacactgattgcttctctggaggatgagctgaaccggactgcacagaagctgcagacgctgcgggatctgcagaggaggcgtgacgatcaatcggacatcttcatagagatcaagaagatgacatctgagctagagcagctcaggaatgcagcgagtgctgccaaatcggaagctgctatgctgtctgccgaaattgagcagatgagagctagcatcggcactgctgaggtgaggtgccgtgcagccaggaagatagaagaggcggcaagggcagcagaagctcttgcccttgctgaaatcaagatcctactacgcaatgaagcttcagttgaggatcttcagggcatggaagatgtgagcctttcattggaagagtactctgagcttgctgccaaagctcaggaggctgatgaacgctcaagaaagaaaatcgatgctgcaatggtgcaggtagatgaagctaacaggacagaatctgactccctcagaaagctggaggaagctcgattacaggttgaggaatgtaagaaggcgctacaggatgcccagaagagggtggatgctgctaaccgagggaagagcgcagtagaagaggctcttcgcagatgtcgatccacgactggacacaggaggaggtcggtccatgaccctcccaggttcaaacatccagctccccgttccagagattctcagaatatggatatcgtcggtgtttcaaagggtcccttgaaaccaacgttgtcaatagggcagatactgagtatgaagctaatgggaccagatgggtatgacaaaagcgtctgggacgacgcaagcgaagcttctactatgtcgctcggacatatcctgaaccgcaggcatgcagtcgtgtatagcagcgatgcaactgctcagaagaaattcccagggaagaggaagaagtttgcctttacaggactctctattttcttggcgagacaggccaagaggaagaaggaaaagggatcgcattagaaactgctgaagccaacttgggctgggaaaagagaagcattgtagtctaccttgctagctgttaactcagaccctagtgttactgttcttgtaatttactagtatgtgtcgttgataggtgcctagatcattggtttttccatagcaggctagtaagttgtagctgatatttctgtctagtggttatttcaggtgctgtgtgaacttgcaatgtagcagtatgactagtagctgatatcaagtatatgaggcatatgtggttcactgagattggaatcttcttctctgct

SEQ ID NO: 17212 - protein, 396 aa, Zea mays subsp. mays
  peptide (1)..(396): Ceres Seq. ID no. 12417589
MGALHVQLHQSPGTSVLKGLEQAKANLNRTTSDLAAIRASVESLRNDIAKERILVERSREKVCANTTLIASLEDELNRTAQKLQTLRDLQRRRDDQSDIFIEIKKMTSELEQLRNAASAAKSEAAMLSAEIEQMRASIGTAEVRCRAARKIEEAARAAEALALAEIKILLRNEASVEDLQGMEDVSLSLEEYSELAAKAQEADERSRKKIDAAMVQVDEANRTESDSLRKLEEARLQVEECKKALQDAQKRVDAANRGKSAVEEALRRCRSTTGHRRRSVHDPPRFKHPAPRSRDSQNMDIVGVSKGPLKPTLSIGQILSMKLMGPDGYDKSVWDDASEASTMSLGHILNRRHAVVYSSDATAQKKFPGKRKKFAFTGLSIFLARQAKRKKEKGSH

SEQ ID NO: 17213 - protein, 291 aa, Zea mays subsp. mays
  peptide (1)..(291): Ceres Seq. ID no. 12417590
MTSELEQLRNAASAAKSEAAMLSAEIEQMRASIGTAEVRCRAARKIEEAARAAEALALAEIKILLRNEASVEDLQGMEDVSLSLEEYSELAAKAQEADERSRKKIDAAMVQVDEANRTESDSLRKLEEARLQVEECKKALQDAQKRVDAANRGKSAVEEALRRCRSTTGHRRRSVHDPPRFKHPAPRSRDSQNMDIVGVSKGPLKPTLSIGQILSMKLMGPDGYDKSVWDDASEASTMSLGHILNRRHAVVYSSDATAQKKFPGKRKKFAFTGLSIFLARQAKRKKEKGSH

SEQ ID NO: 17214 - protein, 271 aa, Zea mays subsp. mays
  peptide (1)..(271): Ceres Seq. ID no. 12417591
MLSAEIEQMRASIGTAEVRCRAARKIEEAARAAEALALAEIKILLRNEASVEDLQGMEDVSLSLEEYSELAAKAQEADERSRKKIDAAMVQVDEANRTESDSLRKLEEARLQVEECKKALQDAQKRVDAANRGKSAVEEALRRCRSTTGHRRRSVHDPPRFKHPAPRSRDSQNMDIVGVSKGPLKPTLSIGQILSMKLMGPDGYDKSVWDDASEASTMSLGHILNRRHAVVYSSDATAQKKFPGKRKKFAFTGLSIFLARQAKRKKEKGSH

SEQ ID NO: 17215 - DNA, 1069 bp, Zea mays subsp. mays
  misc_feature (1)..(1069): Ceres Seq. ID no. 12417357
  misc_feature (1)..(1069): Ortholog of  Ceres SEQ ID NO 12784064 as cited in SEQ ID NO 66982
  misc_feature (1)..(1069): Ortholog of  Ceres SEQ ID NO 15177907 as cited in SEQ ID NO 0
gcacgagaccattacctagaacatcctaatcgaaaaaatcatcactgccatctctctctgactctgtgtccgtctctaaactctagtctgtgcgaatcctgctgccagcagcgaggaacagaacagtagccaatttgccatctcacagttgcgttcctccgattccccgtcccccgatggacctgtctcccagctcgtcggcgccatccgcgccgccggtgccgtgcgagtggtccggcgccgggctcggctccgcggcgtgcggcctcgcctgcagggtgctctgcgccgtcgccacctgcgtcttcgcggccgtggggtcgctggtcggggcggtgacggggtccatggtggggctggcgaccgagagcgggatgctgcgcggcgccggcatcggggccatctccggcgccgtcttctccatcgaggtcgccgagtcgtcccgcgacctctggcactcgggcgactccggcgtctggaccctcctctacatggtggacatcatctccagtctcttgagcggcaggctggtccgggagaaggtggggccggctgttcagagcgccgtgcagagccagatcagcgccatcagctcgccgttcgaggagacgagcgacctgttcgagaccggcagcgtgaggggcctccccgaggccgcggtgcgccggctgccggtgacggtggtcgcggaggacggcgccgtggacgcggcgggccaggcgctgtgctgctcggtgtgcctgcaggacttccgggtgggcgaccgcgcgcggaggctgcccggttgccgccacctgttccacgtgccctgcatcgactgctggctcctcaggcacggctcctgcccgctgtgccggcgagacatctgaaactcggtcgtctgctctgtgaaccgccacccacgtcgccggaaacgtggtgtagtgttgctgctttggacgagatggtcagttagttgagtagggttcctactttttaggacggcaccctgatgcccgtaagggaaatggtgcgctctgacgctctgttaactaaaaaagaagaagagagaaaacagcccctcagcttc

SEQ ID NO: 17216 - protein, 230 aa, Zea mays subsp. mays
  peptide (1)..(230): Ceres Seq. ID no. 12417358
MDLSPSSSAPSAPPVPCEWSGAGLGSAACGLACRVLCAVATCVFAAVGSLVGAVTGSMVGLATESGMLRGAGIGAISGAVFSIEVAESSRDLWHSGDSGVWTLLYMVDIISSLLSGRLVREKVGPAVQSAVQSQISAISSPFEETSDLFETGSVRGLPEAAVRRLPVTVVAEDGAVDAAGQALCCSVCLQDFRVGDRARRLPGCRHLFHVPCIDCWLLRHGSCPLCRRDI

SEQ ID NO: 17217 - protein, 173 aa, Zea mays subsp. mays
  peptide (1)..(173): Ceres Seq. ID no. 12417359
MVGLATESGMLRGAGIGAISGAVFSIEVAESSRDLWHSGDSGVWTLLYMVDIISSLLSGRLVREKVGPAVQSAVQSQISAISSPFEETSDLFETGSVRGLPEAAVRRLPVTVVAEDGAVDAAGQALCCSVCLQDFRVGDRARRLPGCRHLFHVPCIDCWLLRHGSCPLCRRDI

SEQ ID NO: 17218 - protein, 164 aa, Zea mays subsp. mays
  peptide (1)..(164): Ceres Seq. ID no. 12417360
MLRGAGIGAISGAVFSIEVAESSRDLWHSGDSGVWTLLYMVDIISSLLSGRLVREKVGPAVQSAVQSQISAISSPFEETSDLFETGSVRGLPEAAVRRLPVTVVAEDGAVDAAGQALCCSVCLQDFRVGDRARRLPGCRHLFHVPCIDCWLLRHGSCPLCRRDI

SEQ ID NO: 17219 - DNA, 1012 bp, Zea mays subsp. mays
  misc_feature (1)..(1012): Ceres Seq. ID no. 12417137
  misc_feature (1)..(1012): Ortholog of  Ceres SEQ ID NO 14307245 as cited in SEQ ID NO 54025
atcttcgcccccgtctcgggcgcccattctcctcctcgacgccgcctccgtctcgcgccattgcacgtcgtcgacgactccaagaacccccccgaggagaggtctgagacggataagatggtcgacggcatggacttcggggagctctgcagcgacttcgagtgcataagcagcccctacgtggagtcgacggcgaggcaggtcgcgcgggacatcctggagctccgcgaggacaaccgcgcattcaactgctacgcggtctccgtcaagtacaaggacccactcaggacatttgttgggcgtgagaagtacaggaggccgttgtggatcaccaaggcgttggaaaaccctgtagtgacagtccaggaaatgtcaatgcagtcgacgagcaacctgaccatcagatgggcgttgagagggaagcctaagaacccgttgttcgcgagcgtcggaggagacgtcatcgtccgcgtcgagtcacggttcgtcctgaaccagataagcgggcaggtgctggagcaggccgagtcctgggacctctccgcctcgtccctccctgcccaggcctacttctggctgtcccgaagggtctactccgccgtggagtccgggaaggacgcgatcgaagccgccaagagcgcggcgtcgtctgggctgacgaccaagggagaccagaatctcgaggcctatccggatccttctgctgatcctacaaagttctttcagaggccggatgatgggttcagccaagacgtgtaccagatcggccttctcctggccgtgatctacttcattgtacagtttctgaaggcgaccctgtgaccggctgcagcctgtcgaagaatgtagcctgtgtgcagtatacatgtatgtaactatgcctagcaacattataaaatacgggcatatatcatcctgccatctgacctgcgacagatttgtgacctttcaccactgctgtcggtgatattagtttggcacgcaagttgccaatttacaggtgttaaacttg

SEQ ID NO: 17220 - protein, 273 aa, Zea mays subsp. mays
  peptide (1)..(273): Ceres Seq. ID no. 12417138
IFAPVSGAHSPPRRRLRLAPLHVVDDSKNPPEERSETDKMVDGMDFGELCSDFECISSPYVESTARQVARDILELREDNRAFNCYAVSVKYKDPLRTFVGREKYRRPLWITKALENPVVTVQEMSMQSTSNLTIRWALRGKPKNPLFASVGGDVIVRVESRFVLNQISGQVLEQAESWDLSASSLPAQAYFWLSRRVYSAVESGKDAIEAAKSAASSGLTTKGDQNLEAYPDPSADPTKFFQRPDDGFSQDVYQIGLLLAVIYFIVQFLKATL

SEQ ID NO: 17221 - protein, 234 aa, Zea mays subsp. mays
  peptide (1)..(234): Ceres Seq. ID no. 12417139
MVDGMDFGELCSDFECISSPYVESTARQVARDILELREDNRAFNCYAVSVKYKDPLRTFVGREKYRRPLWITKALENPVVTVQEMSMQSTSNLTIRWALRGKPKNPLFASVGGDVIVRVESRFVLNQISGQVLEQAESWDLSASSLPAQAYFWLSRRVYSAVESGKDAIEAAKSAASSGLTTKGDQNLEAYPDPSADPTKFFQRPDDGFSQDVYQIGLLLAVIYFIVQFLKATL

SEQ ID NO: 17222 - protein, 230 aa, Zea mays subsp. mays
  peptide (1)..(230): Ceres Seq. ID no. 12417140
MDFGELCSDFECISSPYVESTARQVARDILELREDNRAFNCYAVSVKYKDPLRTFVGREKYRRPLWITKALENPVVTVQEMSMQSTSNLTIRWALRGKPKNPLFASVGGDVIVRVESRFVLNQISGQVLEQAESWDLSASSLPAQAYFWLSRRVYSAVESGKDAIEAAKSAASSGLTTKGDQNLEAYPDPSADPTKFFQRPDDGFSQDVYQIGLLLAVIYFIVQFLKATL

SEQ ID NO: 17223 - DNA, 1919 bp, Zea mays subsp. mays; identical to SEQ ID NO: 4314
  misc_feature (1)..(1919): Ceres Seq. ID no. 12406508
  misc_feature (1)..(1919): Ortholog of  Ceres SEQ ID NO 14311203 as cited in SEQ ID NO 53639
  misc_feature (1)..(1919): Ortholog of  Ceres SEQ ID NO 15176053 as cited in SEQ ID NO 57792
  misc_feature (1)..(1919): Ortholog of  Ceres SEQ ID NO 14311175 as cited in SEQ ID NO 60223
  misc_feature (1)..(1919): Ortholog of  Ceres SEQ ID NO 15224727 as cited in SEQ ID NO 64990
  misc_feature (1)..(1919): Ortholog of  Ceres SEQ ID NO 14308023 as cited in SEQ ID NO 65865
  misc_feature (1)..(1919): Ortholog of  Ceres SEQ ID NO 14307972 as cited in SEQ ID NO 66436
  misc_feature (1)..(1919): Ortholog of  Ceres SEQ ID NO 15170175 as cited in SEQ ID NO 67138
  misc_feature (1)..(1919): Ortholog of  Ceres SEQ ID NO 12614670 as cited in SEQ ID NO 68565

SEQ ID NO: 17224 - protein, 460 aa, Zea mays subsp. mays; identical to SEQ ID NO: 4315
  peptide (1)..(460): Ceres Seq. ID no. 12406509

SEQ ID NO: 17225 - protein, 371 aa, Zea mays subsp. mays; identical to SEQ ID NO: 4316
  peptide (1)..(371): Ceres Seq. ID no. 12406510

SEQ ID NO: 17226 - protein, 319 aa, Zea mays subsp. mays; identical to SEQ ID NO: 4317
  peptide (1)..(319): Ceres Seq. ID no. 12406511

SEQ ID NO: 17227 - DNA, 477 bp, Zea mays subsp. mays
  misc_feature (1)..(477): Ceres Seq. ID no. 1671513
  misc_feature (1)..(477): Ortholog of  Ceres SEQ ID NO 15177854 as cited in SEQ ID NO 51851
  misc_feature (1)..(477): Ortholog of  Ceres SEQ ID NO 15177087 as cited in SEQ ID NO 51932
  misc_feature (1)..(477): Ortholog of  Ceres SEQ ID NO 13662937 as cited in SEQ ID NO 64415
  misc_feature (1)..(477): Ortholog of  Ceres SEQ ID NO 13595984 as cited in SEQ ID NO 68340
  misc_feature (1)..(477): Ortholog of  Ceres SEQ ID NO 12635014 as cited in SEQ ID NO 0
agagcagaagcaaagcgagcaacagagcaaagctaagcacagagctagcaagtgaccgaccgagagcaaacaggcaaggcaagatggtgcaacagcaagccgcgaaggaggtgatcccgctgctgacgccttacaagatggggcagttcgagctctctcaccgggtggtgctggcgccgctgacgaggtgccgctcctacggcaacgtgccgcagccacacgccgccgtgtactactcgcagcgcgccaccaggggtggcctgctcatcgcggaggccacgggggtgtcggccaccgcgcaggggttcccggagtctcctggcatctggacgcaggagcaggtcgaggcgtggaagcccatcgtcgacgccgtccaccgcaagggcgccatcttcgtctgccagatctggcatgtgggcagggtctccaccaacgagctccagcccaacggcgacgcgccctatctcgagcacggac

SEQ ID NO: 17228 - protein, 158 aa, Zea mays subsp. mays
  peptide (1)..(158): Ceres Seq. ID no. 1671514
SRSKASNRAKLSTELASDRPRANRQGKMVQQQAAKEVIPLLTPYKMGQFELSHRVVLAPLTRCRSYGNVPQPHAAVYYSQRATRGGLLIAEATGVSATAQGFPESPGIWTQEQVEAWKPIVDAVHRKGAIFVCQIWHVGRVSTNELQPNGDAPYLEHG

SEQ ID NO: 17229 - protein, 131 aa, Zea mays subsp. mays
  peptide (1)..(131): Ceres Seq. ID no. 1671515
MVQQQAAKEVIPLLTPYKMGQFELSHRVVLAPLTRCRSYGNVPQPHAAVYYSQRATRGGLLIAEATGVSATAQGFPESPGIWTQEQVEAWKPIVDAVHRKGAIFVCQIWHVGRVSTNELQPNGDAPYLEHG

SEQ ID NO: 17230 - protein, 113 aa, Zea mays subsp. mays
  peptide (1)..(113): Ceres Seq. ID no. 1671516
MGQFELSHRVVLAPLTRCRSYGNVPQPHAAVYYSQRATRGGLLIAEATGVSATAQGFPESPGIWTQEQVEAWKPIVDAVHRKGAIFVCQIWHVGRVSTNELQPNGDAPYLEHG

SEQ ID NO: 17231 - DNA, 830 bp, Zea mays subsp. mays
  misc_feature (1)..(830): Ceres Seq. ID no. 12417611
  misc_feature (1)..(830): Ortholog of  Ceres SEQ ID NO 14313014 as cited in SEQ ID NO 54841
  misc_feature (1)..(830): Ortholog of  Ceres SEQ ID NO 14316091 as cited in SEQ ID NO 57622
  misc_feature (1)..(830): Ortholog of  Ceres SEQ ID NO 13639317 as cited in SEQ ID NO 59781
  misc_feature (1)..(830): Ortholog of  Ceres SEQ ID NO 13654578 as cited in SEQ ID NO 68583
accgatcccattccccaggcccaagcgcccatggatcccaagcccgacgccagcgcgcccgccgcggtgccagcggagcacgcggcgtacccgaggctgtcaccggaggacatcgccccgccgccgccgcctgtcgtgccgccgtccggcgccaacccctacgtgctctccgccccgtcgcctaacccgcccgccaagagcgctagggagaatctgagggagatgttcggcatggtggggaagaagttcaacgaggccgcgcgcaagaccgagggcatcgccggcgacgtctggcagcatctgaaaactggacccagcatcactgatactgccatggggaggattgctcagatatccaaggttatatctgagggtgtctacgacaagatatttcagcagacttttgagtgctcgcctgatgagaagctcaacaaggcatatgtgtgctacctatcaacgtcgcatggaccaatcatgggcgtcctgtatctctcgactgtcaagattgcattcggtagcgacagccctgtgaaatatgtgactgaggacaacaaaactgagtcatccttttataaggttgttttaccccttcatcacctgagatcagttactcccacagcaagtcagcaaaaccctgcagagaggtacattcaggtcgtttcagtcgacaaccacgagttctggttcatgggtttcgtgaactatgatagcgctgtaaagaatcttcaggagtctgttcgagttgttcacggggcctagaggttgcccatcacttttcctctatgtggatgtagtatgcccgtgtaaatgtatttgtgcatggcacctgt

SEQ ID NO: 17232 - protein, 252 aa, Zea mays subsp. mays
  peptide (1)..(252): Ceres Seq. ID no. 12417612
TDPIPQAQAPMDPKPDASAPAAVPAEHAAYPRLSPEDIAPPPPPVVPPSGANPYVLSAPSPNPPAKSARENLREMFGMVGKKFNEAARKTEGIAGDVWQHLKTGPSITDTAMGRIAQISKVISEGVYDKIFQQTFECSPDEKLNKAYVCYLSTSHGPIMGVLYLSTVKIAFGSDSPVKYVTEDNKTESSFYKVVLPLHHLRSVTPTASQQNPAERYIQVVSVDNHEFWFMGFVNYDSAVKNLQESVRVVHGA

SEQ ID NO: 17233 - protein, 242 aa, Zea mays subsp. mays
  peptide (1)..(242): Ceres Seq. ID no. 12417613
MDPKPDASAPAAVPAEHAAYPRLSPEDIAPPPPPVVPPSGANPYVLSAPSPNPPAKSARENLREMFGMVGKKFNEAARKTEGIAGDVWQHLKTGPSITDTAMGRIAQISKVISEGVYDKIFQQTFECSPDEKLNKAYVCYLSTSHGPIMGVLYLSTVKIAFGSDSPVKYVTEDNKTESSFYKVVLPLHHLRSVTPTASQQNPAERYIQVVSVDNHEFWFMGFVNYDSAVKNLQESVRVVHGA

SEQ ID NO: 17234 - protein, 178 aa, Zea mays subsp. mays
  peptide (1)..(178): Ceres Seq. ID no. 12417614
MFGMVGKKFNEAARKTEGIAGDVWQHLKTGPSITDTAMGRIAQISKVISEGVYDKIFQQTFECSPDEKLNKAYVCYLSTSHGPIMGVLYLSTVKIAFGSDSPVKYVTEDNKTESSFYKVVLPLHHLRSVTPTASQQNPAERYIQVVSVDNHEFWFMGFVNYDSAVKNLQESVRVVHGA

SEQ ID NO: 17235 - DNA, 2036 bp, Zea mays subsp. mays
  misc_feature (1)..(2036): Ceres Seq. ID no. 12368221
  misc_feature (1)..(2036): Ortholog of  Ceres SEQ ID NO 15171212 as cited in SEQ ID NO 56899
  misc_feature (1)..(2036): Ortholog of  Ceres SEQ ID NO 12613725 as cited in SEQ ID NO 68196
  misc_feature (1)..(2036): Ortholog of  Ceres SEQ ID NO 14301486 as cited in SEQ ID NO 69222
gcacgagaccattacctagaacatcctaatcgaaaaaattatgatccttcttttcgtttgttcttatgccattgtttggccacaagcggtggggtatcgatctgaaatagttggacggcatccctgattccaccctgatcgatcccatggatgcccaagacgacgatgagaggccgctgatcatccatcgcctgccactactccaggatgaaagtacttccggattcactagcgacgggacggttgatcttcgcaatcagcctgcccggaagcagagaactgggaactggagagcatgcttcttcatcttaggtgccgagttcgctgaatgtgtggccttcttcgcgatctcaaagaacctggtgacgtacctcacgggcgttctgcacgagagcaacgttgacgccgcgacgactgtgtccacctggatcgggacctcgttcttcacggccgctcgtcggcgcgttcttggccgacacattctgggggcgatactggacgatactggccttcctctccgtgtacgtcacggggatgacggtcctgactgcttcagctcttctcccgctgctcatgggcgcgtcctacagccgtagcgcccaccgcctctccgcgtacctgggcctctacctcgccgctctcggcaccggcggaatcaagccgtgcgtctgcgcgctcggtgccgaccagttcgacgcgtctgaccccgtggagcggcgggccaagggctccttcttcaactggtactacttctccatcaacatcggctccctgctgtccgcgacggtggtcgtctgggtgcaggacaacgttgggtggggagtcgggttcgcgatcccgaccctgctcatgctgtcgggactcgtgctgttcgtcgccggtaggaaggtttacaggtaccagagagtgggagggagccctctgacaagagcctcgcaggtggtggttgctgctgtcaggaactaccgtttggtgctgcctgagcctgacgacagctcggcggccctgctgcatcaggcgcctcccggaaccacggaaggaaattattccacgatgcagcatacgagtcaattcaggttccttgacaaggctgccattgtagcggcatcctccggcgagaaaggagcgacggcaagcccatggcggctctgcacggtctcccaggtcgaggagctgaagacggtgctgcggatgttccccgtgtgggtgtcgatggtgctcttcttcgcggccaccgcgcagatgtcgtccaccttcatcgagcaaggcgagaccatagacaaccgcgtggggccgttcaccgtgccgccggcgtccctctccaccttcgacgtcatcagcgtcatggtctgcatacccatctacgacaaagcgctggtgccgctggcccggcgcgccacgggcaaggaacggggcctgtcgcagctgcagcggctgggcgtcggcctcgcgctgtccgtggccggcatggtgtacgcggcgctgctcgaggccaggcggctgtcgctcgcccgcgcagcggcgggcgggcggccgccgatgtccatcatgtggcaggcgccggcgttcgcggtgctcggcgcgggggaggtgttcgcgaccatcggcatcctcgagttcttctacgaccagtcgcccgacggcatgaagagcctcggcacggcccttgcgcagctcgccgtcgcggcaggcaactacttcaactctgccgtgctcgccgccgtcgccgccgtcaccacgcgcaacggggaggcaggatggatccccgacgacctggacaagggccacctcgactatttcttctggttcatggctgttctcggcgtggtgaacctgctgcacttcctgcattgctccgtcaggtacagaggcagcagcaacaacagcacatactcttcttgagtcttcacacgatctgtgccaagtatatgacaaaatgtcaacaaagagagatgtgcatcgaatttgttcacgaggcacagcaggatgcccgcattctccatttggcgtctccacaataataatgtgtccctgtg

SEQ ID NO: 17236 - protein, 455 aa, Zea mays subsp. mays
  peptide (1)..(455): Ceres Seq. ID no. 12368222
MTVLTASALLPLLMGASYSRSAHRLSAYLGLYLAALGTGGIKPCVCALGADQFDASDPVERRAKGSFFNWYYFSINIGSLLSATVVVWVQDNVGWGVGFAIPTLLMLSGLVLFVAGRKVYRYQRVGGSPLTRASQVVVAAVRNYRLVLPEPDDSSAALLHQAPPGTTEGNYSTMQHTSQFRFLDKAAIVAASSGEKGATASPWRLCTVSQVEELKTVLRMFPVWVSMVLFFAATAQMSSTFIEQGETIDNRVGPFTVPPASLSTFDVISVMVCIPIYDKALVPLARRATGKERGLSQLQRLGVGLALSVAGMVYAALLEARRLSLARAAAGGRPPMSIMWQAPAFAVLGAGEVFATIGILEFFYDQSPDGMKSLGTALAQLAVAAGNYFNSAVLAAVAAVTTRNGEAGWIPDDLDKGHLDYFFWFMAVLGVVNLLHFLHCSVRYRGSSNNSTYSS

SEQ ID NO: 17237 - protein, 442 aa, Zea mays subsp. mays
  peptide (1)..(442): Ceres Seq. ID no. 12368223
MGASYSRSAHRLSAYLGLYLAALGTGGIKPCVCALGADQFDASDPVERRAKGSFFNWYYFSINIGSLLSATVVVWVQDNVGWGVGFAIPTLLMLSGLVLFVAGRKVYRYQRVGGSPLTRASQVVVAAVRNYRLVLPEPDDSSAALLHQAPPGTTEGNYSTMQHTSQFRFLDKAAIVAASSGEKGATASPWRLCTVSQVEELKTVLRMFPVWVSMVLFFAATAQMSSTFIEQGETIDNRVGPFTVPPASLSTFDVISVMVCIPIYDKALVPLARRATGKERGLSQLQRLGVGLALSVAGMVYAALLEARRLSLARAAAGGRPPMSIMWQAPAFAVLGAGEVFATIGILEFFYDQSPDGMKSLGTALAQLAVAAGNYFNSAVLAAVAAVTTRNGEAGWIPDDLDKGHLDYFFWFMAVLGVVNLLHFLHCSVRYRGSSNNSTYSS

SEQ ID NO: 17238 - protein, 350 aa, Zea mays subsp. mays
  peptide (1)..(350): Ceres Seq. ID no. 12368224
MLSGLVLFVAGRKVYRYQRVGGSPLTRASQVVVAAVRNYRLVLPEPDDSSAALLHQAPPGTTEGNYSTMQHTSQFRFLDKAAIVAASSGEKGATASPWRLCTVSQVEELKTVLRMFPVWVSMVLFFAATAQMSSTFIEQGETIDNRVGPFTVPPASLSTFDVISVMVCIPIYDKALVPLARRATGKERGLSQLQRLGVGLALSVAGMVYAALLEARRLSLARAAAGGRPPMSIMWQAPAFAVLGAGEVFATIGILEFFYDQSPDGMKSLGTALAQLAVAAGNYFNSAVLAAVAAVTTRNGEAGWIPDDLDKGHLDYFFWFMAVLGVVNLLHFLHCSVRYRGSSNNSTYSS

SEQ ID NO: 17239 - DNA, 1095 bp, Zea mays subsp. mays
  misc_feature (1)..(1095): Ceres Seq. ID no. 12350695
  misc_feature (1)..(1095): Ortholog of  Ceres SEQ ID NO 13581579 as cited in SEQ ID NO 58361
  misc_feature (1)..(1095): Ortholog of  Ceres SEQ ID NO 13596969 as cited in SEQ ID NO 63375
  misc_feature (1)..(1095): Ortholog of  Ceres SEQ ID NO 14302240 as cited in SEQ ID NO 64162
  misc_feature (1)..(1095): Ortholog of  Ceres SEQ ID NO 13597519 as cited in SEQ ID NO 64759
  misc_feature (1)..(1095): Ortholog of  Ceres SEQ ID NO 13597870 as cited in SEQ ID NO 64982
  misc_feature (1)..(1095): Ortholog of  Ceres SEQ ID NO 13656123 as cited in SEQ ID NO 65212
  misc_feature (1)..(1095): Ortholog of  Ceres SEQ ID NO 13595926 as cited in SEQ ID NO 67778
  misc_feature (1)..(1095): Ortholog of  Ceres SEQ ID NO 12567001 as cited in SEQ ID NO 0
agatgcgctctgcatcttctcccctctggaacacactcccacacagaactagagctccaaggccatggagaaatggagaagacgcaggcacttgctgcttgctgttgcagccgtggccctggtggcagcaataacgctgccgtccgcggaggcgaagctgtccccggactactaccggtcgacgtgcccggacgtggaggcaatcgtgcaggcagtggtggccaagaaggtgaatgagaccttcgtcacagtcccggccacgctcaggctcttcttccacgactgcttcgtcgagggctgtgatgcgtcggtcatcatcgcgtcccgcgacaacgacgccgagaaggacgcgcccgacaacgtgtccctcgctggcgacggcttcgacaccgtggtgcgcgccaaggccgaggtcgagaagaagtgccccggcgtggtctcctgcgccgatatcctcgccatcgccgccagggacgtcgtcaccatgtcgtccggcccccactggaccgtccagcttggccggcttgacgggctcgtctccaaggccggcaacgtcgcgggcaagttgccgggacccaacatgcgcgtcaaggacctcgccgccctgttcgccaagcacaacctcaccacgctcgacatggtcgcgctctcgggagcgcacaccgtcgggttcgcgcactgcacccgcttcgcggaccgcctctaccaccacggcgtcggcgacagcgatggcgcgtcggtggacccgtcgtacaaccctgcgtacgcgcggcagctaatggacgcctgcccgcctggcgtcggcgcagacatcgccgtcaatatggacccaatcacaccgaccgccttcgataacgcctactacgccaacctcgccggcggcctgggattgttcatctcggaccaggcgctgtacagcgacggcgcgtcgcaaccggcggtgagggacttcgctaagaaccagacccgcttcttcgaggcgttcaaggacgccatggtcaagctgggcagtgttggggtgaagaccggccggcacggggagatcaggagtgactgcaccgcattcaactagtagatcgaccacccattcttttg

SEQ ID NO: 17240 - protein, 335 aa, Zea mays subsp. mays
  peptide (1)..(335): Ceres Seq. ID no. 12350696
MEKWRRRRHLLLAVAAVALVAAITLPSAEAKLSPDYYRSTCPDVEAIVQAVVAKKVNETFVTVPATLRLFFHDCFVEGCDASVIIASRDNDAEKDAPDNVSLAGDGFDTVVRAKAEVEKKCPGVVSCADILAIAARDVVTMSSGPHWTVQLGRLDGLVSKAGNVAGKLPGPNMRVKDLAALFAKHNLTTLDMVALSGAHTVGFAHCTRFADRLYHHGVGDSDGASVDPSYNPAYARQLMDACPPGVGADIAVNMDPITPTAFDNAYYANLAGGLGLFISDQALYSDGASQPAVRDFAKNQTRFFEAFKDAMVKLGSVGVKTGRHGEIRSDCTAFN

SEQ ID NO: 17241 - protein, 195 aa, Zea mays subsp. mays
  peptide (1)..(195): Ceres Seq. ID no. 12350697
MSSGPHWTVQLGRLDGLVSKAGNVAGKLPGPNMRVKDLAALFAKHNLTTLDMVALSGAHTVGFAHCTRFADRLYHHGVGDSDGASVDPSYNPAYARQLMDACPPGVGADIAVNMDPITPTAFDNAYYANLAGGLGLFISDQALYSDGASQPAVRDFAKNQTRFFEAFKDAMVKLGSVGVKTGRHGEIRSDCTAFN

SEQ ID NO: 17242 - protein, 181 aa, Zea mays subsp. mays
  peptide (1)..(181): Ceres Seq. ID no. 12350698
MRPSSQSRPRSGSSSTTASSRAVMRRSSSRPATTTPRRTRPTTCPSLATASTPWCAPRPRSRRSAPAWSPAPISSPSPPGTSSPCRPAPTGPSSLAGLTGSSPRPATSRASCRDPTCASRTSPPCSPSTTSPRSTWSRSRERTPSGSRTAPASRTASTTTASATAMARRWTRRTTLRTRGS

SEQ ID NO: 17243 - DNA, 1132 bp, Zea mays subsp. mays
  misc_feature (1)..(1132): Ceres Seq. ID no. 12375190
  misc_feature (1)..(1132): Ortholog of  Ceres SEQ ID NO 14315455 as cited in SEQ ID NO 56988
gcacgagaccattacctagaacatcctaatcgaaaaacactttcctttccgcggcccctctgctcaccgcactccgttgcctgatggcgtcgccggcggcggggacgccgcccttcctgacgaaaacttacgccatggtggaggactcggccacggacgacacgatctcgtggaacgacaccggcacggccttcgtggtgtggcgccccgctgagttcgcccgtgaccttcttcccaagcacttcaagcacagcaacttctcctcgttcgtccgccagctcaacacctacggattcaagaaggtagtcggggacagatgggagtttgccaacgacggcttccggagaggcgagaagcaccttctcgccggaatacagaggcggaaggggaccggcgccgtggcggcggtaccggtgccgggcataccggcggggataccgttaccgctctcgtccccgcccacgagctctggcggggagccggcggtctcctcgtcgccgccgcgtggctcgacagctggagttagcggcgcggtggccgagctggaggaggagaacgcgcggctgcgacgcgagaatgcgaggctggcgcgggagctggcccgcgcgcggcgcctctgcgacggcgtgcgccagctcatggcgcggtacgacgacgaccaaggcagaggcggagatgaggatccggcggacggcgacgaggggcatggcggcagtggggaaggccccagcggcccagaggtgaagccaatgctgttcggcgtcccaatcggggccaagcggctacgcggtgcgcgtggtgatggagacgatgtagatgacggcgaggacaacgacgaggaaccagatgaagacgacgagaggcaaacggtgcggaagcagggggttaaagcggccaggaggaacgaggcgtcggatctggacgtgctgacgctgtccgtgcgggcggccgcggcggcgaggacgggcggaggatcacgtgaccgcaaaagccccattaccgcccaccccgataggagcctcagcctagggctgaaatgactgacactcgtgtagagtactgtagtatcgattgtagtattgtattgagtgatgctgcacgcttgaattgaatcatctagaaatcaaaattt

SEQ ID NO: 17244 - protein, 318 aa, Zea mays subsp. mays
  peptide (1)..(318): Ceres Seq. ID no. 12375191
MASPAAGTPPFLTKTYAMVEDSATDDTISWNDTGTAFVVWRPAEFARDLLPKHFKHSNFSSFVRQLNTYGFKKVVGDRWEFANDGFRRGEKHLLAGIQRRKGTGAVAAVPVPGIPAGIPLPLSSPPTSSGGEPAVSSSPPRGSTAGVSGAVAELEEENARLRRENARLARELARARRLCDGVRQLMARYDDDQGRGGDEDPADGDEGHGGSGEGPSGPEVKPMLFGVPIGAKRLRGARGDGDDVDDGEDNDEEPDEDDERQTVRKQGVKAARRNEASDLDVLTLSVRAAAAARTGGGSRDRKSPITAHPDRSLSLGLK

SEQ ID NO: 17245 - protein, 301 aa, Zea mays subsp. mays
  peptide (1)..(301): Ceres Seq. ID no. 12375192
MVEDSATDDTISWNDTGTAFVVWRPAEFARDLLPKHFKHSNFSSFVRQLNTYGFKKVVGDRWEFANDGFRRGEKHLLAGIQRRKGTGAVAAVPVPGIPAGIPLPLSSPPTSSGGEPAVSSSPPRGSTAGVSGAVAELEEENARLRRENARLARELARARRLCDGVRQLMARYDDDQGRGGDEDPADGDEGHGGSGEGPSGPEVKPMLFGVPIGAKRLRGARGDGDDVDDGEDNDEEPDEDDERQTVRKQGVKAARRNEASDLDVLTLSVRAAAAARTGGGSRDRKSPITAHPDRSLSLGLK

SEQ ID NO: 17246 - DNA, 501 bp, Zea mays subsp. mays
  misc_feature (1)..(501): Ceres Seq. ID no. 4612568
  misc_feature (1)..(501): Ortholog of  Ceres SEQ ID NO 14308493 as cited in SEQ ID NO 60320
accatcggcttccgcatctccccgcctccacccacggcactcgcaagcagcgctcattagtcactagggttttaaactttccccccgatccgcctcgccgccggcgtcgtcctccgccggaaatccaccaccctacacccagccggagacgactatggtgggtttcggctcgatggcgggctacgggatccagtcgatgctcaaggaaggccaccgccacctctccgggctcgaggaggccgttctcaagaacatcgacgcctgccgcgagctgtccgccattacgcgcacctctctcggcccgaacggaatgaacaaaatggttatcaatcacttggacaagctgtttgtcacaaacgatgctgccaccattgtgaatgagctcgaagttcagcaccctgccgctaagattctggtactggctggtagggctcaacaggaggagattggggatggggccaatctcaccatatcgtttgccggtgaactgcttgagaaggc

SEQ ID NO: 17247 - protein, 115 aa, Zea mays subsp. mays
  peptide (1)..(115): Ceres Seq. ID no. 4612569
MVGFGSMAGYGIQSMLKEGHRHLSGLEEAVLKNIDACRELSAITRTSLGPNGMNKMVINHLDKLFVTNDAATIVNELEVQHPAAKILVLAGRAQQEEIGDGANLTISFAGELLEK

SEQ ID NO: 17248 - protein, 109 aa, Zea mays subsp. mays
  peptide (1)..(109): Ceres Seq. ID no. 4612570
MAGYGIQSMLKEGHRHLSGLEEAVLKNIDACRELSAITRTSLGPNGMNKMVINHLDKLFVTNDAATIVNELEVQHPAAKILVLAGRAQQEEIGDGANLTISFAGELLEK

SEQ ID NO: 17249 - protein, 103 aa, Zea mays subsp. mays
  peptide (1)..(103): Ceres Seq. ID no. 4612571
HRLPHLPASTHGTRKQRSLVTRVLNFPPDPPRRRRRPPPEIHHPTPSRRRLWWVSARWRATGSSRCSRKATATSPGSRRPFSRTSTPAASCPPLRAPLSARTE

SEQ ID NO: 17250 - DNA, 2025 bp, Zea mays subsp. mays
  misc_feature (1)..(2025): Ceres Seq. ID no. 12417568
  misc_feature (1)..(2025): Ortholog of  Ceres SEQ ID NO 15174599 as cited in SEQ ID NO 53646
  misc_feature (1)..(2025): Ortholog of  Ceres SEQ ID NO 15174646 as cited in SEQ ID NO 54499
acgccatacaattctcacacgcgcgcgcccaacacactagcctgcaggatcgtcgagcgcgaggcggctgccccgccggccggttcgttcgctctatagcttgagaccgatcctagggccaagacgatatcggcggcgatgatgatggacgcggcgaggatcgtagagtacttcaagggcaagtgcatcctcgtcaccggctcaacagggtttcttggaaagatccttgtggagaagatactgcgggtgcagcctgacgtgcgcaagatttacctgcttgtacgcgcggtcgacgagccatcagcgaagcagcgcgtccaacaagaggtgatagacacggagctgttcggcctgctgagagagaaacacggcaagggcttccagcagttcgtagaggccaaggtcgtcgctttggccggagacatcgtatacgacggcctggggctggaggcagccgtgctggacgcgctggccaaggacgtcgacgtcatcgtcaacatcgcagcaaccaccaacttctacgaaagatacgatgtttcgctggacgtgaacgtgctgggagtgaagcacctgtgcatgttcgccaagcagtgcgcgaggctcaggatgctcatgcacgtctccactgccttcgtctcgggcttcagggagggcctcatcctggagaagcccatcaagcccggcgagtcgctgcgggagggcacgtacctggacgtggacgcggagctgcgcctcgtcaaggaggtgaagaagtcgctggcggcgaacggcgatggcgacggcgacagcacggagcggaaggccatgaaggatctgggcctccggcgggcgcggcacttcgggtggtccaacacgtacgtgttcaccaaggccatgggggaggccgtgctgggccagcagctccggggcggcgacgtccccgtggcggtgatgcggcccagcatcatcaccagcgtccggcgcgacccgctgcccgggtggatgcagggcacccgcaccatcgacagcatcatcatcggctacgccaagcagaacctgtcctgcttcctcgccgacctccgcctcgtcatggacgtcatccccggggacatggtggtcaacgccatgatggcggccgtggtggcgcactcggaggcgttcgcgccgccgctgccgcaggtggtggtgtaccacgccacctcgtcgctgcgcaacccggccacctacgacgtgctctaccagtccggacgccgccatttctacgagaacccgcgcgtcggcaaggacggcagggtcatccccaccagggagatgtacttcttcaccagcatcgccaggttccacctctacatgactctcatctacaaggtgccattagagattctgcaccttgtgaatctgctgctctgtggccttctctcgcggctctacaacgacctcaaccgcaagtacaagtttgtgatgcatctggttgacgtctacggcccattcgccttcttcaaaggatgcttcgatgacataaacctggagcggctaaggctggcaatggcgatgaagacccctgaggatcaaatgttcaatttcgaccctaagaccatcgactgggacgattacttcaccagaatccacatccctggtattctcaagtatgtgtgcaagtgaagccttctttcttcagtctatttgcagcatgcacatgcttcttcttcgccttcttactatcgaaagttaatggctcatattctttatgaaagaaatttataccactctgtttggttgtacctgttctatggatcgaccgggtgttaccaagaaacaaaaataattcgatctctgctagattgatatagttctgtatgggagagactgaggcccctcatatcgtaaatcaatagtgatcgtcaaacgagtgtatgctgtgttaggtggcagccaatatgtatcttgattaattgagaacttgtaatctgtgtcatatgtacgcgtgtcactgtcagtgacaatgaaaagcaaatgtaatatctatttataatggcagtgaaattc

SEQ ID NO: 17251 - protein, 500 aa, Zea mays subsp. mays
  peptide (1)..(500): Ceres Seq. ID no. 12417569
MMMDAARIVEYFKGKCILVTGSTGFLGKILVEKILRVQPDVRKIYLLVRAVDEPSAKQRVQQEVIDTELFGLLREKHGKGFQQFVEAKVVALAGDIVYDGLGLEAAVLDALAKDVDVIVNIAATTNFYERYDVSLDVNVLGVKHLCMFAKQCARLRMLMHVSTAFVSGFREGLILEKPIKPGESLREGTYLDVDAELRLVKEVKKSLAANGDGDGDSTERKAMKDLGLRRARHFGWSNTYVFTKAMGEAVLGQQLRGGDVPVAVMRPSIITSVRRDPLPGWMQGTRTIDSIIIGYAKQNLSCFLADLRLVMDVIPGDMVVNAMMAAVVAHSEAFAPPLPQVVVYHATSSLRNPATYDVLYQSGRRHFYENPRVGKDGRVIPTREMYFFTSIARFHLYMTLIYKVPLEILHLVNLLLCGLLSRLYNDLNRKYKFVMHLVDVYGPFAFFKGCFDDINLERLRLAMAMKTPEDQMFNFDPKTIDWDDYFTRIHIPGILKYVCK

SEQ ID NO: 17252 - protein, 499 aa, Zea mays subsp. mays
  peptide (1)..(499): Ceres Seq. ID no. 12417570
MMDAARIVEYFKGKCILVTGSTGFLGKILVEKILRVQPDVRKIYLLVRAVDEPSAKQRVQQEVIDTELFGLLREKHGKGFQQFVEAKVVALAGDIVYDGLGLEAAVLDALAKDVDVIVNIAATTNFYERYDVSLDVNVLGVKHLCMFAKQCARLRMLMHVSTAFVSGFREGLILEKPIKPGESLREGTYLDVDAELRLVKEVKKSLAANGDGDGDSTERKAMKDLGLRRARHFGWSNTYVFTKAMGEAVLGQQLRGGDVPVAVMRPSIITSVRRDPLPGWMQGTRTIDSIIIGYAKQNLSCFLADLRLVMDVIPGDMVVNAMMAAVVAHSEAFAPPLPQVVVYHATSSLRNPATYDVLYQSGRRHFYENPRVGKDGRVIPTREMYFFTSIARFHLYMTLIYKVPLEILHLVNLLLCGLLSRLYNDLNRKYKFVMHLVDVYGPFAFFKGCFDDINLERLRLAMAMKTPEDQMFNFDPKTIDWDDYFTRIHIPGILKYVCK

SEQ ID NO: 17253 - protein, 498 aa, Zea mays subsp. mays
  peptide (1)..(498): Ceres Seq. ID no. 12417571
MDAARIVEYFKGKCILVTGSTGFLGKILVEKILRVQPDVRKIYLLVRAVDEPSAKQRVQQEVIDTELFGLLREKHGKGFQQFVEAKVVALAGDIVYDGLGLEAAVLDALAKDVDVIVNIAATTNFYERYDVSLDVNVLGVKHLCMFAKQCARLRMLMHVSTAFVSGFREGLILEKPIKPGESLREGTYLDVDAELRLVKEVKKSLAANGDGDGDSTERKAMKDLGLRRARHFGWSNTYVFTKAMGEAVLGQQLRGGDVPVAVMRPSIITSVRRDPLPGWMQGTRTIDSIIIGYAKQNLSCFLADLRLVMDVIPGDMVVNAMMAAVVAHSEAFAPPLPQVVVYHATSSLRNPATYDVLYQSGRRHFYENPRVGKDGRVIPTREMYFFTSIARFHLYMTLIYKVPLEILHLVNLLLCGLLSRLYNDLNRKYKFVMHLVDVYGPFAFFKGCFDDINLERLRLAMAMKTPEDQMFNFDPKTIDWDDYFTRIHIPGILKYVCK

SEQ ID NO: 17254 - DNA, 2007 bp, Zea mays subsp. mays
  misc_feature (1)..(2007): Ceres Seq. ID no. 12417447
  misc_feature (1)..(2007): Ortholog of  Ceres SEQ ID NO 13596816 as cited in SEQ ID NO 62287
gcacgagaccattacctagaacatccaatcaaaaaagcatgtctcgcgggtcctgccgtctcgtcgccactactgactactgaggagaggagcatggccctgactaacgtcttcgtcgtcctcctgagtaccgcattggctgtgctccccttctcccctgccgatgccggcgtggtgggcgtgagctacggccgattagggaacgacctgccgggcacggcttcggtggtaaagctgctgaagaagagcggcatcacctcggtgaggctctacgacgccaactcaaaggtgctcaaggccctggccaacaccgggatcacggtgatggtaatgctacccaacgacaagctcgccgcggcggccgcggacccgtcgagcgcgcgacggtgggtgcggaggaacgtggcggcgtactaccccgccacgcacatccacgccgtcgccgtcgggaacgaggtgttcgaggaggccaagaacctgaccgggcagctcgtcccggccatgtccaacgtgcacgacgcgctggtgaagcttggcctggacggggccgtgaaggtctcgacgccgatcgcgttcaccgcgctccaggagtcgtggccgccgtccgcgggcaggttccgggacgacatcgcgcggtcggtgatgaagcccatgatcgatttcctggagcggaccgggtcgtacctcaccgtgaacgcctacccgttcttcgcgtacgccgaggagccagacaagatctccctcgactacgccctggggaactccaacgccaccggcgtgcgcgaccccgtgaccgggctcgtgtaccacagcctcctggacgcccagctcgacgccacgtacttcgcgatggagaagctggggacgtccagatccagtgcgcgggggccaaattccgtggcgccagcagcgcacgtttcggagagcgggtgcgccttccggcggcaaacccaaacgcggcggcaggccgcggccacgcccacgcggcggcgggaggcgtttggagttggagcaggctggaggtgaagcggcttcggtagccaacgcgcaagcgtacaacaactacctgatcaagcgcgtgctgtccggtgacacgggcaccccgtaccaccccgacgccgacatggacgtctacatcttctccctcttcaacgagaaccagaagggcgacggggcggacgacgtcgagcagcacttcgggctgttctacccgaaccggacgaaggtgtacgagttcgacttccggggcggcgcgctggtggccagctggtgcgtggcgaacgcgtccgccggggacgcgcggctgcaggcggcgctggagtacgcgtgcggccacggcgccgactgcggcgccatccagcccggcgcgccgtgcttcgagcccgacaccaggctcgcgcacgcctcgtatgcgttcaacagctactaccagcgcaacggccggggccaaggcggcgtgcgacttcgacggcgccgcctacgtcgtgtatcacgaaccagctggcacctgtgacccgaacgtgagctggtgcgtggcgaatgcggcggccggcgacgcgcggctgctggcagcgctgaactacgcgtgtgccaacggcgcggactgcggcgccatacagcccggcggagcgtgcttcgagcccaacaccgtggtcgcccacgcctcgtacgcgttcaacagctactaccagcggaaggggcggggcagcgggacgtgcgacttcgccggagccggttccgtggtctaccacgcgccaaagattattgggaagtgcgtcctcccgtcgaaagcttggattcaagaaacaacaacagtcaagtctagaggattcaagacaagttcggtttaacctcgtactaggaacgtagaataatgtaaacattggcatctgcacatcaggataactgatgtctttgtgttgctttgcttttcggacactcatgaaccatcgttcctgtttcctgaggcggatctcctgctaggtttggttcccggcttctggcttt

SEQ ID NO: 17255 - protein, 341 aa, Zea mays subsp. mays
  peptide (1)..(341): Ceres Seq. ID no. 12417448
ARDHYLEHPIKKACLAGPAVSSPLLTTEERSMALTNVFVVLLSTALAVLPFSPADAGVVGVSYGRLGNDLPGTASVVKLLKKSGITSVRLYDANSKVLKALANTGITVMVMLPNDKLAAAAADPSSARRWVRRNVAAYYPATHIHAVAVGNEVFEEAKNLTGQLVPAMSNVHDALVKLGLDGAVKVSTPIAFTALQESWPPSAGRFRDDIARSVMKPMIDFLERTGSYLTVNAYPFFAYAEEPDKISLDYALGNSNATGVRDPVTGLVYHSLLDAQLDATYFAMEKLGTSRSSARGPNSVAPAAHVSESGCAFRRQTQTRRQAAATPTRRREAFGVGAGWR

SEQ ID NO: 17256 - protein, 310 aa, Zea mays subsp. mays
  peptide (1)..(310): Ceres Seq. ID no. 12417449
MALTNVFVVLLSTALAVLPFSPADAGVVGVSYGRLGNDLPGTASVVKLLKKSGITSVRLYDANSKVLKALANTGITVMVMLPNDKLAAAAADPSSARRWVRRNVAAYYPATHIHAVAVGNEVFEEAKNLTGQLVPAMSNVHDALVKLGLDGAVKVSTPIAFTALQESWPPSAGRFRDDIARSVMKPMIDFLERTGSYLTVNAYPFFAYAEEPDKISLDYALGNSNATGVRDPVTGLVYHSLLDAQLDATYFAMEKLGTSRSSARGPNSVAPAAHVSESGCAFRRQTQTRRQAAATPTRRREAFGVGAGWR

SEQ ID NO: 17257 - protein, 233 aa, Zea mays subsp. mays
  peptide (1)..(233): Ceres Seq. ID no. 12417450
MVMLPNDKLAAAAADPSSARRWVRRNVAAYYPATHIHAVAVGNEVFEEAKNLTGQLVPAMSNVHDALVKLGLDGAVKVSTPIAFTALQESWPPSAGRFRDDIARSVMKPMIDFLERTGSYLTVNAYPFFAYAEEPDKISLDYALGNSNATGVRDPVTGLVYHSLLDAQLDATYFAMEKLGTSRSSARGPNSVAPAAHVSESGCAFRRQTQTRRQAAATPTRRREAFGVGAGWR

SEQ ID NO: 17258 - DNA, 2041 bp, Zea mays subsp. mays
  misc_feature (1)..(2041): Ceres Seq. ID no. 12362393
  misc_feature (1)..(2041): Ortholog of  Ceres SEQ ID NO 15180702 as cited in SEQ ID NO 0
gcacgagaccattacctagaacatcctaatcaaaaagctgtctaccctcaccaactcctacctcccgagacaaattccgaggtcgacacaagaaaagggaaagaaccacaggtaattgccttcctgtgtcgggattgtagctccaatccactccgcgccggccgggtgcgctgccatccggatcagacgccctcgcatctctcgcccttccggcatcgtatcccctgggcggcagcggagtaaagatccgacccgcttgggattgtttgcttctcctttttgcggtgcgccgctggactccagtgctgcacatgctcgacgacggtgctgagctcctgcaatggcccgaagaaatgccggcgcaatgcagcgggagggttcggcggggtcggttaaggactggtcggaattcgacccttcgccgtctcccaagctggcgtactcgcagtcctacgtcgccatgagagggctgttgacgtcggtggcttctctggaccctgtcctgacgtcgagcagcctcaagtctctgtgggcagccttgtcatcgcacaggcacgctcggtccttggagaggccaaagtacaaggggatgaactggaagaggcccatgttccacctgcttgtgtgcttcttagtgggagttttcattggattcacaccactcttctctctcgatttatccagtaacatagattctgaaaacgagacgcttccgtttgacggggatgtggttaacagacagatgctggaacttaaaagtacaaggttggagccgattgtggctgcggcagagactgaagccgcccaagaacaacaggttgatgagagtcctccagttcctgcgatgctggatgatgaggcggacttcattgaagcgtcacatgtccaaccttctgttaatgattctgacattggtgcaaagaagcagctgataattgtgacaacaacttctgttcgaccacatcaggcttattacttgaaccgcctggctcatgttttaaaaaatgtaccacctcctcttctgtggattgtggcggaatggccgtatcagtcccgtgaaacagcggagatcctgaggtcttctggggttatgtacagacatcttatctgcaatcggaacagtacaaatataaggaagattattgtctgccaaaagaacaatgcaatttttcatatcaagaagcaccgtttagatggtatagtacattttgctgatgaggagcgagtgtactcagttgatttatttgaagacatgcgaaaaatcaggcgctttggtacgtggccagtagcgacacatgttggagccaggtacaaggtggttttggaagggcctgtctgtaggggtaatcaagtcactggatggcatacaaacaagagagggggtgtacctcgtcggtttccaattggtttctctggttttgcttttaacagcactatactttgggatccccagaggtggaacagccccactttagagtctattatactccattcaggtggcagaggtggcttgcaggagtcaagattcatcgagaagcttgtcgaggacgagactcagatggaaggcctcgcagacaactgcactcgggttatggtctggaatttggacttggaacctccacagctgaattaccctactagctggcagctgcagaagaacctagacatcgtcgtgccaataacataaaccgcgatgctgctgctgccctttttgttcgcgcctcctagtgagtgtggtggaatgatgacgacaatgcccatgccttcctgaacttggtagcgtccaggatcacgcgaagctgctctgccaagacctggttcgaataatgtggtactagtaacaacagttggaaagcgaagaagcctgcctgacaaaaggaaaaattctttctccccccgttgcgctgcattaccaatgatcctcaacatagataggcttgtatatttcttttccttccatttttcgattattcctgttcgttacatataccatgcatacatacatacatacataaatacatatacaccttcattcattcat

SEQ ID NO: 17259 - protein, 448 aa, Zea mays subsp. mays
  peptide (1)..(448): Ceres Seq. ID no. 12362394
MARRNAGAMQREGSAGSVKDWSEFDPSPSPKLAYSQSYVAMRGLLTSVASLDPVLTSSSLKSLWAALSSHRHARSLERPKYKGMNWKRPMFHLLVCFLVGVFIGFTPLFSLDLSSNIDSENETLPFDGDVVNRQMLELKSTRLEPIVAAAETEAAQEQQVDESPPVPAMLDDEADFIEASHVQPSVNDSDIGAKKQLIIVTTTSVRPHQAYYLNRLAHVLKNVPPPLLWIVAEWPYQSRETAEILRSSGVMYRHLICNRNSTNIRKIIVCQKNNAIFHIKKHRLDGIVHFADEERVYSVDLFEDMRKIRRFGTWPVATHVGARYKVVLEGPVCRGNQVTGWHTNKRGGVPRRFPIGFSGFAFNSTILWDPQRWNSPTLESIILHSGGRGGLQESRFIEKLVEDETQMEGLADNCTRVMVWNLDLEPPQLNYPTSWQLQKNLDIVVPIT

SEQ ID NO: 17260 - protein, 440 aa, Zea mays subsp. mays
  peptide (1)..(440): Ceres Seq. ID no. 12362395
MQREGSAGSVKDWSEFDPSPSPKLAYSQSYVAMRGLLTSVASLDPVLTSSSLKSLWAALSSHRHARSLERPKYKGMNWKRPMFHLLVCFLVGVFIGFTPLFSLDLSSNIDSENETLPFDGDVVNRQMLELKSTRLEPIVAAAETEAAQEQQVDESPPVPAMLDDEADFIEASHVQPSVNDSDIGAKKQLIIVTTTSVRPHQAYYLNRLAHVLKNVPPPLLWIVAEWPYQSRETAEILRSSGVMYRHLICNRNSTNIRKIIVCQKNNAIFHIKKHRLDGIVHFADEERVYSVDLFEDMRKIRRFGTWPVATHVGARYKVVLEGPVCRGNQVTGWHTNKRGGVPRRFPIGFSGFAFNSTILWDPQRWNSPTLESIILHSGGRGGLQESRFIEKLVEDETQMEGLADNCTRVMVWNLDLEPPQLNYPTSWQLQKNLDIVVPIT

SEQ ID NO: 17261 - protein, 408 aa, Zea mays subsp. mays
  peptide (1)..(408): Ceres Seq. ID no. 12362396
MRGLLTSVASLDPVLTSSSLKSLWAALSSHRHARSLERPKYKGMNWKRPMFHLLVCFLVGVFIGFTPLFSLDLSSNIDSENETLPFDGDVVNRQMLELKSTRLEPIVAAAETEAAQEQQVDESPPVPAMLDDEADFIEASHVQPSVNDSDIGAKKQLIIVTTTSVRPHQAYYLNRLAHVLKNVPPPLLWIVAEWPYQSRETAEILRSSGVMYRHLICNRNSTNIRKIIVCQKNNAIFHIKKHRLDGIVHFADEERVYSVDLFEDMRKIRRFGTWPVATHVGARYKVVLEGPVCRGNQVTGWHTNKRGGVPRRFPIGFSGFAFNSTILWDPQRWNSPTLESIILHSGGRGGLQESRFIEKLVEDETQMEGLADNCTRVMVWNLDLEPPQLNYPTSWQLQKNLDIVVPIT

SEQ ID NO: 17262 - DNA, 472 bp, Zea mays subsp. mays
  misc_feature (1)..(472): Ceres Seq. ID no. 1671642
  misc_feature (1)..(472): Ortholog of  Ceres SEQ ID NO 14311535 as cited in SEQ ID NO 51559
  misc_feature (1)..(472): Ortholog of  Ceres SEQ ID NO 15176200 as cited in SEQ ID NO 55188
aacttaaccactactccgcatctactgacgccgccgcgcaaggggcccgggtacgccacgccgctggaggccatggagaagggccccagggagaagctcgtctacgtcacctgcgtctacaacggcactggaattaacaagccggattaccttgcgacggtggatttggatcccagctctcctacatactcccaggtgatccacaggctcccggtcacccacatcggcgacgagctgcatcactctggctggaactcctgcagctcctgcyacggtgacccatcggccaagcgccgcttcctgatcctgccttccttgctgtcaggccgtgtgtatgtcgtcgacacagcgacagacccaagggcgccatccttgcataaggtggttgagtctgaggacattgctgagaatactgggcttgggttcccttcacacgtctcattgccttgcgtctggcgacattatgatttct

SEQ ID NO: 17263 - protein, 157 aa, Zea mays subsp. mays
  peptide (1)..(157): Ceres Seq. ID no. 1671643
  misc_feature (91)..(91): Xaa is any aa, unknown or other
NLTTTPHLLTPPRKGPGYATPLEAMEKGPREKLVYVTCVYNGTGINKPDYLATVDLDPSSPTYSQVIHRLPVTHIGDELHHSGWNSCSSCXGDPSAKRRFLILPSLLSGRVYVVDTATDPRAPSLHKVVESEDIAENTGLGFPSHVSLPCVWRHYDF

SEQ ID NO: 17264 - protein, 133 aa, Zea mays subsp. mays
  peptide (1)..(133): Ceres Seq. ID no. 1671644
  misc_feature (67)..(67): Xaa is any aa, unknown or other
MEKGPREKLVYVTCVYNGTGINKPDYLATVDLDPSSPTYSQVIHRLPVTHIGDELHHSGWNSCSSCXGDPSAKRRFLILPSLLSGRVYVVDTATDPRAPSLHKVVESEDIAENTGLGFPSHVSLPCVWRHYDF

SEQ ID NO: 17265 - DNA, 1851 bp, Zea mays subsp. mays
  misc_feature (1)..(1851): Ceres Seq. ID no. 12361706
  misc_feature (1)..(1851): Ortholog of  Ceres SEQ ID NO 15176457 as cited in SEQ ID NO 55547
  misc_feature (1)..(1851): Ortholog of  Ceres SEQ ID NO 13594349 as cited in SEQ ID NO 58161
  misc_feature (1)..(1851): Ortholog of  Ceres SEQ ID NO 13663419 as cited in SEQ ID NO 66561
acttttgaaaatagttttgtgctctcaaggcaaaagagcacacttgactcttgctcgcctctctcactcactctctcactcaagctccagtcacacactctctctagctctctgccactccgtccattgggctggactggactggaggcatggccattccattgctagctccagcgcgctccaacggcagcaggccgctggcgctggcgctggtgctcgtcgccgcggccgcgctgtgccgtccgggtgcttgcgacgacggagccgccgccgccgcggacaggatcaggcggctcccgggggagccggaggtgagcttcgcccagtactcgggctacgtcgccgtggacagcggcggcggcaagcgcgccctgttctactacttcgtggaggccgacgtcgtggaccccgcctccaagcctctcgtcctctggctcaacggcgggcctgggtgctcgtccctgggcgtaggcgccttctcagagaacgggccgttcaggcctagtggccaggtgctggtcaagaacgaatacagctggaacaaagaggccaatgtgatatacctggagacgccggctggtgttggctactcctactctgctgatgctgcttactaccagggcgtggatgacaagatgacagccatggacaacatggtgttcctgcaaaggtggctccaaaagttcccacagtacaagggcagagacctctacatcgctggagagagctacgcagggcactacatcccgcaactcgcggaggccatggtggagttcaacaagaaggacaggatcttcaacctcagaggcgtcgctctgggcaaccctgtgctggaattcgcgacggacttcaacgcccgcgccgagtacttctggtcgcacggcctcatctccgacgccacctaccgcgtgttcacctccgcctgcaactactcccgctacgtcaccgagtactacggcggctcgctgtcgccgctgtgcgcccgggtgatgaaccaggtgacgcgcgagaccagccgcttcgtcgacaagtacgacgtcacgctcgacgtctgcctctcgtcggtgctctctcagtccaagatcctctcgccgcacgagcaggtcgggcagcggatcgacgtgtgcgtggaggacgagacggtgaggtacctcaaccgccgggacgtgcaggcggcgctgcacgcgaggctcgtcggcgtcgacaagtgggcggtctgcagcagcgttctcgagtacgagctgctcaacctgcagatcccgaccatcaacgtcgtcggatcgctcgtgaaatcgggcatccgagtgctcgtttacagcggcgaccaggactcggtgatccctctgacgggcagccggacgctggtgcagaacctggcgcgcgacatgggcctcaagaccaccaccccgtaccgggtgtggttcgaagggcagcaggtcggaggatggacgcaggtgtacggaggcggcgcgctgtccttcgccaccatcaggggcgcctcccacgaggcgcccttctcgcagcccgggcgctcgctcgttctcttcagggcgttcctgcagggccagcctctgcctgaaaccttctcgtgatcagggtgctcgatgcagctccttctgcaggtggggtggggggttttgcactgtagtaatctgtaaggaggtgtttggtgtgtctgcctcctggctcctgctagctgatgatactagtggtttggtttggcgccgcggtaggagtaggagcgagcgagcggccggcgctgttcgaggtctgtgctccgtgtttctacagcgtccgtccatggctcggcaattgcctaaagaagcggaaaggatttgtccctcgtttcgt

SEQ ID NO: 17266 - protein, 480 aa, Zea mays subsp. mays
  peptide (1)..(480): Ceres Seq. ID no. 12361707
MAIPLLAPARSNGSRPLALALVLVAAAALCRPGACDDGAAAAADRIRRLPGEPEVSFAQYSGYVAVDSGGGKRALFYYFVEADVVDPASKPLVLWLNGGPGCSSLGVGAFSENGPFRPSGQVLVKNEYSWNKEANVIYLETPAGVGYSYSADAAYYQGVDDKMTAMDNMVFLQRWLQKFPQYKGRDLYIAGESYAGHYIPQLAEAMVEFNKKDRIFNLRGVALGNPVLEFATDFNARAEYFWSHGLISDATYRVFTSACNYSRYVTEYYGGSLSPLCARVMNQVTRETSRFVDKYDVTLDVCLSSVLSQSKILSPHEQVGQRIDVCVEDETVRYLNRRDVQAALHARLVGVDKWAVCSSVLEYELLNLQIPTINVVGSLVKSGIRVLVYSGDQDSVIPLTGSRTLVQNLARDMGLKTTTPYRVWFEGQQVGGWTQVYGGGALSFATIRGASHEAPFSQPGRSLVLFRAFLQGQPLPETFS

SEQ ID NO: 17267 - protein, 318 aa, Zea mays subsp. mays
  peptide (1)..(318): Ceres Seq. ID no. 12361708
MTAMDNMVFLQRWLQKFPQYKGRDLYIAGESYAGHYIPQLAEAMVEFNKKDRIFNLRGVALGNPVLEFATDFNARAEYFWSHGLISDATYRVFTSACNYSRYVTEYYGGSLSPLCARVMNQVTRETSRFVDKYDVTLDVCLSSVLSQSKILSPHEQVGQRIDVCVEDETVRYLNRRDVQAALHARLVGVDKWAVCSSVLEYELLNLQIPTINVVGSLVKSGIRVLVYSGDQDSVIPLTGSRTLVQNLARDMGLKTTTPYRVWFEGQQVGGWTQVYGGGALSFATIRGASHEAPFSQPGRSLVLFRAFLQGQPLPETFS

SEQ ID NO: 17268 - protein, 315 aa, Zea mays subsp. mays
  peptide (1)..(315): Ceres Seq. ID no. 12361709
MDNMVFLQRWLQKFPQYKGRDLYIAGESYAGHYIPQLAEAMVEFNKKDRIFNLRGVALGNPVLEFATDFNARAEYFWSHGLISDATYRVFTSACNYSRYVTEYYGGSLSPLCARVMNQVTRETSRFVDKYDVTLDVCLSSVLSQSKILSPHEQVGQRIDVCVEDETVRYLNRRDVQAALHARLVGVDKWAVCSSVLEYELLNLQIPTINVVGSLVKSGIRVLVYSGDQDSVIPLTGSRTLVQNLARDMGLKTTTPYRVWFEGQQVGGWTQVYGGGALSFATIRGASHEAPFSQPGRSLVLFRAFLQGQPLPETFS

SEQ ID NO: 17269 - DNA, 2537 bp, Zea mays subsp. mays
  misc_feature (1)..(2537): Ceres Seq. ID no. 12417396
  misc_feature (1)..(2537): Ortholog of  Ceres SEQ ID NO 15176095 as cited in SEQ ID NO 59699
attgaccaatctgctccgggcaccatggagaggatcagtggcccgcgcctcgctgtcctgctcgctctcgccgtcctcaccgccgtcgccgcagcnaccacggacgaggtgcgcgcgcagtccacctacatcatccacctcgccccaggccacccggcgctgtccgcagcgcgcgacaacggcggcgacgaggcggccctccgccgcctcctcccgcgccgcctgcgcgcgccgaggccgcgcgtgctctactcctaccagcacgctgccacgggcatcgccgcgcggctcacgccccannaggcggcgcacgccnnnnncggggagggcgtcctggccgtgtaccccgaccaggcgcggnanctgcacaccacccacaccccggcgttcctccgnctaacggaggccgccgggctcctcccggctgcgacggggggcgcgtcgtcgtctgccgtcgtcggcgtgctcgacaccgggctctaccccatcggncggtcctcgttcgcngcagcggatggtctcggnccggcgcccgcgtccttctctggngganncgtctnngcgggnnncttcaacgcgtccncctactgcaacagcaagctcatcggngccaagttcttntaccaggggtacgaagctgctctcggccaccccatcgatgagaccaaggagtcgaagtcgccgntggacactgagggccatggcacgcacaccgcctccactgnngctggctcgccggtggccggagccgggttctttgactacgccgaggggcaggccgtgggcatggaccccggtgcgcgcatcgcggcgtacaagatctgctggacgtctggatgctacgactccgatatcctcgctgccatggacgaggccgtcgctgacggcgtcgacgtcatctcgctctccgtcggcgccaacgggtacgcccccagcttcttcaccgattccatcgccatcggcgctttccacgcggtaagcaagggcatcgtcgtctcctgctccgccggcaactccggccccggcgagtacaccgccgtcaacattgcgccgtggatcctgaccgtcggcgcgtccaccatcgaccgcgagttccccgccgatgtggttctcggcgacggccgcgtctttggtggtgtctctctgtatgccggtgaccccctggactccactcagttgcctctggtgttcgccggggactgtggttcccctctgtgcctaatgggcgagctcgactcgaagaaggtggccggcaagatggtgctctgtctgcgtggtaacaacgctcgtgtcgagaaaggagcagcagtcaagctcgccggtggggtcggaatgatcctcgccaacaccgaggagagcggggaggagctcatcgccgactcccacctcgtgccggcgactatggtcgggcagaagttcggcgacaagatcaggtactacgtccagacggacccgtcgccaacggcgaccatcgtgttccgcggcacagtcatcggcaagtcgccgtccgcgcctcgagtggcggcgttctcgagccgaggccccaactaccgcgcaccggagatcctcaagcccgacgtcatcgccccaggcgtcaacatactcgcggcgtggaccggcgccgcctcccccaccgacctggacatcgactcgaggcgcgtggagttcaacatcatctccggcacgtccatgtcctgcccgcacgtgagcggcctcgccgcgctgctccgccaggcgcaccctgagtggagccccgcggcgatcaagtcggcgctcatgaccacggcgtacaacctggacaactccgggggaaccatcaaggacctcgctacgggcgtggagtcgacgccgttcgtccgtggcgccggtcacgtcgaccccaacgccgccctcgacccagggctggtgtacgacgccggctccgacgactacgtcgccttcctctgcacgctcgggtactctccgtcgttgatctccatcttcacgcangacgcgtcggtcgccgactgctcgacgaaaattcgctcgccccggcgaccttaactaccctgccttcgccgccgtcttctcctcctaccaagactcggtcacctaccgccgggtggtgcgcaacgtcggcagcaactccagcgcggtgtaccagccgacgatcgccagcccgtacggcgtggatgtcacggtgactccgagcaagctcgcgttcgacgggaagcagcagagcctgggatacgagatcaccatcgcagtgtcaggcaacccggtgatcgtggattccagctactcgttcggatccatcacctggagcgacggcgcgcacgacgtcacgagccccattgccgtgacctggccgtccaacggtggagcagcagccatgtagtagactgatgctgttgctactgtctaccgctgtgggaagaaggacagggccatgagcccatgagatccgaaatctccacgcctcctgcctgccataggaataatttactcgactgaaccacgcaataattcagctgcccctatcgtggttgtggtggacc

SEQ ID NO: 17270 - protein, 680 aa, Zea mays subsp. mays
  peptide (1)..(680): Ceres Seq. ID no. 12417397
  misc_feature (32)..(32): Xaa is any aa, unknown or other
  misc_feature (100)..(100): Xaa is any aa, unknown or other
  misc_feature (101)..(101): Xaa is any aa, unknown or other
  misc_feature (106)..(106): Xaa is any aa, unknown or other
  misc_feature (107)..(107): Xaa is any aa, unknown or other
  misc_feature (121)..(121): Xaa is any aa, unknown or other
  misc_feature (132)..(132): Xaa is any aa, unknown or other
  misc_feature (164)..(164): Xaa is any aa, unknown or other
  misc_feature (169)..(169): Xaa is any aa, unknown or other
  misc_feature (175)..(175): Xaa is any aa, unknown or other
  misc_feature (183)..(183): Xaa is any aa, unknown or other
  misc_feature (185)..(185): Xaa is any aa, unknown or other
  misc_feature (187)..(187): Xaa is any aa, unknown or other
  misc_feature (189)..(189): Xaa is any aa, unknown or other
  misc_feature (190)..(190): Xaa is any aa, unknown or other
  misc_feature (195)..(195): Xaa is any aa, unknown or other
  misc_feature (203)..(203): Xaa is any aa, unknown or other
  misc_feature (207)..(207): Xaa is any aa, unknown or other
  misc_feature (229)..(229): Xaa is any aa, unknown or other
  misc_feature (242)..(242): Xaa is any aa, unknown or other
  misc_feature (663)..(663): Xaa is any aa, unknown or other
IDQSAPGTMERISGPRLAVLLALAVLTAVAAXTTDEVRAQSTYIIHLAPGHPALSAARDNGGDEAALRRLLPRRLRAPRPRVLYSYQHAATGIAARLTPXXAAHAXXGEGVLAVYPDQARXLHTTHTPAFLXLTEAAGLLPAATGGASSSAVVGVLDTGLYPIXRSSFXAADGLXPAPASFSXGXVXAXXFNASXYCNSKLIXAKFXYQGYEAALGHPIDETKESKSPXDTEGHGTHTASTXAGSPVAGAGFFDYAEGQAVGMDPGARIAAYKICWTSGCYDSDILAAMDEAVADGVDVISLSVGANGYAPSFFTDSIAIGAFHAVSKGIVVSCSAGNSGPGEYTAVNIAPWILTVGASTIDREFPADVVLGDGRVFGGVSLYAGDPLDSTQLPLVFAGDCGSPLCLMGELDSKKVAGKMVLCLRGNNARVEKGAAVKLAGGVGMILANTEESGEELIADSHLVPATMVGQKFGDKIRYYVQTDPSPTATIVFRGTVIGKSPSAPRVAAFSSRGPNYRAPEILKPDVIAPGVNILAAWTGAASPTDLDIDSRRVEFNIISGTSMSCPHVSGLAALLRQAHPEWSPAAIKSALMTTAYNLDNSGGTIKDLATGVESTPFVRGAGHVDPNAALDPGLVYDAGSDDYVAFLCTLGYSPSLISIFTXDASVADCSTKIRSPRRP

SEQ ID NO: 17271 - protein, 672 aa, Zea mays subsp. mays
  peptide (1)..(672): Ceres Seq. ID no. 12417398
  misc_feature (24)..(24): Xaa is any aa, unknown or other
  misc_feature (92)..(92): Xaa is any aa, unknown or other
  misc_feature (93)..(93): Xaa is any aa, unknown or other
  misc_feature (98)..(98): Xaa is any aa, unknown or other
  misc_feature (99)..(99): Xaa is any aa, unknown or other
  misc_feature (113)..(113): Xaa is any aa, unknown or other
  misc_feature (124)..(124): Xaa is any aa, unknown or other
  misc_feature (156)..(156): Xaa is any aa, unknown or other
  misc_feature (161)..(161): Xaa is any aa, unknown or other
  misc_feature (167)..(167): Xaa is any aa, unknown or other
  misc_feature (175)..(175): Xaa is any aa, unknown or other
  misc_feature (177)..(177): Xaa is any aa, unknown or other
  misc_feature (179)..(179): Xaa is any aa, unknown or other
  misc_feature (181)..(181): Xaa is any aa, unknown or other
  misc_feature (182)..(182): Xaa is any aa, unknown or other
  misc_feature (187)..(187): Xaa is any aa, unknown or other
  misc_feature (195)..(195): Xaa is any aa, unknown or other
  misc_feature (199)..(199): Xaa is any aa, unknown or other
  misc_feature (221)..(221): Xaa is any aa, unknown or other
  misc_feature (234)..(234): Xaa is any aa, unknown or other
  misc_feature (655)..(655): Xaa is any aa, unknown or other
MERISGPRLAVLLALAVLTAVAAXTTDEVRAQSTYIIHLAPGHPALSAARDNGGDEAALRRLLPRRLRAPRPRVLYSYQHAATGIAARLTPXXAAHAXXGEGVLAVYPDQARXLHTTHTPAFLXLTEAAGLLPAATGGASSSAVVGVLDTGLYPIXRSSFXAADGLXPAPASFSXGXVXAXXFNASXYCNSKLIXAKFXYQGYEAALGHPIDETKESKSPXDTEGHGTHTASTXAGSPVAGAGFFDYAEGQAVGMDPGARIAAYKICWTSGCYDSDILAAMDEAVADGVDVISLSVGANGYAPSFFTDSIAIGAFHAVSKGIVVSCSAGNSGPGEYTAVNIAPWILTVGASTIDREFPADVVLGDGRVFGGVSLYAGDPLDSTQLPLVFAGDCGSPLCLMGELDSKKVAGKMVLCLRGNNARVEKGAAVKLAGGVGMILANTEESGEELIADSHLVPATMVGQKFGDKIRYYVQTDPSPTATIVFRGTVIGKSPSAPRVAAFSSRGPNYRAPEILKPDVIAPGVNILAAWTGAASPTDLDIDSRRVEFNIISGTSMSCPHVSGLAALLRQAHPEWSPAAIKSALMTTAYNLDNSGGTIKDLATGVESTPFVRGAGHVDPNAALDPGLVYDAGSDDYVAFLCTLGYSPSLISIFTXDASVADCSTKIRSPRRP

SEQ ID NO: 17272 - protein, 418 aa, Zea mays subsp. mays
  peptide (1)..(418): Ceres Seq. ID no. 12417399
  misc_feature (401)..(401): Xaa is any aa, unknown or other
MDPGARIAAYKICWTSGCYDSDILAAMDEAVADGVDVISLSVGANGYAPSFFTDSIAIGAFHAVSKGIVVSCSAGNSGPGEYTAVNIAPWILTVGASTIDREFPADVVLGDGRVFGGVSLYAGDPLDSTQLPLVFAGDCGSPLCLMGELDSKKVAGKMVLCLRGNNARVEKGAAVKLAGGVGMILANTEESGEELIADSHLVPATMVGQKFGDKIRYYVQTDPSPTATIVFRGTVIGKSPSAPRVAAFSSRGPNYRAPEILKPDVIAPGVNILAAWTGAASPTDLDIDSRRVEFNIISGTSMSCPHVSGLAALLRQAHPEWSPAAIKSALMTTAYNLDNSGGTIKDLATGVESTPFVRGAGHVDPNAALDPGLVYDAGSDDYVAFLCTLGYSPSLISIFTXDASVADCSTKIRSPRRP

SEQ ID NO: 17273 - DNA, 2743 bp, Zea mays subsp. mays
  misc_feature (1)..(2743): Ceres Seq. ID no. 12361729
  misc_feature (1)..(2743): Ortholog of  Ceres SEQ ID NO 14313284 as cited in SEQ ID NO 67146
  misc_feature (1)..(2743): Ortholog of  Ceres SEQ ID NO 14308925 as cited in SEQ ID NO 0
gcacgagaccattacctagaacatcctaatcgaaaagacgaactcatcactgcactggtggtgtccgtggtgctccacagagtgaagcgatagccaggagaggcgacgatgcgcaagtgggcgctctcctccgcgctcctcctcctctttctcctcaccacactccccgacccagctaagaagctacaagtgaatgccgaggagagcagcgatgacttggctaacccacccaaggtagaggagaagcttggtgctgtccctcatggcctgtccaccgactctgaggttgcccagagggaagccgagtctatctctaggaagactctcaggagctcagccgagaagtttgagttccaagctgaggtttccagactcatggacatcatcatcaactcactctacagcaacaaggatatcttcctgagggagctcatatctaatgcctctgatgcgttggataagattaggttcctttcccttactgataaggaagttctgggtgaaggggacactgcaaagcttgagattcagattaagttggacaaagagaagaaaatcctctccattcgggataggggtattggtatgaccaaggaagatcttattaagaaccttggaacgattgctaaatctggcacttcagcttttgtggaaaagatgcagtctggaggtgacctcaatcttattggacagtttggtgttggcttctactctgtgtacttggttgctgactatgttgaagtggtcagcaagcacaatgatgataaacagtatgtgtgggaatcaaaagctgatggatcatttgccatctctgaggatacatggaatgagccccttggccgtggaactgagataagattgcatctgcgagatgaggccaaggagtacttggaagaggataagctaaaggatttggtgaagaagtactctgagttcatcaacttccctatctatttgtggtcgaccaaggaggttgatgttgaagtgccaactgatgaggatgagacaagtgaagaagaggattcaactccagaaactacagaggaagagacagaagaagacgaagacgaagagaaagagaaaaagcccaagaccaagacaataaaggagactacttctgagtgggaacttctgaatgatgtgaaggctgtatggcttcgcagcccaaaggaggttactgatgaagaatactcgaagttttaccactcactagccaaggacttcggtgatgacaagcctatgggttggagccacttcactgccgaaggagatgttgagttcaaagctttgctctttattcccccgaaggctccacatgatctctatgagagttactacaacagtaacaagtcaaacctcaagttgtatgttaggagagttttcatctctgacgaatttgatgatcttcttcccaagtacctgagctttttgaagggtattgttgactcggacacgctgcccctgaatgtgtcacgagaaatgcttcaacaacatagcagtctcaagaccatcaagaagaagctgatccgcaaagcccttgacatgatcaggaaacttgctgaagaagaccctgatgagtacagcaacaaggataagacagatgaagagaaaagcgagatggaggagaagaagggccagtacgccaagttctggaatgagtttggcaaatcaatcaagctgggtatcatcgaagacgcgactaacagaaaccgccttgcgaagcttcttagatttgagagtaccaagtcggatggcaaacttgcctcccttgacgagtacatctcacggatgaagtcagggcagaaagacatcttctacatcacgggaagcagcaaagagcagctggagaagtctccattcctcgagaggctaaccaagaagaactacgaggttatcttcttcaccgaccccgtggacgagtacctgatgcagtacctgatggactacgaggacaagaagttccagaacgtgtccaaggagggactgaagctgggcaaggactcgaagctcaaggacctcaaggagtcgttcaaggagctgactgactggtggaagaaggccctggagagtgagaacgtggactcggtgaagatcagcaaccggctgcacgacaccccctgcgtcgtggtcacctccaagtacgggtggagcgccaacatggagaagatcatgcaggcgcagaccctgtcggactcgagcaagcaggcgtacatgcgcggcaagagggtgctggagatcaaccccaggcaccccatcatcaaggagctccgcgacaaggtcgcccaggacaacgagagcgaggagctgaagcacacggcgaggctggtgtaccagacggccctgatggagagcgggttcaacctccccgaccccaaggagttcgcgtccagcatctacaagtcggtgcagaagggcctggacctgagccccgacgcgaccgtggaggaggacgacgaggcagaggagcagccggaggtggaggagaaggagccggagccggagccgtcgtcctacgacaaggacgagctttaggctttcggatttgttttcaagtctagctagctcccgctttactaggaatgtgatgatatcggtgactgcctggttcaagtcacgtgatggttcttgagagacgcccatttttttcccatgcaacgtgatacgggatttttgcctgtctttgtacctactctacaagctttagttcagtgattcagtctaattaattagtggtttgcagttt

SEQ ID NO: 17274 - protein, 807 aa, Zea mays subsp. mays
  peptide (1)..(807): Ceres Seq. ID no. 12361730
MRKWALSSALLLLFLLTTLPDPAKKLQVNAEESSDDLANPPKVEEKLGAVPHGLSTDSEVAQREAESISRKTLRSSAEKFEFQAEVSRLMDIIINSLYSNKDIFLRELISNASDALDKIRFLSLTDKEVLGEGDTAKLEIQIKLDKEKKILSIRDRGIGMTKEDLIKNLGTIAKSGTSAFVEKMQSGGDLNLIGQFGVGFYSVYLVADYVEVVSKHNDDKQYVWESKADGSFAISEDTWNEPLGRGTEIRLHLRDEAKEYLEEDKLKDLVKKYSEFINFPIYLWSTKEVDVEVPTDEDETSEEEDSTPETTEEETEEDEDEEKEKKPKTKTIKETTSEWELLNDVKAVWLRSPKEVTDEEYSKFYHSLAKDFGDDKPMGWSHFTAEGDVEFKALLFIPPKAPHDLYESYYNSNKSNLKLYVRRVFISDEFDDLLPKYLSFLKGIVDSDTLPLNVSREMLQQHSSLKTIKKKLIRKALDMIRKLAEEDPDEYSNKDKTDEEKSEMEEKKGQYAKFWNEFGKSIKLGIIEDATNRNRLAKLLRFESTKSDGKLASLDEYISRMKSGQKDIFYITGSSKEQLEKSPFLERLTKKNYEVIFFTDPVDEYLMQYLMDYEDKKFQNVSKEGLKLGKDSKLKDLKESFKELTDWWKKALESENVDSVKISNRLHDTPCVVVTSKYGWSANMEKIMQAQTLSDSSKQAYMRGKRVLEINPRHPIIKELRDKVAQDNESEELKHTARLVYQTALMESGFNLPDPKEFASSIYKSVQKGLDLSPDATVEEDDEAEEQPEVEEKEPEPEPSSYDKDEL

SEQ ID NO: 17275 - protein, 718 aa, Zea mays subsp. mays
  peptide (1)..(718): Ceres Seq. ID no. 12361731
MDIIINSLYSNKDIFLRELISNASDALDKIRFLSLTDKEVLGEGDTAKLEIQIKLDKEKKILSIRDRGIGMTKEDLIKNLGTIAKSGTSAFVEKMQSGGDLNLIGQFGVGFYSVYLVADYVEVVSKHNDDKQYVWESKADGSFAISEDTWNEPLGRGTEIRLHLRDEAKEYLEEDKLKDLVKKYSEFINFPIYLWSTKEVDVEVPTDEDETSEEEDSTPETTEEETEEDEDEEKEKKPKTKTIKETTSEWELLNDVKAVWLRSPKEVTDEEYSKFYHSLAKDFGDDKPMGWSHFTAEGDVEFKALLFIPPKAPHDLYESYYNSNKSNLKLYVRRVFISDEFDDLLPKYLSFLKGIVDSDTLPLNVSREMLQQHSSLKTIKKKLIRKALDMIRKLAEEDPDEYSNKDKTDEEKSEMEEKKGQYAKFWNEFGKSIKLGIIEDATNRNRLAKLLRFESTKSDGKLASLDEYISRMKSGQKDIFYITGSSKEQLEKSPFLERLTKKNYEVIFFTDPVDEYLMQYLMDYEDKKFQNVSKEGLKLGKDSKLKDLKESFKELTDWWKKALESENVDSVKISNRLHDTPCVVVTSKYGWSANMEKIMQAQTLSDSSKQAYMRGKRVLEINPRHPIIKELRDKVAQDNESEELKHTARLVYQTALMESGFNLPDPKEFASSIYKSVQKGLDLSPDATVEEDDEAEEQPEVEEKEPEPEPSSYDKDEL

SEQ ID NO: 17276 - protein, 648 aa, Zea mays subsp. mays
  peptide (1)..(648): Ceres Seq. ID no. 12361732
MTKEDLIKNLGTIAKSGTSAFVEKMQSGGDLNLIGQFGVGFYSVYLVADYVEVVSKHNDDKQYVWESKADGSFAISEDTWNEPLGRGTEIRLHLRDEAKEYLEEDKLKDLVKKYSEFINFPIYLWSTKEVDVEVPTDEDETSEEEDSTPETTEEETEEDEDEEKEKKPKTKTIKETTSEWELLNDVKAVWLRSPKEVTDEEYSKFYHSLAKDFGDDKPMGWSHFTAEGDVEFKALLFIPPKAPHDLYESYYNSNKSNLKLYVRRVFISDEFDDLLPKYLSFLKGIVDSDTLPLNVSREMLQQHSSLKTIKKKLIRKALDMIRKLAEEDPDEYSNKDKTDEEKSEMEEKKGQYAKFWNEFGKSIKLGIIEDATNRNRLAKLLRFESTKSDGKLASLDEYISRMKSGQKDIFYITGSSKEQLEKSPFLERLTKKNYEVIFFTDPVDEYLMQYLMDYEDKKFQNVSKEGLKLGKDSKLKDLKESFKELTDWWKKALESENVDSVKISNRLHDTPCVVVTSKYGWSANMEKIMQAQTLSDSSKQAYMRGKRVLEINPRHPIIKELRDKVAQDNESEELKHTARLVYQTALMESGFNLPDPKEFASSIYKSVQKGLDLSPDATVEEDDEAEEQPEVEEKEPEPEPSSYDKDEL

SEQ ID NO: 17277 - DNA, 2830 bp, Zea mays subsp. mays; identical to SEQ ID NO: 2518
  misc_feature (1)..(2830): Ceres Seq. ID no. 12362942
  misc_feature (1)..(2830): Ortholog of  Ceres SEQ ID NO 13600595 as cited in SEQ ID NO 629
  misc_feature (1)..(2830): Ortholog of  Ceres SEQ ID NO 13593379 as cited in SEQ ID NO 20573

SEQ ID NO: 17278 - protein, 844 aa, Zea mays subsp. mays; identical to SEQ ID NO: 2519
  peptide (1)..(844): Ceres Seq. ID no. 12362943

SEQ ID NO: 17279 - protein, 786 aa, Zea mays subsp. mays; identical to SEQ ID NO: 2520
  peptide (1)..(786): Ceres Seq. ID no. 12362944

SEQ ID NO: 17280 - protein, 692 aa, Zea mays subsp. mays; identical to SEQ ID NO: 2521
  peptide (1)..(692): Ceres Seq. ID no. 12362945

SEQ ID NO: 17281 - DNA, 2222 bp, Zea mays subsp. mays
  misc_feature (1)..(2222): Ceres Seq. ID no. 12417404
  misc_feature (1)..(2222): Ortholog of  Ceres SEQ ID NO 14307589 as cited in SEQ ID NO 20466
  misc_feature (1)..(2222): Ortholog of  Ceres SEQ ID NO 13661001 as cited in SEQ ID NO 67531
gcacgagaccattacctagaacatcctaatcgaaaacacatactctgctgctgctaagtggtggcatctcgtttaggcgagatccccctcctcccccgctttccactcctctcctccaccctagtcgactccttccctgcaatccgctggccggctcacagtaccagaggagtccaccggaggagctcagctagactccaccctggtggctcgatcggcaccggccgctgcctgcgagactccgccagcgcgcgatgtaccgggtgaagagcgagggcgagggcgagggcgagggcgactgcgaaatgatgctgcaggaacagatggactcgctggtggccgacgacgtcagcagcggaggagggtcgcctcacaggggcgtcggcacgcccctgaagaaggggccatggacgtccgcggaggacgccatcctggtggactacgttaagaagaacggcgaaggcaactggaacgcggtgcagaagaacaccgggctgttccgctgcggcaagagctgccgcctccggtgggcgaaccacctcaggcccaacctcaagaagggggccttcacccccgaggaggagcgcctcatcatccagctccacgccaagatggggaacaagtgggcgaggatggctggtcacttgccagggcgtactgacaatgagatcaagaactactggaacactcgaataaagagatgtcaacgagctagccttcctatttatcctgctagtgtatgcaatcaatctacaaatgaagatcagcaactgtctggtaattttaacggtggcgagaatatatccaatgatcttctatctgggaacagcctttatctgccagattttaccagtgacaatttcattgcgaacccagaggctttatcctatgcaccacagttgtcagctgtttcaataagcaatttgctcggccaaagctttgcatcaaaaagttgtagcttcatggatcaggttgaccaagcggggatgctgaaacaatctggctgtgtgcttcctgcattgagcgatgccattgacagtgtgctttcctcagctgatcatttttcaaatgactctgagaagctcaggcaggctttaggttttgattatctaaatgaagccaatgctagcagcaagagtattgcacctttcggggttgcacttactggcagccatgcctttttaaatggcaatttctctgcttctaggcccacaaatggtcctttgaagatggagctcccttcactccaagatactgaatctgatccaaatagctggctcaagtatactgtggctcctgcaatgcagcctactgaattagtagatccttacctgcagtctccatcagcgaccccttcagtgaaatctgagtgtgcatcgccgaggaacagtggtcttttggaagagctgcttcatgaagctcaggcactaagatctgggaagaaccaacaatcatcggtccgaagttcaagttcttctgctggcacaccttatgagactaccacggtggttagcccagagtttgatatgggtcaggaatattgggaagaacagcccagttctttcctcagtgaatatgctcattttagtggaaattctttcactgaatccactcctcctgttagtgctgcgtcacctgatatcttccagctctccaagatttctcctgcacaaagcccttcaatgggctctggcgagcaggcgttagagcctaaacatgagtcggcagcttcacctcgtcctgaaaacttgaggcctgatgcattattctctgggaacacagccgatccatccattttcaataatgccatagccatgctcctgggcaatggcattgatgccgagtacaaacctgttcttggtgatggaattgtgctcgattcttcgtcatggaacaacatgcaacatgcttttcagatggcgggattcaaatgagttccatgcacttgtttgtgatgctgaagggcttcttgttgcttgttttggggtcagtatcagcgaaggccgcattgattgtgacgctgcattcctgacagagggcgtgcaggtgcagcagctaccatatgtgatcttcatgctaatagtccttttgtctaataaagtgcatgaagataaaccggatatttttttttgctttgtattagagaaccgtttttgtcaaccctgtcaggattctgttggaaatgtgtcatgatttttgtttgaacaatttaatatctgtcg

SEQ ID NO: 17282 - protein, 559 aa, Zea mays subsp. mays
  peptide (1)..(559): Ceres Seq. ID no. 12417405
MYRVKSEGEGEGEGDCEMMLQEQMDSLVADDVSSGGGSPHRGVGTPLKKGPWTSAEDAILVDYVKKNGEGNWNAVQKNTGLFRCGKSCRLRWANHLRPNLKKGAFTPEEERLIIQLHAKMGNKWARMAGHLPGRTDNEIKNYWNTRIKRCQRASLPIYPASVCNQSTNEDQQLSGNFNGGENISNDLLSGNSLYLPDFTSDNFIANPEALSYAPQLSAVSISNLLGQSFASKSCSFMDQVDQAGMLKQSGCVLPALSDAIDSVLSSADHFSNDSEKLRQALGFDYLNEANASSKSIAPFGVALTGSHAFLNGNFSASRPTNGPLKMELPSLQDTESDPNSWLKYTVAPAMQPTELVDPYLQSPSATPSVKSECASPRNSGLLEELLHEAQALRSGKNQQSSVRSSSSSAGTPYETTTVVSPEFDMGQEYWEEQPSSFLSEYAHFSGNSFTESTPPVSAASPDIFQLSKISPAQSPSMGSGEQALEPKHESAASPRPENLRPDALFSGNTADPSIFNNAIAMLLGNGIDAEYKPVLGDGIVLDSSSWNNMQHAFQMAGFK

SEQ ID NO: 17283 - protein, 542 aa, Zea mays subsp. mays
  peptide (1)..(542): Ceres Seq. ID no. 12417406
MMLQEQMDSLVADDVSSGGGSPHRGVGTPLKKGPWTSAEDAILVDYVKKNGEGNWNAVQKNTGLFRCGKSCRLRWANHLRPNLKKGAFTPEEERLIIQLHAKMGNKWARMAGHLPGRTDNEIKNYWNTRIKRCQRASLPIYPASVCNQSTNEDQQLSGNFNGGENISNDLLSGNSLYLPDFTSDNFIANPEALSYAPQLSAVSISNLLGQSFASKSCSFMDQVDQAGMLKQSGCVLPALSDAIDSVLSSADHFSNDSEKLRQALGFDYLNEANASSKSIAPFGVALTGSHAFLNGNFSASRPTNGPLKMELPSLQDTESDPNSWLKYTVAPAMQPTELVDPYLQSPSATPSVKSECASPRNSGLLEELLHEAQALRSGKNQQSSVRSSSSSAGTPYETTTVVSPEFDMGQEYWEEQPSSFLSEYAHFSGNSFTESTPPVSAASPDIFQLSKISPAQSPSMGSGEQALEPKHESAASPRPENLRPDALFSGNTADPSIFNNAIAMLLGNGIDAEYKPVLGDGIVLDSSSWNNMQHAFQMAGFK

SEQ ID NO: 17284 - protein, 541 aa, Zea mays subsp. mays
  peptide (1)..(541): Ceres Seq. ID no. 12417407
MLQEQMDSLVADDVSSGGGSPHRGVGTPLKKGPWTSAEDAILVDYVKKNGEGNWNAVQKNTGLFRCGKSCRLRWANHLRPNLKKGAFTPEEERLIIQLHAKMGNKWARMAGHLPGRTDNEIKNYWNTRIKRCQRASLPIYPASVCNQSTNEDQQLSGNFNGGENISNDLLSGNSLYLPDFTSDNFIANPEALSYAPQLSAVSISNLLGQSFASKSCSFMDQVDQAGMLKQSGCVLPALSDAIDSVLSSADHFSNDSEKLRQALGFDYLNEANASSKSIAPFGVALTGSHAFLNGNFSASRPTNGPLKMELPSLQDTESDPNSWLKYTVAPAMQPTELVDPYLQSPSATPSVKSECASPRNSGLLEELLHEAQALRSGKNQQSSVRSSSSSAGTPYETTTVVSPEFDMGQEYWEEQPSSFLSEYAHFSGNSFTESTPPVSAASPDIFQLSKISPAQSPSMGSGEQALEPKHESAASPRPENLRPDALFSGNTADPSIFNNAIAMLLGNGIDAEYKPVLGDGIVLDSSSWNNMQHAFQMAGFK

SEQ ID NO: 17285 - DNA, 1649 bp, Zea mays subsp. mays
  misc_feature (1)..(1649): Ceres Seq. ID no. 12375395
  misc_feature (1)..(1649): Ortholog of  Ceres SEQ ID NO 13594345 as cited in SEQ ID NO 58043
  misc_feature (1)..(1649): Ortholog of  Ceres SEQ ID NO 13597843 as cited in SEQ ID NO 64850
  misc_feature (1)..(1649): Ortholog of  Ceres SEQ ID NO 12617417 as cited in SEQ ID NO 65089
  misc_feature (1)..(1649): Ortholog of  Ceres SEQ ID NO 13662880 as cited in SEQ ID NO 65422
  misc_feature (1)..(1649): Ortholog of  Ceres SEQ ID NO 13591190 as cited in SEQ ID NO 68044
gcacgagaccattacctagaacatcctaatcgaaaaagcaacagccatggcttcagcgaagcagagcaagaagatgcgcatacttctgatcccattcttcgccaccagccacatcgggccctacatcgacttcgccgtccgtctcgcggcagccaggccaggagccgtcgagcccaccgtcgccgtgaccccggccaatgttgcggtggtccggtcggcgctcgagcgccacggccccgcggcgagcggcacggtcaggatcgtcacgtacccgttcccgcgcgtggatggcctcgctccgggcgtggagaacctctccaccgccggagacgacgcgtggcgcatcgacgccgccgccatcgacgaggccctctcgcggccggcgcaggaggcgctcctcagggagcggtcccccgacgccgtcgtgtcggactaccacttcttctggaccagcagcatcgccgccgagctgggcctgccgtgcgtcgttttcagtgtcatcgcccccttctcgggtctcgtcatgcgcatcctcgccggcgccgtcgtctctgggtcgcgtgacgttaccgttcccgggttgccagggccggagatacggatccccgtcagcgagctgccggagttcctgagacgcccggcgaaggaccaaggcacgttcagcccctgcaacgcggcgcaggccaggtgtttgggcgtcgcctacaacacgttcgcaggcatggagcaggagtaccgcgaggcgaacgtgcgcgccaaatccttgaagcgctgctacttcgtcggccccgtctcactgccgctgccggcggcagcggcaggcaccagcgagtctccatgcatcaggtggctcgactccaggccaaactgctcggtggtgtacgtgtgcttcggcacctacgccgccatctcggaggaccagctccgggagctggcgctcggcctggaggcctcaggggagccgttcctgtgggtggtgagggccgacgggtggacgccgccggagggctgggagcagcgcgtcggggagagggggatgctggtgagagggtgggctccgcagacggcggtgctggcccatccagcggtgggcgcgttcctgacgcactgcgggtcgagctcgttgctggaggcggcggcggccggcgtgccgatgctgacgtggccgctggtgttcgaccagttcatcgaggagaggctggtgacggacgtgctcgggatcggggagcgggtctggagtggggcgcggagcacgaggtacgaggagagggagctcgtgccggcggaggcggtggctcgggcggtggcgaggttcttggagccaggcgggccgggggaggcggcgaggggcagggcgcgggatctcgcagtgaaggcccacgctgccgtagcggagggcggctcgtcgtcccgtgatctgcatcgcctcatcgacgacctggtcgaagccagagcggcaacgagcagctgcaacgctgacagcgagtaagagatggaattgctggagatgtctcgatctggcgagcaactggaagaaggtctcgaacagccttcacggacaagtacgccatctgcaacgtacgtacgttctcggagtcgaagaaaacacttatggaaataatatggtactgcaccacctcgatttctgt

SEQ ID NO: 17286 - protein, 480 aa, Zea mays subsp. mays
  peptide (1)..(480): Ceres Seq. ID no. 12375396
MASAKQSKKMRILLIPFFATSHIGPYIDFAVRLAAARPGAVEPTVAVTPANVAVVRSALERHGPAASGTVRIVTYPFPRVDGLAPGVENLSTAGDDAWRIDAAAIDEALSRPAQEALLRERSPDAVVSDYHFFWTSSIAAELGLPCVVFSVIAPFSGLVMRILAGAVVSGSRDVTVPGLPGPEIRIPVSELPEFLRRPAKDQGTFSPCNAAQARCLGVAYNTFAGMEQEYREANVRAKSLKRCYFVGPVSLPLPAAAAGTSESPCIRWLDSRPNCSVVYVCFGTYAAISEDQLRELALGLEASGEPFLWVVRADGWTPPEGWEQRVGERGMLVRGWAPQTAVLAHPAVGAFLTHCGSSSLLEAAAAGVPMLTWPLVFDQFIEERLVTDVLGIGERVWSGARSTRYEERELVPAEAVARAVARFLEPGGPGEAARGRARDLAVKAHAAVAEGGSSSRDLHRLIDDLVEARAATSSCNADSE

SEQ ID NO: 17287 - protein, 471 aa, Zea mays subsp. mays
  peptide (1)..(471): Ceres Seq. ID no. 12375397
MRILLIPFFATSHIGPYIDFAVRLAAARPGAVEPTVAVTPANVAVVRSALERHGPAASGTVRIVTYPFPRVDGLAPGVENLSTAGDDAWRIDAAAIDEALSRPAQEALLRERSPDAVVSDYHFFWTSSIAAELGLPCVVFSVIAPFSGLVMRILAGAVVSGSRDVTVPGLPGPEIRIPVSELPEFLRRPAKDQGTFSPCNAAQARCLGVAYNTFAGMEQEYREANVRAKSLKRCYFVGPVSLPLPAAAAGTSESPCIRWLDSRPNCSVVYVCFGTYAAISEDQLRELALGLEASGEPFLWVVRADGWTPPEGWEQRVGERGMLVRGWAPQTAVLAHPAVGAFLTHCGSSSLLEAAAAGVPMLTWPLVFDQFIEERLVTDVLGIGERVWSGARSTRYEERELVPAEAVARAVARFLEPGGPGEAARGRARDLAVKAHAAVAEGGSSSRDLHRLIDDLVEARAATSSCNADSE

SEQ ID NO: 17288 - protein, 321 aa, Zea mays subsp. mays
  peptide (1)..(321): Ceres Seq. ID no. 12375398
MRILAGAVVSGSRDVTVPGLPGPEIRIPVSELPEFLRRPAKDQGTFSPCNAAQARCLGVAYNTFAGMEQEYREANVRAKSLKRCYFVGPVSLPLPAAAAGTSESPCIRWLDSRPNCSVVYVCFGTYAAISEDQLRELALGLEASGEPFLWVVRADGWTPPEGWEQRVGERGMLVRGWAPQTAVLAHPAVGAFLTHCGSSSLLEAAAAGVPMLTWPLVFDQFIEERLVTDVLGIGERVWSGARSTRYEERELVPAEAVARAVARFLEPGGPGEAARGRARDLAVKAHAAVAEGGSSSRDLHRLIDDLVEARAATSSCNADSE

SEQ ID NO: 17289 - DNA, 1631 bp, Zea mays subsp. mays
  misc_feature (1)..(1631): Ceres Seq. ID no. 12417412
  misc_feature (1)..(1631): Ortholog of  Ceres SEQ ID NO 15179824 as cited in SEQ ID NO 66250
  misc_feature (1)..(1631): Ortholog of  Ceres SEQ ID NO 13657872 as cited in SEQ ID NO 66357
accaatcatttctttgcaatctgcagcctctgcaaactgatcgcgttgctggttgctggtaatcatcggaccagtccacagatatcggaagctctcttgctactgatggcgaagcccagcgtggcggtgccggaggttggcgtaccagccgcgcaggcgtcgtgcacctgcccggggacgctgctcgcgtacccgccgccgcgtggcgccggggtcgcggccgccgtgcggcgcaagtgcctgcaggtggagctcggcgcgggggcgggcctgctgggcggcgccggcgcctggggcgtggagtccatgcgggcgtcgtcgcccacgcacgccagggccgcggccgcgctcgccgccggcggcggcgtcgatgttgacgtcgacgaggagcgcgccgccagctggatggcgcggcacccgtcggcgctgggcaggttcgagcggatcgtggcggcggccgagggcaagcggatcgtcatgttcctggactacgacggcacgctgtcgcccatcgtggacgaccccgacgccgccttcatgagcgagacgatgcggatggccgtgcgtagcgtcgccaagcatttcccgacggcgatcgtgagcggccggtgccgcgacaaggtgttcgagttcgtgaagctggcagagctctactacgccggcagccacggcatggacatcaagggtccggcggcctccaaggcctcctcttcttctcggcacgccgcaaaggcaaaaggagtaacggccacgtcggcgtggcaggtggcgcggcgccattgggcggggcctgccgatcgacgacctgcgtgcgcgcgcggcgggagaggctgttacaaaaacagagaagctcacatcggccaagtggtttcgccatctccgccgcccctggatcactcggtgctctcctctcctactctcccattcagattctctaagaaaaaaaggtctagatctagcgagatcgtgctgtagtagccttgttgcttggcgcatcgttgtttgttaacattacatgcttactgttgcccgtgtgcgtgtatcaccactgtatccatccatccatgtttgtttctgaaaaaaaaaaaaaaaaaagcttctcgtgccgttttttttttttttttttgaacaaaactgcaacctcaccacaagcagcaaaaagctaatctcaggtcccatattagcgagcggatctgtcacagatggtagcaggaagggaaacaaaagtgcaaaacatgtccagactcagcatgaacctggcgacccagaggcacgcgccatccacatttattctcggcatacacaagcagccaccaaaggagcacaagaggtacaaccccaagaaactgacatacgagcagaggaaggccagtctcattgaaaggctcaaccaactcaactcctcgggcggcgcagatgacgacgacgaggatgacgagtaaagtttcgtcccatcgaagtagtgctatcttatgcggcgatcagtatttgtgctatggcatttatcgctacctgtagtcgtgcaacatgcatttttgtttaagtttgtcgatgcgaacaaagttgtttctgttagtttggagctggagttctgaatatttacttttataatataaaattggaccgagtcg

SEQ ID NO: 17290 - protein, 324 aa, Zea mays subsp. mays
  peptide (1)..(324): Ceres Seq. ID no. 12417413
TNHFFAICSLCKLIALLVAGNHRTSPQISEALLLLMAKPSVAVPEVGVPAAQASCTCPGTLLAYPPPRGAGVAAAVRRKCLQVELGAGAGLLGGAGAWGVESMRASSPTHARAAAALAAGGGVDVDVDEERAASWMARHPSALGRFERIVAAAEGKRIVMFLDYDGTLSPIVDDPDAAFMSETMRMAVRSVAKHFPTAIVSGRCRDKVFEFVKLAELYYAGSHGMDIKGPAASKASSSSRHAAKAKGVTATSAWQVARRHWAGPADRRPACARGGRGCYKNREAHIGQVVSPSPPPLDHSVLSSPTLPFRFSKKKRSRSSEIVL

SEQ ID NO: 17291 - protein, 289 aa, Zea mays subsp. mays
  peptide (1)..(289): Ceres Seq. ID no. 12417414
MAKPSVAVPEVGVPAAQASCTCPGTLLAYPPPRGAGVAAAVRRKCLQVELGAGAGLLGGAGAWGVESMRASSPTHARAAAALAAGGGVDVDVDEERAASWMARHPSALGRFERIVAAAEGKRIVMFLDYDGTLSPIVDDPDAAFMSETMRMAVRSVAKHFPTAIVSGRCRDKVFEFVKLAELYYAGSHGMDIKGPAASKASSSSRHAAKAKGVTATSAWQVARRHWAGPADRRPACARGGRGCYKNREAHIGQVVSPSPPPLDHSVLSSPTLPFRFSKKKRSRSSEIVL

SEQ ID NO: 17292 - protein, 222 aa, Zea mays subsp. mays
  peptide (1)..(222): Ceres Seq. ID no. 12417415
MRASSPTHARAAAALAAGGGVDVDVDEERAASWMARHPSALGRFERIVAAAEGKRIVMFLDYDGTLSPIVDDPDAAFMSETMRMAVRSVAKHFPTAIVSGRCRDKVFEFVKLAELYYAGSHGMDIKGPAASKASSSSRHAAKAKGVTATSAWQVARRHWAGPADRRPACARGGRGCYKNREAHIGQVVSPSPPPLDHSVLSSPTLPFRFSKKKRSRSSEIVL

SEQ ID NO: 17293 - DNA, 478 bp, Zea mays subsp. mays
  misc_feature (1)..(478): Ceres Seq. ID no. 1671848
  misc_feature (1)..(478): Ortholog of  Ceres SEQ ID NO 14312281 as cited in SEQ ID NO 59172
  misc_feature (1)..(478): Ortholog of  Ceres SEQ ID NO 14302299 as cited in SEQ ID NO 68665
  misc_feature (1)..(478): Ortholog of  Ceres SEQ ID NO 15174396 as cited in SEQ ID NO 0
attggccgggctccagtgctgggcgttgtatgagaggtgagcctcccggtggagcgtgggtggtgctgggtgccggggatgagctgcaacgggtgccgcgtgcttcgcaaggggtgcagcgacgcgtgcgtgctgcggccgtgcctgcagtggatcgacggcgccgaggcgcagggccacgccaccgtcttcgtcgccaagttcttcggccgcgccggcctcatgtccttcctcaccgccgtccccgagccgcagcgcccagcggtgttccagtcgttgatgtacgaggcggccgggcggacgatcaaccctgtgagcggcgccgtggggctgctcggcgcgggcagctggcagctgtgccaggcggcggtggagacggtgcttcggggcggcgccatcgggccgctgcccgagttcgacgggggccgcgacaatacgtttgctctggcggcgacggcgaggcgggccgtggggtgct

SEQ ID NO: 17294 - protein, 158 aa, Zea mays subsp. mays
  peptide (1)..(158): Ceres Seq. ID no. 1671849
WPGSSAGRCMRGEPPGGAWVVLGAGDELQRVPRASQGVQRRVRAAAVPAVDRRRRGAGPRHRLRRQVLRPRRPHVLPHRRPRAAAPSGVPVVDVRGGRADDQPCERRRGAARRGQLAAVPGGGGDGASGRRHRAAARVRRGPRQYVCSGGDGEAGRGV

SEQ ID NO: 17295 - protein, 149 aa, Zea mays subsp. mays
  peptide (1)..(149): Ceres Seq. ID no. 1671850
MRGEPPGGAWVVLGAGDELQRVPRASQGVQRRVRAAAVPAVDRRRRGAGPRHRLRRQVLRPRRPHVLPHRRPRAAAPSGVPVVDVRGGRADDQPCERRRGAARRGQLAAVPGGGGDGASGRRHRAAARVRRGPRQYVCSGGDGEAGRGV

SEQ ID NO: 17296 - protein, 133 aa, Zea mays subsp. mays
  peptide (1)..(133): Ceres Seq. ID no. 1671851
MSCNGCRVLRKGCSDACVLRPCLQWIDGAEAQGHATVFVAKFFGRAGLMSFLTAVPEPQRPAVFQSLMYEAAGRTINPVSGAVGLLGAGSWQLCQAAVETVLRGGAIGPLPEFDGGRDNTFALAATARRAVGC

SEQ ID NO: 17297 - DNA, 1804 bp, Zea mays subsp. mays
  misc_feature (1)..(1804): Ceres Seq. ID no. 12362385
  misc_feature (1)..(1804): Ortholog of  Ceres SEQ ID NO 15171556 as cited in SEQ ID NO 59687
  misc_feature (1)..(1804): Ortholog of  Ceres SEQ ID NO 15177935 as cited in SEQ ID NO 60258
  misc_feature (1)..(1804): Ortholog of  Ceres SEQ ID NO 13659033 as cited in SEQ ID NO 66372
  misc_feature (1)..(1804): Ortholog of  Ceres SEQ ID NO 12625899 as cited in SEQ ID NO 69079
  misc_feature (1)..(1804): Ortholog of  Ceres SEQ ID NO 15180051 as cited in SEQ ID NO 0
aattcgggctgggcttgttggcctcgcctcggttggtgccctctctgccgccgcggaggagagtcgccgccaccaccaccatccagccagccaaggcttcccttccccagcagcagtctccagccgcagccatggccaagccaccgccgcccacctccacctccgaccccgcgctccccaccactgctacaaccacctcgtcggcccccaagtcgtcgtctcgcccctccccccgcccccggggcctcctcgatccgctcgcagcctccgcgcgctccctcctcgcctcggcgcgccgctccccggtcaccacgctagccgccgccttcttcctcctcgcgctcgtcatgtacggcgaggacgcccgcaccatcgccgagctctccatcgacgactacctctacccggacgccgacctctacaacgtctccggcctgccgcccctcgcgctgcccccgctcacctgcgacctctcccgcggcagatgggtcttcgacaacgtctccgttccggcgtaccgggagaaagactgcaccttcctcaccaagcaggtctcctgcctcgccaacggccgccccgacgacatgtggcagtactggagatggcagcccaacgagtgctccctccccacgttcgacgctcggagattcatggaggcgatgcgcgggaagcggctcatgttcgtgggggactcgctgaaccgcaaccagtgggagtcgctggtgtgcctcgtgcagcccatcctgtctaagggcaggaagaagatcgtcaagcggggctccttcaacaccttctacgctaaggagtaccgcgccacgctcgagttctactgggcgcccttcctcgtcgaatccaactctgacaaccccaacttccacagcatcaaggaacggatcatcagtcccgagcggatcgaggcgcacgccaagcactggaaggatgctgactacctcatcttcaacacctacatctggtggatgaacaacgccgacatcaaagtcaggagacccaattcgaggtactggtctgacaacgatgaggttcccaggattgaggcgtatggccgtgtgttcaagacatggtctgattggctcaatgacaacatcgatcctgcccgaacgtccgtcttcttcatgacgatttctcctcctcacctcagcccacagaattggggaaacccggacggtatcaaatgtgtaagagagacgcttccatatcagaactacagccaacacctggatctttaccatgacatgcggctgtatgacttagtggtcaatgtggccagctccatggagaaggtcccagtgacagtgatcaatatcacaaggatgtcagattaccggaaggacgcccacacgtccctgtacaccatccggcaagggaagctgctgacgcctaagcagaaggcagaccccgagaagttcgcggattgcatccactggtgccttcctggcgtgccggacgtgtggaaccaaatactctacacgaggattctttcgaaatcatcgtggcattctaattttagcccccctccatcccagtctctgcctcttcctccccaatgagaatcagaagtgggggcttggtttttgtcggagaatgtatgatttttcattctttttccttcctttttgggtagattgagtaaaatgatagcacgaaaaggaaaatgaatgttctgattactgatggtatagcatgtaagaagattcagctgaagtgtaaattagttgtgagttagccaattgagaaaacaacagcgacctagtataaagtgcatatacatatactgctggttcac

SEQ ID NO: 17298 - protein, 521 aa, Zea mays subsp. mays
  peptide (1)..(521): Ceres Seq. ID no. 12362386
FGLGLLASPRLVPSLPPRRRVAATTTIQPAKASLPQQQSPAAAMAKPPPPTSTSDPALPTTATTTSSAPKSSSRPSPRPRGLLDPLAASARSLLASARRSPVTTLAAAFFLLALVMYGEDARTIAELSIDDYLYPDADLYNVSGLPPLALPPLTCDLSRGRWVFDNVSVPAYREKDCTFLTKQVSCLANGRPDDMWQYWRWQPNECSLPTFDARRFMEAMRGKRLMFVGDSLNRNQWESLVCLVQPILSKGRKKIVKRGSFNTFYAKEYRATLEFYWAPFLVESNSDNPNFHSIKERIISPERIEAHAKHWKDADYLIFNTYIWWMNNADIKVRRPNSRYWSDNDEVPRIEAYGRVFKTWSDWLNDNIDPARTSVFFMTISPPHLSPQNWGNPDGIKCVRETLPYQNYSQHLDLYHDMRLYDLVVNVASSMEKVPVTVINITRMSDYRKDAHTSLYTIRQGKLLTPKQKADPEKFADCIHWCLPGVPDVWNQILYTRILSKSSWHSNFSPPPSQSLPLPPQ

SEQ ID NO: 17299 - protein, 478 aa, Zea mays subsp. mays
  peptide (1)..(478): Ceres Seq. ID no. 12362387
MAKPPPPTSTSDPALPTTATTTSSAPKSSSRPSPRPRGLLDPLAASARSLLASARRSPVTTLAAAFFLLALVMYGEDARTIAELSIDDYLYPDADLYNVSGLPPLALPPLTCDLSRGRWVFDNVSVPAYREKDCTFLTKQVSCLANGRPDDMWQYWRWQPNECSLPTFDARRFMEAMRGKRLMFVGDSLNRNQWESLVCLVQPILSKGRKKIVKRGSFNTFYAKEYRATLEFYWAPFLVESNSDNPNFHSIKERIISPERIEAHAKHWKDADYLIFNTYIWWMNNADIKVRRPNSRYWSDNDEVPRIEAYGRVFKTWSDWLNDNIDPARTSVFFMTISPPHLSPQNWGNPDGIKCVRETLPYQNYSQHLDLYHDMRLYDLVVNVASSMEKVPVTVINITRMSDYRKDAHTSLYTIRQGKLLTPKQKADPEKFADCIHWCLPGVPDVWNQILYTRILSKSSWHSNFSPPPSQSLPLPPQ

SEQ ID NO: 17300 - protein, 406 aa, Zea mays subsp. mays
  peptide (1)..(406): Ceres Seq. ID no. 12362388
MYGEDARTIAELSIDDYLYPDADLYNVSGLPPLALPPLTCDLSRGRWVFDNVSVPAYREKDCTFLTKQVSCLANGRPDDMWQYWRWQPNECSLPTFDARRFMEAMRGKRLMFVGDSLNRNQWESLVCLVQPILSKGRKKIVKRGSFNTFYAKEYRATLEFYWAPFLVESNSDNPNFHSIKERIISPERIEAHAKHWKDADYLIFNTYIWWMNNADIKVRRPNSRYWSDNDEVPRIEAYGRVFKTWSDWLNDNIDPARTSVFFMTISPPHLSPQNWGNPDGIKCVRETLPYQNYSQHLDLYHDMRLYDLVVNVASSMEKVPVTVINITRMSDYRKDAHTSLYTIRQGKLLTPKQKADPEKFADCIHWCLPGVPDVWNQILYTRILSKSSWHSNFSPPPSQSLPLPPQ

SEQ ID NO: 17301 - DNA, 2053 bp, Zea mays subsp. mays; identical to SEQ ID NO: 5535
  misc_feature (1)..(2053): Ceres Seq. ID no. 13577863
  misc_feature (1)..(2053): Ortholog of  Ceres SEQ ID NO 14310841 as cited in SEQ ID NO 53666
  misc_feature (1)..(2053): Ortholog of  Ceres SEQ ID NO 15178736 as cited in SEQ ID NO 56439
  misc_feature (1)..(2053): Ortholog of  Ceres SEQ ID NO 14308493 as cited in SEQ ID NO 60320

SEQ ID NO: 17302 - protein, 362 aa, Zea mays subsp. mays; identical to SEQ ID NO: 5536
  peptide (1)..(362): Ceres Seq. ID no. 13577864
  misc_feature (44)..(44): Xaa is any aa, unknown or other
  misc_feature (173)..(173): Xaa is any aa, unknown or other
  misc_feature (213)..(213): Xaa is any aa, unknown or other

SEQ ID NO: 17303 - protein, 302 aa, Zea mays subsp. mays; identical to SEQ ID NO: 5537
  peptide (1)..(302): Ceres Seq. ID no. 13577865
  misc_feature (113)..(113): Xaa is any aa, unknown or other
  misc_feature (153)..(153): Xaa is any aa, unknown or other

SEQ ID NO: 17304 - protein, 296 aa, Zea mays subsp. mays; identical to SEQ ID NO: 5538
  peptide (1)..(296): Ceres Seq. ID no. 13577866
  misc_feature (107)..(107): Xaa is any aa, unknown or other
  misc_feature (147)..(147): Xaa is any aa, unknown or other

SEQ ID NO: 17305 - DNA, 1454 bp, Zea mays subsp. mays
  misc_feature (1)..(1454): Ceres Seq. ID no. 12358548
  misc_feature (1)..(1454): Ortholog of  Ceres SEQ ID NO 12609146 as cited in SEQ ID NO 52118
  misc_feature (1)..(1454): Ortholog of  Ceres SEQ ID NO 14303397 as cited in SEQ ID NO 54614
  misc_feature (1)..(1454): Ortholog of  Ceres SEQ ID NO 13594056 as cited in SEQ ID NO 55691
  misc_feature (1)..(1454): Ortholog of  Ceres SEQ ID NO 14314186 as cited in SEQ ID NO 57457
  misc_feature (1)..(1454): Ortholog of  Ceres SEQ ID NO 13638136 as cited in SEQ ID NO 58644
  misc_feature (1)..(1454): Ortholog of  Ceres SEQ ID NO 13596868 as cited in SEQ ID NO 62806
  misc_feature (1)..(1454): Ortholog of  Ceres SEQ ID NO 12587035 as cited in SEQ ID NO 63605
  misc_feature (1)..(1454): Ortholog of  Ceres SEQ ID NO 14301886 as cited in SEQ ID NO 64201
  misc_feature (1)..(1454): Ortholog of  Ceres SEQ ID NO 13595885 as cited in SEQ ID NO 69265
  misc_feature (1)..(1454): Ortholog of  Ceres SEQ ID NO 12566239 as cited in SEQ ID NO 0
  misc_feature (1)..(1454): Ortholog of  Ceres SEQ ID NO 13599119 as cited in SEQ ID NO 0
  misc_feature (1)..(1454): Ortholog of  Ceres SEQ ID NO 14308987 as cited in SEQ ID NO 0
  misc_feature (1)..(1454): Ortholog of  Ceres SEQ ID NO 15179992 as cited in SEQ ID NO 0
acgacgctttttctccatggtttggtgtgcatttcctctctcctgtccccacttgacacatccatgtcccaatctcccccaacctcaggtcaaccgccgctacccaagatccagtctccgttctccctctcctctcgcttcatacacaccagggcggcagcggcagcggcaggggcccgccatcaccaacccacctcccttcaattataaacctataaaatatcatcattgacccaagctgaggcgactagtgggtattgatttttggtggggcagatcaaggagggggggagggggttaacttccaaggaaccagttcattgctggttctgctagcaggaggttggatttcagaggcagaagctttcagccaggcgggctcagggcgcgggcacatcaatggctggcaaggaaatcctccacaaggtgaaggacaaggtgaaagatgcatttagttcatcaggaccagaaacagggaaaggcaagacaaagttatcaggcaagcgtgtcaagcatggttaccatctggtgaagggcaaatctaatcatccaatggaggattatctagtggcagagtaccggcaagttggtgaacatgatttgggattgtttgctatattcgatggtcacctgggccacactgttccagactttttgagctcccatcttttcaataacatcttgagtgagccagaattcttgagtgatccagaaactgctatccgaaacgcataccaacttacggatcagaagatattggaaaacgcagcagagttgggaagaggtggctccacagctgttactgccatcttaataggaagtgacaagttcgtgaaactagttgttgcaaatgttggggattcacgggcagttattagcaagaacggtgtagcgaagcagctttcagttgaccatgaaccaaacatggagcgacaaacgatcgagcagaagggtggctttgtatcaaacctaccgggtgatgtgccacgtgttgatgggcagctggcagttgcaagggcatttggagaccggagcttgaagaagcacctcagctctgatccatatgtggtcgagcaaactatcgatgaaaatactgagtttttaattctagcaagtgatggcttgtggaaggtgatgtccaaccaggaggctgtcgacgagatcaaggattgcaaggacgcgcaggcagctgccaagcacctgacggagcaggccgtgaatcggaagagcaaagacgacatttcagttatcgtagtcaagttcatgtgctagcacatcgtcaggttaaatggtctcccgattgtataccgtgttaaattatcttttaagtcttgtgctcgctggtgtcggacattttgtttaccttctttggttttgggaccccacaaagagggtcaaggcttgtaacatattgttgtttgtttaaggctccaaataaagcatggtaccaccat

SEQ ID NO: 17306 - protein, 290 aa, Zea mays subsp. mays
  peptide (1)..(290): Ceres Seq. ID no. 12358549
MAGKEILHKVKDKVKDAFSSSGPETGKGKTKLSGKRVKHGYHLVKGKSNHPMEDYLVAEYRQVGEHDLGLFAIFDGHLGHTVPDFLSSHLFNNILSEPEFLSDPETAIRNAYQLTDQKILENAAELGRGGSTAVTAILIGSDKFVKLVVANVGDSRAVISKNGVAKQLSVDHEPNMERQTIEQKGGFVSNLPGDVPRVDGQLAVARAFGDRSLKKHLSSDPYVVEQTIDENTEFLILASDGLWKVMSNQEAVDEIKDCKDAQAAAKHLTEQAVNRKSKDDISVIVVKFMC

SEQ ID NO: 17307 - protein, 239 aa, Zea mays subsp. mays
  peptide (1)..(239): Ceres Seq. ID no. 12358550
MEDYLVAEYRQVGEHDLGLFAIFDGHLGHTVPDFLSSHLFNNILSEPEFLSDPETAIRNAYQLTDQKILENAAELGRGGSTAVTAILIGSDKFVKLVVANVGDSRAVISKNGVAKQLSVDHEPNMERQTIEQKGGFVSNLPGDVPRVDGQLAVARAFGDRSLKKHLSSDPYVVEQTIDENTEFLILASDGLWKVMSNQEAVDEIKDCKDAQAAAKHLTEQAVNRKSKDDISVIVVKFMC

SEQ ID NO: 17308 - DNA, 936 bp, Zea mays subsp. mays; identical to SEQ ID NO: 6253
  misc_feature (1)..(936): Ceres Seq. ID no. 12361812
  misc_feature (1)..(936): Ortholog of  Ceres SEQ ID NO 13600689 as cited in SEQ ID NO 0
  misc_feature (1)..(936): Ortholog of  Ceres SEQ ID NO 15178120 as cited in SEQ ID NO 0

SEQ ID NO: 17309 - protein, 119 aa, Zea mays subsp. mays; identical to SEQ ID NO: 6254
  peptide (1)..(119): Ceres Seq. ID no. 12361813

SEQ ID NO: 17310 - protein, 107 aa, Zea mays subsp. mays; identical to SEQ ID NO: 6255
  peptide (1)..(107): Ceres Seq. ID no. 12361814

SEQ ID NO: 17311 - DNA, 505 bp, Zea mays subsp. mays
  misc_feature (1)..(505): Ceres Seq. ID no. 1673146
  misc_feature (1)..(505): Ortholog of  Ceres SEQ ID NO 13582619 as cited in SEQ ID NO 56520
  misc_feature (1)..(505): Ortholog of  Ceres SEQ ID NO 13660872 as cited in SEQ ID NO 60830
ctaaacccaatccccttccacaccattcacacgtaccggcggagaaggaaggaattggtcgccgccgcctgcctctctcctcctcctccgtcagtggcggtggccacgccagtgctaagctaagctaagctaagcttgcgcaagtgacaagttctttggttggttggaggcagagccgccacatggcatcgtcgtcgcggctggatctcccgccggggttccgcttccaccccaccgacgaggaggtggtgtcgcactacctgacccacaaggcgctggacagccgcttctcctgcgtcgtcatcgccgacgccgacctcaacaagatcgagccgtgggatctcccaagcaaggctaagatgggcgagaaggagtggttcttcttctgccacaaggaccgcaagtacccgacggggatgcgcaccaaccgcgccaccgccagcgggtactggaaggccacggggaaggacaaggagatcttccgcggcagtagcagtagtccccg

SEQ ID NO: 17312 - protein, 107 aa, Zea mays subsp. mays
  peptide (1)..(107): Ceres Seq. ID no. 1673147
MASSSRLDLPPGFRFHPTDEEVVSHYLTHKALDSRFSCVVIADADLNKIEPWDLPSKAKMGEKEWFFFCHKDRKYPTGMRTNRATASGYWKATGKDKEIFRGSSSSP

SEQ ID NO: 17313 - DNA, 415 bp, Zea mays subsp. mays
  misc_feature (1)..(415): Ceres Seq. ID no. 1671992
  misc_feature (1)..(415): Ortholog of  Ceres SEQ ID NO 14303770 as cited in SEQ ID NO 53890
aaacccagggtgagtctccggatccgtcgccgtctggtatccgtgtgctctcgtcgccgtcgccgtcgccgccgtctgactgcccccctcgcctcccgcggcgtcgggtctctggtgctgctgctgctgctgctgctgctgcgtgcagggcagtgatggcgacgaagaggagcgtgggcaccctcggcgaggcggatctgaaggggaagaaggtgttcgtgcgcgccgacctcaacgtcccgctcgacgatgcccagaagatcaccgacgacacccgcatccgcgcctccgtccccaccatcaagttcctcctcgagaagggcgccaaggtcatcctcgccagccacctgggtcgtccaaaaggtgtcaccccaaagtacagcttgaagcctcttgttccacgcttgtctgagct

SEQ ID NO: 17314 - protein, 137 aa, Zea mays subsp. mays
  peptide (1)..(137): Ceres Seq. ID no. 1671993
TQGESPDPSPSGIRVLSSPSPSPPSDCPPRLPRRRVSGAAAAAAAAACRAVMATKRSVGTLGEADLKGKKVFVRADLNVPLDDAQKITDDTRIRASVPTIKFLLEKGAKVILASHLGRPKGVTPKYSLKPLVPRLSE

SEQ ID NO: 17315 - protein, 86 aa, Zea mays subsp. mays
  peptide (1)..(86): Ceres Seq. ID no. 1671994
MATKRSVGTLGEADLKGKKVFVRADLNVPLDDAQKITDDTRIRASVPTIKFLLEKGAKVILASHLGRPKGVTPKYSLKPLVPRLSE

SEQ ID NO: 17316 - DNA, 1224 bp, Zea mays subsp. mays
  misc_feature (1)..(1224): Ceres Seq. ID no. 13494493
  misc_feature (1)..(1224): Ortholog of  Ceres SEQ ID NO 15169703 as cited in SEQ ID NO 59628
ccctttcctgcccctccccctccgcctttcctctctctcgctctcctcctctcctctcctctcctctccttccgcatcacacaccacgactcccaaccgccggttggctttgctgctccgagctcttcctcttccacacccgccctctctcttgggtcggcggccgagtgtctgcgtcgtccacggagatcagggatcggcggcggggtatggcgagggagcgacgggagataaagaggatagagagcgcggcggcgcggcaggtcacgttctccaagcgccgccgcggcctcttcaagaaggctgaggagctctccgtgctgtgcgatgccgacgtcgcgctcatcgtcttctcctccacgggaaagctctcccagttcgccagctccagtatgaatgagatcattgacaagtacagcacacattctaaaaacctggggaaagcagaacagccttcacttgacttgaacttagaacatagcaaatatgcaaatttgaatgagcaacttgtggaagcaagccttcgactcaggcagatgagaggtgaagaacttgagggattgagtgttgaagaactccagcaattggagaagaatctggaatctggtctgcatagggtgcttcaaacaaaggatcaacaattcttggaacagatcagcgacctcgaacaaaagagtacacaactggcagaggagaacaggcaactgaggaatcaagtatcccacatacccccagttggcaagcaatcagttgctgatactgaaaatgttatcgctgaagatgggcaatcctctgaatcagtcatgactgcgttgcattctgggagttcacaggataatgatgatggttcggatgtctctctaaaattagggctgccttgtgttgcatggaagtgaaaaaacaagatggtctgtgttgatctgggtggagctgcggcttcagcagataggcacttgtgttattgtcttatggacgacccccgactactgcaataatcttgcatcggaagcgagatcagttaacctgatttgtcatccttgtggcttcatgatgcgatgttgcgcttgtaccgtttgctaggatgttaactggactagaatcgtgtctacttttgtactgctcgtgaatcctatctactttgtgctatccaaagttatgacctaccacttgcatcggcatggcgcgccggccgtaagctgtgctcaagcatgcatgcttcgtgtt

SEQ ID NO: 17317 - protein, 297 aa, Zea mays subsp. mays
  peptide (1)..(297): Ceres Seq. ID no. 13494494
LSCPSPSAFPLSRSPPLLSSPLLPHHTPRLPTAGWLCCSELFLFHTRPLSWVGGRVSASSTEIRDRRRGMARERREIKRIESAAARQVTFSKRRRGLFKKAEELSVLCDADVALIVFSSTGKLSQFASSSMNEIIDKYSTHSKNLGKAEQPSLDLNLEHSKYANLNEQLVEASLRLRQMRGEELEGLSVEELQQLEKNLESGLHRVLQTKDQQFLEQISDLEQKSTQLAEENRQLRNQVSHIPPVGKQSVADTENVIAEDGQSSESVMTALHSGSSQDNDDGSDVSLKLGLPCVAWK

SEQ ID NO: 17318 - protein, 228 aa, Zea mays subsp. mays
  peptide (1)..(228): Ceres Seq. ID no. 13494495
MARERREIKRIESAAARQVTFSKRRRGLFKKAEELSVLCDADVALIVFSSTGKLSQFASSSMNEIIDKYSTHSKNLGKAEQPSLDLNLEHSKYANLNEQLVEASLRLRQMRGEELEGLSVEELQQLEKNLESGLHRVLQTKDQQFLEQISDLEQKSTQLAEENRQLRNQVSHIPPVGKQSVADTENVIAEDGQSSESVMTALHSGSSQDNDDGSDVSLKLGLPCVAWK

SEQ ID NO: 17319 - protein, 167 aa, Zea mays subsp. mays
  peptide (1)..(167): Ceres Seq. ID no. 13494496
MNEIIDKYSTHSKNLGKAEQPSLDLNLEHSKYANLNEQLVEASLRLRQMRGEELEGLSVEELQQLEKNLESGLHRVLQTKDQQFLEQISDLEQKSTQLAEENRQLRNQVSHIPPVGKQSVADTENVIAEDGQSSESVMTALHSGSSQDNDDGSDVSLKLGLPCVAWK

SEQ ID NO: 17320 - DNA, 2817 bp, Zea mays subsp. mays
  misc_feature (1)..(2817): Ceres Seq. ID no. 12362502
  misc_feature (1)..(2817): Ortholog of  Ceres SEQ ID NO 13600310 as cited in SEQ ID NO 5086
  misc_feature (1)..(2817): Ortholog of  Ceres SEQ ID NO 15172491 as cited in SEQ ID NO 58719
  misc_feature (1)..(2817): Ortholog of  Ceres SEQ ID NO 15180362 as cited in SEQ ID NO 0
gcacgagaccattacctagaacatcctaatcgaaaaccactccccatcttcccaaaccgccccacgcttcatcctcgcaagcctccccgaccccccagctcaacgagatccggcgagcgaattccatcttccccgaccaccagatcgcagcgatggagccggatcgggtcgccgcgggggcatcctcctcgccgcagccctcaccagcgccggccatgttcctgccggggcaaacgcgagaccatgagcggggagcggtcgactgcgcggatcccggcggagacctgaatcccgcaccgcctcagcaggctacagttgaggatgccgcggtgggcggcgatgtggagcaggaggagccaaagaaggaggcgatggcaggagtaggggaggctctccggagcttcatggaggagtttggggatcaaggagaggactccattatcttgtcaccgcggctgcaggagatttgtactcctgaccgccccactgccctgcgcttcttagggaagaaatataataacctcatggagagatacaagaagcaggtggtcaagtgttctgaggagtgtgaccctagatataacggcttgaagaagaagtacacagacgagtgtgcagagaggcggcgtctgtacaatgagcttattgagctaagaggtaacattagggtgttctgcagatgcagacctctgagctccaatgagctcgcccgtgggtgttcatcagtagttgagattgactcatcacaggagactgagctgcagtttgtccccaatgaaaaagaaaggaagccctttaagttcgaccatgtttttggcccagacgatgaccaagaggccgtgttttcagaaacagtgcccgttgttgggtcagtgatggatggtttcaacgtatgcatctttgcatatgggcaaacaggaaccgggaaaactttcacaatggaaggggttccagaaaataggggtgtaaattatagggctttggaagaattgttcagaatctcagagaaaagaagtgcatctgttgcatacacattttccgtaagcatcttggaagtttacaatgaaaagatcagggatcttcttgatgagagcaatgatcaatcaaaaaggttggatattaagcaaaatgctgatggaacacaagaagttcatggtttggttgaggctccaatttataacatagatggtgtgtgggagaaactgaagtttggcgctcaaaataggtctgttggctcaaccaatgctaatgaactcagcagccgctcccacagtttggttagggtcactgttaggagcgagcacttggtgacttatcagaggagcagaagccacatgtggttggttgaccttgctggaagtgagagaatagctaaaactggggtagaaggagataggctgaaagaatcacagttcatcaacaaatcactatctgccttgggtgatgttatatctgcccttgcctcaaaaaattcccatattccatacaggaattccaagctgactcatttgctccaaagctctttaggcggagattgcaagactctaatgttcgtgcagataagcccaagctcaatggattcaggagaaactctcagttcactcaattttgcgagtagagtccgagctgtagaacatggccctgctgctcgtaagcaagcggatccagctgggagtttgaagttaaagcagatgactgaaaaacttcagcatgaggaaaaggagaatgcacagctgaatcaaagcttgcagctgatgcaactgaagtatgcttctcgtgagaatgtcttcaggacactaaatgaaaaggtgaaggatgctgaacaagcatgcagaaattatcagcagcggattagagagctggaaaatgaattaggcaatgagaagagggcttctagggattctgctagatcctcaaggcccccacttgttcctacgagacagagacaacctcagggaaggactaacagcttcgcaccaccttcaggcccttctagatggaggctcaaagcccccgcaaaacacaacaaagagaacattcctgtggcgatgaataaaccaaatgctggggatgatcctaataagcctgtcggcagagcaaggcgtgtttcacttgctccggtgattcgacaaatccccatccagcccaagaggcgatcttcgatggcagtgctaccatccgtgagagagcatctttctgtgctaaacgacaagaaagcaggatctcgactgtcgcaagccaacatggcaagaggatcacttggggcatttggcttgaatttggttccaggaacacccctagcaggacatggtggacctgttgatgctacaccagatggagcaaagttcaggagatttgatttcggaagcagcagcaagttcacaagccctgccccaaatgtgggcatgtggaacaaaatggtcacgccgcagcagaagctgggaatggcaccggcaggagcgaagctgtgtttcagcatccagaaaagagttacgcctccacatgttcgggcgaaacctggattgggcatcttcgacccagctctgcgtgagaatatggtcgtggggagagccggcaatgcgctgcgggtgctcaaccccaagcgaaggcaatctgttatctaactcttgaagccaaaggtacagcagatgtttggacgttcaaacggagcgtgtggttcttagtgaaaccgtgaagatgttcttttcagcatctttaaatggattctgcttggttgttactagttgataggaaagctatgttaatactgttaatggaagttgttaattgtatttgttcgttactaagaatcgcttc

SEQ ID NO: 17321 - protein, 823 aa, Zea mays subsp. mays
  peptide (1)..(823): Ceres Seq. ID no. 12362503
MEPDRVAAGASSSPQPSPAPAMFLPGQTRDHERGAVDCADPGGDLNPAPPQQATVEDAAVGGDVEQEEPKKEAMAGVGEALRSFMEEFGDQGEDSIILSPRLQEICTPDRPTALRFLGKKYNNLMERYKKQVVKCSEECDPRYNGLKKKYTDECAERRRLYNELIELRGNIRVFCRCRPLSSNELARGCSSVVEIDSSQETELQFVPNEKERKPFKFDHVFGPDDDQEAVFSETVPVVGSVMDGFNVCIFAYGQTGTGKTFTMEGVPENRGVNYRALEELFRISEKRSASVAYTFSVSILEVYNEKIRDLLDESNDQSKRLDIKQNADGTQEVHGLVEAPIYNIDGVWEKLKFGAQNRSVGSTNANELSSRSHSLVRVTVRSEHLVTYQRSRSHMWLVDLAGSERIAKTGVEGDRLKESQFINKSLSALGDVISALASKNSHIPYRNSKLTHLLQSSLGGDCKTLMFVQISPSSMDSGETLSSLNFASRVRAVEHGPAARKQADPAGSLKLKQMTEKLQHEEKENAQLNQSLQLMQLKYASRENVFRTLNEKVKDAEQACRNYQQRIRELENELGNEKRASRDSARSSRPPLVPTRQRQPQGRTNSFAPPSGPSRWRLKAPAKHNKENIPVAMNKPNAGDDPNKPVGRARRVSLAPVIRQIPIQPKRRSSMAVLPSVREHLSVLNDKKAGSRLSQANMARGSLGAFGLNLVPGTPLAGHGGPVDATPDGAKFRRFDFGSSSKFTSPAPNVGMWNKMVTPQQKLGMAPAGAKLCFSIQKRVTPPHVRAKPGLGIFDPALRENMVVGRAGNALRVLNPKRRQSVI

SEQ ID NO: 17322 - protein, 802 aa, Zea mays subsp. mays
  peptide (1)..(802): Ceres Seq. ID no. 12362504
MFLPGQTRDHERGAVDCADPGGDLNPAPPQQATVEDAAVGGDVEQEEPKKEAMAGVGEALRSFMEEFGDQGEDSIILSPRLQEICTPDRPTALRFLGKKYNNLMERYKKQVVKCSEECDPRYNGLKKKYTDECAERRRLYNELIELRGNIRVFCRCRPLSSNELARGCSSVVEIDSSQETELQFVPNEKERKPFKFDHVFGPDDDQEAVFSETVPVVGSVMDGFNVCIFAYGQTGTGKTFTMEGVPENRGVNYRALEELFRISEKRSASVAYTFSVSILEVYNEKIRDLLDESNDQSKRLDIKQNADGTQEVHGLVEAPIYNIDGVWEKLKFGAQNRSVGSTNANELSSRSHSLVRVTVRSEHLVTYQRSRSHMWLVDLAGSERIAKTGVEGDRLKESQFINKSLSALGDVISALASKNSHIPYRNSKLTHLLQSSLGGDCKTLMFVQISPSSMDSGETLSSLNFASRVRAVEHGPAARKQADPAGSLKLKQMTEKLQHEEKENAQLNQSLQLMQLKYASRENVFRTLNEKVKDAEQACRNYQQRIRELENELGNEKRASRDSARSSRPPLVPTRQRQPQGRTNSFAPPSGPSRWRLKAPAKHNKENIPVAMNKPNAGDDPNKPVGRARRVSLAPVIRQIPIQPKRRSSMAVLPSVREHLSVLNDKKAGSRLSQANMARGSLGAFGLNLVPGTPLAGHGGPVDATPDGAKFRRFDFGSSSKFTSPAPNVGMWNKMVTPQQKLGMAPAGAKLCFSIQKRVTPPHVRAKPGLGIFDPALRENMVVGRAGNALRVLNPKRRQSVI

SEQ ID NO: 17323 - protein, 750 aa, Zea mays subsp. mays
  peptide (1)..(750): Ceres Seq. ID no. 12362505
MAGVGEALRSFMEEFGDQGEDSIILSPRLQEICTPDRPTALRFLGKKYNNLMERYKKQVVKCSEECDPRYNGLKKKYTDECAERRRLYNELIELRGNIRVFCRCRPLSSNELARGCSSVVEIDSSQETELQFVPNEKERKPFKFDHVFGPDDDQEAVFSETVPVVGSVMDGFNVCIFAYGQTGTGKTFTMEGVPENRGVNYRALEELFRISEKRSASVAYTFSVSILEVYNEKIRDLLDESNDQSKRLDIKQNADGTQEVHGLVEAPIYNIDGVWEKLKFGAQNRSVGSTNANELSSRSHSLVRVTVRSEHLVTYQRSRSHMWLVDLAGSERIAKTGVEGDRLKESQFINKSLSALGDVISALASKNSHIPYRNSKLTHLLQSSLGGDCKTLMFVQISPSSMDSGETLSSLNFASRVRAVEHGPAARKQADPAGSLKLKQMTEKLQHEEKENAQLNQSLQLMQLKYASRENVFRTLNEKVKDAEQACRNYQQRIRELENELGNEKRASRDSARSSRPPLVPTRQRQPQGRTNSFAPPSGPSRWRLKAPAKHNKENIPVAMNKPNAGDDPNKPVGRARRVSLAPVIRQIPIQPKRRSSMAVLPSVREHLSVLNDKKAGSRLSQANMARGSLGAFGLNLVPGTPLAGHGGPVDATPDGAKFRRFDFGSSSKFTSPAPNVGMWNKMVTPQQKLGMAPAGAKLCFSIQKRVTPPHVRAKPGLGIFDPALRENMVVGRAGNALRVLNPKRRQSVI

SEQ ID NO: 17324 - DNA, 1757 bp, Zea mays subsp. mays
  misc_feature (1)..(1757): Ceres Seq. ID no. 12381532
  misc_feature (1)..(1757): Ortholog of  Ceres SEQ ID NO 14313674 as cited in SEQ ID NO 59602
aaatcaatgcagatttgagcgtccttccaaggacgcccaaacgatctctgtaccgcacctgcacggctgcacctaccccacttggtggtcgtctgggtggcgacgccggcgatgatacgcgccgggtcgacgaccgacgtcatgatcgtgctgctgacggcgttcctgctggagtacctgcccaagatctaccacgccgtccgcgtcctgcgccggatgcagggcgtctccggctacctcttcggcaccatctggtgggggatcgcgctcaacctcatggcctacttcgtcgccgctcacgcggtgggcgcgtgttggtacctgctcggcgcgcagcgggccaccaagtgcctcagggagcagtgcgcccaggccgggagcgggtgcgcgccctgggcgctggcgttcgcggagccgctctactacggcgccaccgccagcagcgtgggggcgccggccaggctcgcctgggccggcaacgccacggctaggggcacgtgcctcgacagcgccgacaactaccagtacggggcctaccagtggactgtcatgctggtggccaaccccagcagggtcgagagggttctgctccccatcttctggggactaatgactctcagcacctttgggaatctggagagcacgacggagtggctggagatcgtgttcaacatcgtcaccatcaccggcgggctgattctcgtgacaatgctcatagggaacatcaaggtgttcctgaacgcgacgacgtcgaagaagcaggcgatgcacacgcggctgcgcagcgtggagctgtggatgaagcgcaaggacctgcccaggagctaccggcaccgggtgcgccagtacaagcggcagcggtgggcggccacgcgcggcgtcgacgagtgccgcatcgtccgtgacctgccggaggggctccgccgggacatcaagtaccacctctgcctcggcctcgtgcgccaggtgccgctgttccaacacatggacgacctggtgctcgagaacatctgcgacagggtcaagtccctcattttccccaaaggagaagttattgtcagagaaggagacccagtgaagaggatgctgttcatcgtgcgcggccacctgcagagcagccaggtgctccgcaacggcgccgagagctgctgcatgctggggccgggcaacttcagcggcgacgagctcctgtcgtggtgcctgcgccggccgttcctggagcggctgccggcgtcgtcgtccacgctggccacgctggagagcacggaggccttcgggctggacgccgcggacgtcaagtacgtcacgcagcacttccggtacaccttcaccaacgacaaggtgcggcgcagcgcgcgctactactcgcccgggtggcgcacgtgggcggccgtggcggtgcagctcgcgtggcgccgctacaagcaccgcaagacgctcgcgtcgctgtcgttcatccgcccgcgccgcccgctctcgcggtgctcgtcgctcggcgaggagaagctacgcctctataccgcgctgctcacgtcgcccaagcccaaccaagacgacctgctgtgactgagatgcatgcctgcagtctgaacaacgcgcgtctgttcagcggagttgaagcaaaatgcagcgagatggaagaagctggttctctatagtaaacgtgcatgtcagaaagaactcgagcattggagctccagcctctatgtgtacggtactggttgacaggttctctgtgacatgtgtctcgaattgct

SEQ ID NO: 17325 - protein, 484 aa, Zea mays subsp. mays
  peptide (1)..(484): Ceres Seq. ID no. 12381533
MIRAGSTTDVMIVLLTAFLLEYLPKIYHAVRVLRRMQGVSGYLFGTIWWGIALNLMAYFVAAHAVGACWYLLGAQRATKCLREQCAQAGSGCAPWALAFAEPLYYGATASSVGAPARLAWAGNATARGTCLDSADNYQYGAYQWTVMLVANPSRVERVLLPIFWGLMTLSTFGNLESTTEWLEIVFNIVTITGGLILVTMLIGNIKVFLNATTSKKQAMHTRLRSVELWMKRKDLPRSYRHRVRQYKRQRWAATRGVDECRIVRDLPEGLRRDIKYHLCLGLVRQVPLFQHMDDLVLENICDRVKSLIFPKGEVIVREGDPVKRMLFIVRGHLQSSQVLRNGAESCCMLGPGNFSGDELLSWCLRRPFLERLPASSSTLATLESTEAFGLDAADVKYVTQHFRYTFTNDKVRRSARYYSPGWRTWAAVAVQLAWRRYKHRKTLASLSFIRPRRPLSRCSSLGEEKLRLYTALLTSPKPNQDDLL

SEQ ID NO: 17326 - protein, 474 aa, Zea mays subsp. mays
  peptide (1)..(474): Ceres Seq. ID no. 12381534
MIVLLTAFLLEYLPKIYHAVRVLRRMQGVSGYLFGTIWWGIALNLMAYFVAAHAVGACWYLLGAQRATKCLREQCAQAGSGCAPWALAFAEPLYYGATASSVGAPARLAWAGNATARGTCLDSADNYQYGAYQWTVMLVANPSRVERVLLPIFWGLMTLSTFGNLESTTEWLEIVFNIVTITGGLILVTMLIGNIKVFLNATTSKKQAMHTRLRSVELWMKRKDLPRSYRHRVRQYKRQRWAATRGVDECRIVRDLPEGLRRDIKYHLCLGLVRQVPLFQHMDDLVLENICDRVKSLIFPKGEVIVREGDPVKRMLFIVRGHLQSSQVLRNGAESCCMLGPGNFSGDELLSWCLRRPFLERLPASSSTLATLESTEAFGLDAADVKYVTQHFRYTFTNDKVRRSARYYSPGWRTWAAVAVQLAWRRYKHRKTLASLSFIRPRRPLSRCSSLGEEKLRLYTALLTSPKPNQDDLL

SEQ ID NO: 17327 - protein, 449 aa, Zea mays subsp. mays
  peptide (1)..(449): Ceres Seq. ID no. 12381535
MQGVSGYLFGTIWWGIALNLMAYFVAAHAVGACWYLLGAQRATKCLREQCAQAGSGCAPWALAFAEPLYYGATASSVGAPARLAWAGNATARGTCLDSADNYQYGAYQWTVMLVANPSRVERVLLPIFWGLMTLSTFGNLESTTEWLEIVFNIVTITGGLILVTMLIGNIKVFLNATTSKKQAMHTRLRSVELWMKRKDLPRSYRHRVRQYKRQRWAATRGVDECRIVRDLPEGLRRDIKYHLCLGLVRQVPLFQHMDDLVLENICDRVKSLIFPKGEVIVREGDPVKRMLFIVRGHLQSSQVLRNGAESCCMLGPGNFSGDELLSWCLRRPFLERLPASSSTLATLESTEAFGLDAADVKYVTQHFRYTFTNDKVRRSARYYSPGWRTWAAVAVQLAWRRYKHRKTLASLSFIRPRRPLSRCSSLGEEKLRLYTALLTSPKPNQDDLL

SEQ ID NO: 17328 - DNA, 2095 bp, Zea mays subsp. mays
  misc_feature (1)..(2095): Ceres Seq. ID no. 12417312
  misc_feature (1)..(2095): Ortholog of  Ceres SEQ ID NO 14310841 as cited in SEQ ID NO 53666
  misc_feature (1)..(2095): Ortholog of  Ceres SEQ ID NO 15178736 as cited in SEQ ID NO 56439
  misc_feature (1)..(2095): Ortholog of  Ceres SEQ ID NO 14308493 as cited in SEQ ID NO 60320
gcacgagaccattacctagaacatcctaatcaaaaaaaatcacaacccgcactcgcccaaaaccctactgctcccgctccgctcctgcttggtcgagatcacttcgccgccgccgctttcgagatctccgggtggagcaagcgaggaaaggcagcagccatgtcgctccgcgtgctgaaccctaacgccgaggtgctcaacaagtcggcagcgctgcacatgaacatcaacgccgccaagggcctccaggacgtgctcaagaccaacctcggccccaagggcaccatcaagatgcttgtgggtggagctggtgacctgaagctgacgaaggatgggaacaccctcttgaaggaaatgcaaattcagaacccaactgcaatcatgattgcgaggacggctgtggcacaggatgacacaagtggtgatggcacaacctccactgtgctatttatcggggagctaatgaagcagtccgagcggtgcatcgatgaaggaactcatccaaggttcttggttgatggttttgatgttgctaagagagcgtgtcttgattttctcgataagttcaagacgccagtcgttactggtgatgaacctgacagagataccttaaaaatgatagcaagaacaactcttaggacaaagttgtatgaagggctggctgatcagttgactgatattgttgtgaatgcagttctctgcattcgcaaaccagatgaaccaattgatctgtttatggtggaaataatgcacatgcgccacaaatttgatgttgacacccgtctggttgagggtctggtcctggaccacggttctcgtcaccctgacatgaagcgcagggcagagaattgttacatcttgacctgcaatgtctcattagaatatgagaaaagtgaaatcaatgcaggatttttttactcaaacgcagaacaaagagagaagatggttgctgcagagagacgccaagttgatgaacgtgtcaaacagattattgaattgaaaaataaggtttgtgctggaggcgataaaaactttgtggtgatcaatcagaagggcattgaccctccatctctggatctccttgctagagcggggattattgctcttcgaagagcaaagaggagaaatatggagaggcttgtgctagcatgtggtggtgaagctgtcaattcagttgatgagttgactgaagattgtctaggctgggctggtcttgtctatgagcatgttcttggagaagaaaagtacacatttgtggagaatgtgaaaaatcctcgctcttgtactatactgattaaaggacctaatgaccataccattgcacaaatcaaggatgctgtccgtgatggtctaagatctgttaagaacacagttgaggatgaagcagttgtgctgggtgctggtgcttttgaggttgctgcaaagaagcatcttatcgacaatgtgaagaaaaccgtcaaaggacgagcacaacttggggtggaggcgtttgcggaagctcttcttgttatacccaagactttggctgagaactctggtttagatactcaagatgtgattgtttctctccagaatgagcatgaccgtggattagttgtggggttgaaccatcactctggggatccgattgatccccagatggaaggcatcttcgacaactactctgtgaagcgccagatcatcaattctggacccatcattgcatcccagttgctgcttgtggatgaagtgatcagggcaggccgcaacatgaggaaaccgacttagatttttgtcgccacctagccgagacttatttgttctaccttttgttttggttttgtgcctagtagtgatctggatgatacgtttgacttgagttggtcccatttcacgaagcaggtcgcattcgcttttttttttgggattactgcgtgcttccattttaacatgggattttagttttatcgatggttttaacatcctcctatgaggaaacaaagcctctagagagacgaggttgccttcccgaagttagtgccaccaaacttgctgcatggaacataaagaagcaatgtttataacaatgttattatcaagtaatccgatgtgatgg

SEQ ID NO: 17329 - protein, 588 aa, Zea mays subsp. mays
  peptide (1)..(588): Ceres Seq. ID no. 12417313
ARDHYLEHPNQKKSQPALAQNPTAPAPLLLGRDHFAAAAFEISGWSKRGKAAAMSLRVLNPNAEVLNKSAALHMNINAAKGLQDVLKTNLGPKGTIKMLVGGAGDLKLTKDGNTLLKEMQIQNPTAIMIARTAVAQDDTSGDGTTSTVLFIGELMKQSERCIDEGTHPRFLVDGFDVAKRACLDFLDKFKTPVVTGDEPDRDTLKMIARTTLRTKLYEGLADQLTDIVVNAVLCIRKPDEPIDLFMVEIMHMRHKFDVDTRLVEGLVLDHGSRHPDMKRRAENCYILTCNVSLEYEKSEINAGFFYSNAEQREKMVAAERRQVDERVKQIIELKNKVCAGGDKNFVVINQKGIDPPSLDLLARAGIIALRRAKRRNMERLVLACGGEAVNSVDELTEDCLGWAGLVYEHVLGEEKYTFVENVKNPRSCTILIKGPNDHTIAQIKDAVRDGLRSVKNTVEDEAVVLGAGAFEVAAKKHLIDNVKKTVKGRAQLGVEAFAEALLVIPKTLAENSGLDTQDVIVSLQNEHDRGLVVGLNHHSGDPIDPQMEGIFDNYSVKRQIINSGPIIASQLLLVDEVIRAGRNMRKPT

SEQ ID NO: 17330 - protein, 535 aa, Zea mays subsp. mays
  peptide (1)..(535): Ceres Seq. ID no. 12417314
MSLRVLNPNAEVLNKSAALHMNINAAKGLQDVLKTNLGPKGTIKMLVGGAGDLKLTKDGNTLLKEMQIQNPTAIMIARTAVAQDDTSGDGTTSTVLFIGELMKQSERCIDEGTHPRFLVDGFDVAKRACLDFLDKFKTPVVTGDEPDRDTLKMIARTTLRTKLYEGLADQLTDIVVNAVLCIRKPDEPIDLFMVEIMHMRHKFDVDTRLVEGLVLDHGSRHPDMKRRAENCYILTCNVSLEYEKSEINAGFFYSNAEQREKMVAAERRQVDERVKQIIELKNKVCAGGDKNFVVINQKGIDPPSLDLLARAGIIALRRAKRRNMERLVLACGGEAVNSVDELTEDCLGWAGLVYEHVLGEEKYTFVENVKNPRSCTILIKGPNDHTIAQIKDAVRDGLRSVKNTVEDEAVVLGAGAFEVAAKKHLIDNVKKTVKGRAQLGVEAFAEALLVIPKTLAENSGLDTQDVIVSLQNEHDRGLVVGLNHHSGDPIDPQMEGIFDNYSVKRQIINSGPIIASQLLLVDEVIRAGRNMRKPT

SEQ ID NO: 17331 - protein, 515 aa, Zea mays subsp. mays
  peptide (1)..(515): Ceres Seq. ID no. 12417315
MNINAAKGLQDVLKTNLGPKGTIKMLVGGAGDLKLTKDGNTLLKEMQIQNPTAIMIARTAVAQDDTSGDGTTSTVLFIGELMKQSERCIDEGTHPRFLVDGFDVAKRACLDFLDKFKTPVVTGDEPDRDTLKMIARTTLRTKLYEGLADQLTDIVVNAVLCIRKPDEPIDLFMVEIMHMRHKFDVDTRLVEGLVLDHGSRHPDMKRRAENCYILTCNVSLEYEKSEINAGFFYSNAEQREKMVAAERRQVDERVKQIIELKNKVCAGGDKNFVVINQKGIDPPSLDLLARAGIIALRRAKRRNMERLVLACGGEAVNSVDELTEDCLGWAGLVYEHVLGEEKYTFVENVKNPRSCTILIKGPNDHTIAQIKDAVRDGLRSVKNTVEDEAVVLGAGAFEVAAKKHLIDNVKKTVKGRAQLGVEAFAEALLVIPKTLAENSGLDTQDVIVSLQNEHDRGLVVGLNHHSGDPIDPQMEGIFDNYSVKRQIINSGPIIASQLLLVDEVIRAGRNMRKPT

SEQ ID NO: 17332 - DNA, 887 bp, Zea mays subsp. mays
  misc_feature (1)..(887): Ceres Seq. ID no. 12367194
  misc_feature (1)..(887): Ortholog of  Ceres SEQ ID NO 13595127 as cited in SEQ ID NO 56655
  misc_feature (1)..(887): Ortholog of  Ceres SEQ ID NO 12586454 as cited in SEQ ID NO 64767
gtacagacagccgccgccgccggcggtggttcacaatcacaagccaccgctactccaccaaaccgcacggaggcggaacccaaattccaacccgactcctccagccaacagcccaagcgaagcgagggcccttgagctcccctcccgcatgacgtccccatggtgcctctcggcaccgcccgccgccccgcccgtggcggctgcgcccggcgccctcggcttctccgcgtctgcctccaccctcgcgcgtgtgccggttcccggaagtaggcggcgcaggtggaacgcgctcgtggtctgcgcggcccccgatgaggagaagattacgaagcggtcgcccctggatttccccatcgaatgggagagaccaaaacctgggaggagacctgatatcttccctaagtttagcccaatgaagacaccattaccgcatccattgccagctgatgatcctctggatgatgatgaagaggaagaggaagaacaagcaccacctcaggaggagccacaagaggacgatccagacaaggaagaacctgaggaagatgacccagataagccaaccgagtaattttcgattggcttgaacagtgatagattaggcaatggggaaaaaatgtgctacgtctttggagcgcgcaagagatctcagttctatttgaactgccggcttatataggctctagatgcataagtttgttatatgacctctgagcttttctaaagctatgaaagttctgtttcacggattacagattacagtgcgatatctgtgatgacatgtattctcactttttctatgttttgagtaagcaacgtgtacattgcaaaacctgtatttggtgtagttgcatcattgatttgtgaaacggatactgagatttttg

SEQ ID NO: 17333 - protein, 189 aa, Zea mays subsp. mays
  peptide (1)..(189): Ceres Seq. ID no. 12367195
YRQPPPPAVVHNHKPPLLHQTARRRNPNSNPTPPANSPSEARALELPSRMTSPWCLSAPPAAPPVAAAPGALGFSASASTLARVPVPGSRRRRWNALVVCAAPDEEKITKRSPLDFPIEWERPKPGRRPDIFPKFSPMKTPLPHPLPADDPLDDDEEEEEEQAPPQEEPQEDDPDKEEPEEDDPDKPTE

SEQ ID NO: 17334 - protein, 140 aa, Zea mays subsp. mays
  peptide (1)..(140): Ceres Seq. ID no. 12367196
MTSPWCLSAPPAAPPVAAAPGALGFSASASTLARVPVPGSRRRRWNALVVCAAPDEEKITKRSPLDFPIEWERPKPGRRPDIFPKFSPMKTPLPHPLPADDPLDDDEEEEEEQAPPQEEPQEDDPDKEEPEEDDPDKPTE

SEQ ID NO: 17335 - DNA, 490 bp, Zea mays subsp. mays
  misc_feature (1)..(490): Ceres Seq. ID no. 13577813
  misc_feature (1)..(490): Ortholog of  Ceres SEQ ID NO 14302243 as cited in SEQ ID NO 64663
acgctctcctctccagtctccaccaacgtcctccccccaccgcaccgcaccgcaccgcaccgccctccccaccccgcgcgtgcgccgccgccgcgagatccggggcgcgatgtggcgcagctgcgtctcgcggggtctctccagggccaaggcctccgcctccaggctcctctccacggcatcgtcgtcctacacggtggtggaccacacctacgacgcggtcgtggtgggggccggcggcgcggggctccgggcggccatcggcctctccgagcacggcttcaacaccgcgtgcatcaccaagctcttccccacgcgctcgcacaccgtcgcagcacaggnaggcataaatgccgcacttggaaacatgagtgaagatgattggaggtggcacatgtatgacactgtgaagggaagcgattggctcggtgaccaggattctattcagtatatgtgcagagaagcacaaaaagctgttatagagcttgag

SEQ ID NO: 17336 - protein, 163 aa, Zea mays subsp. mays
  peptide (1)..(163): Ceres Seq. ID no. 13577814
  misc_feature (114)..(114): Xaa is any aa, unknown or other
RSPLQSPPTSSPHRTAPHRTALPTPRVRRRREIRGAMWRSCVSRGLSRAKASASRLLSTASSSYTVVDHTYDAVVVGAGGAGLRAAIGLSEHGFNTACITKLFPTRSHTVAAQXGINAALGNMSEDDWRWHMYDTVKGSDWLGDQDSIQYMCREAQKAVIELE

SEQ ID NO: 17337 - protein, 127 aa, Zea mays subsp. mays
  peptide (1)..(127): Ceres Seq. ID no. 13577815
  misc_feature (78)..(78): Xaa is any aa, unknown or other
MWRSCVSRGLSRAKASASRLLSTASSSYTVVDHTYDAVVVGAGGAGLRAAIGLSEHGFNTACITKLFPTRSHTVAAQXGINAALGNMSEDDWRWHMYDTVKGSDWLGDQDSIQYMCREAQKAVIELE

SEQ ID NO: 17338 - protein, 124 aa, Zea mays subsp. mays
  peptide (1)..(124): Ceres Seq. ID no. 13577816
  misc_feature (114)..(114): Xaa is any aa, unknown or other
TLSSPVSTNVLPPPHRTAPHRPPHPARAPPPRDPGRDVAQLRLAGSLQGQGLRLQAPLHGIVVLHGGGPHLRRGRGGGRRRGAPGGHRPLRARLQHRVHHQALPHALAHRRSTXRHKCRTWKHE

SEQ ID NO: 17339 - DNA, 1067 bp, Zea mays subsp. mays
  misc_feature (1)..(1067): Ceres Seq. ID no. 14305435
  misc_feature (1)..(1067): Ortholog of  Ceres SEQ ID NO 13597333 as cited in SEQ ID NO 63974
  misc_feature (1)..(1067): Ortholog of  Ceres SEQ ID NO 12407937 as cited in SEQ ID NO 0
aaagatttgatttttttttctcggggaggagccggagtccgagcagcagtggcggctggagggaggagatcctgatctgttgtcgcagcggggaggggaggaccggaggaggaagatggctgcgcaggagcaggagcaggagaagcagcaggcgaagacgagcaccacgagctcgctgccctccagcagcgagcgctcctccagctccgctcgcaacaacctcacggaaggaggggcggagagcgacgaggagatacggcgggtgccggagatgggcggcgcgtcggcgtcggcctcgtcgggcgccggcgcggatgagcgtcccaagggggaggacggcaagcaggggcaggtggcggcgggggcgcagcctccggcgggcgggaagaagcgcgggcgcaccgcgggggacaaggagcagaagctcttgcagtatatgatgctatgaggtatgttaaagttcctattttcactctgtgtgtcggtaatgcatggggagaagctgctttactcttagctgctggcgctaaaggtaaccgtgccgcacttccatcatcgacaataatgataaaacagccaattggtcgctttcaaggtcaggcaacagacgttgacattgcaagaaaagagattcgaaatgtcaagatagaaatggttaagctgctggcaagacacatcggtaaaccaatggaagagattgctcgggacatcaggcgtcctaaatactttagccccagtgaagctgtggattatggcatcatcgacaaggtgatatacaacgagaaaatccaggaagatggcggtgttgtgtcagaactcaaaagatcaaatttgatatagtgttctttttccacaagtagacacgtctttgtatgtttagtggtcattcacgtgcctttgagtattgagtagttaccactcgatcactcattagctggttgtagaggcgtagagcacatagccaatgcattgaacaagcatttccttcccccctctgccgtttcaacgctgtattgcccttacccaacgggcgtgctgaaagatgaattttggtaggttgttgaaac

SEQ ID NO: 17340 - protein, 145 aa, Zea mays subsp. mays
  peptide (1)..(145): Ceres Seq. ID no. 14305436
RFDFFFSGRSRSPSSSGGWREEILICCRSGEGRTGGGRWLRRSRSRRSSRRRRAPRARCPPAASAPPAPLATTSRKEGRRATRRYGGCRRWAARRRRPRRAPARMSVPRGRTASRGRWRRGRSLRRAGRSAGAPRGTRSRSSCSI

SEQ ID NO: 17341 - protein, 131 aa, Zea mays subsp. mays
  peptide (1)..(131): Ceres Seq. ID no. 14305437
MRYVKVPIFTLCVGNAWGEAALLLAAGAKGNRAALPSSTIMIKQPIGRFQGQATDVDIARKEIRNVKIEMVKLLARHIGKPMEEIARDIRRPKYFSPSEAVDYGIIDKVIYNEKIQEDGGVVSELKRSNLI

SEQ ID NO: 17342 - protein, 110 aa, Zea mays subsp. mays
  peptide (1)..(110): Ceres Seq. ID no. 14305438
MAAQEQEQEKQQAKTSTTSSLPSSSERSSSSARNNLTEGGAESDEEIRRVPEMGGASASASSGAGADERPKGEDGKQGQVAAGAQPPAGGKKRGRTAGDKEQKLLQYMML

SEQ ID NO: 17343 - DNA, 2286 bp, Zea mays subsp. mays
  misc_feature (1)..(2286): Ceres Seq. ID no. 12366176
  misc_feature (1)..(2286): Ortholog of  Ceres SEQ ID NO 15175771 as cited in SEQ ID NO 55443
gcacgagaccattacctagaacatcctaatcgaaaaactgccccttccagtctcgccgtcgccggagataggccgccgccgccagccggaacgcaacaccgcagcggttacctgcagcggacggcaggaacctagtcctccactgctctgcctaccctacaatcgggatctcgcgggcttcattaggggggaaaatcgaccagcgagcgagtgcaagaagctcctgttcgatcgatctcgggagctccgatactgcgcgcaatcccaaatttgacacagagtcacagcaatgtcagtgagccatgccgacgagcacgagatatctctgtgcgaccccagctccgaggacgaccggcggcgccggaagatcgggtccctgccgctcaaggccatccacgcgctacggaagaagcgcgcccggcgtcgcgtcactgacttccggttccccgcggccatctccatcgaggacgtccgcgacgccgaggaggagcgcgccgtcgccgccttccgcgaccgtctcgccgcgcaccgcctcctccccgacaagcacgacgactaccacatgatgctgaggtttctgaaagccaggaagtttgattccgacaaggcaatgcaaatgtggtcagagatgctgaggtggaggaaagagtttggtaccgacacaatcttggaggactttgagttcgacgagctcaacgatgtactccactactatcctcagggcctaccatggcgtcgaccgtgaaggccggcccgtgtacattgagaggctcggcaaagttgatccgaacaagctcatgcagatcacctcggtggatcgctacatcaagtaccatgtgcaggagttcgagagggcattcagggagaggttccctgcctgcacactgtcagccaagagacatattgactccactaccaccatactggacgtccatggtgtggggttcaagaatttctcaaagaccgcaagggagcttgtccaacgtatgcagagaatagacagtgactactatcccgagacgctacatcagatgtatgttgtgaatgcaggcagtgggtttaagttgatctggaacagtgttaagggattcctagacccaaaaacttcttccaagatccatgttcttggttccaactaccagagcagacttatcgaagttattgactcaagtgaattgccaaaatttcttggcggatcatgcacatgcagtgagaagggtggttgcctcaggtctaacaggggtccatggaatgaccctgtcattatgaagctaatacacagtatggaaggtggtagtactagagaaataaagcaagtttctgacggggacgaaagaagtggctcttccctaagggcagaaaacctgaagggcatgcttagtgacatatcaaatgctgaatctgagtcggatgttgatgacgttggtttaacagttgtccaaaagagtacggaccacagtttactaaccccagttcatgaagaagtcaaggggtcagatacttcgatattttgtagttctagcagtaagcatctcctagatacaactcctcgatctcctcaggccacccctcaaatggagatgcccattcagttgacttgccgtaaatattttcctacctttgggtggctaaataatttagggaatgcttacattagtttgcatggtacatccgctggaaggactctggaaaaccttgctactggactgatcacgctcttgatcaggatatcatctttcttccacctttccgtctaccggcaagaaagatatctagaaaccgtccaaccctgtgccgcagcacaggaaccagaacctcaaagggaagaggacatgagtgcttgtttacgacgcctcaagaagctcgagtcactgtgtgatcacctcatgagcaaacctccggatatgccgaaggagaaagaacttgtattgatgcagtccttcgatcggataaaatccctcgaggctgaactggaggcgacgaaaaacgcgctgcaggctgcggtggaaaagcagatggaactggtggagacggtagaatctctgcagcaccaaacgtccagcgttaggaggagattttgctgttcataggagtaggattgtcgtcgtcgcgccgaagctgtctgggttagcaaataatgaacctgacgctgcccttggcatacgccaaacctgtcgctggctcgacactgtatgcgcggatgcgtgtaaaatcgatcagttttttttgtagctacactctggcttctgtgatctccagagcctgcaaaatgtcaaagctttcgcc

SEQ ID NO: 17344 - protein, 463 aa, Zea mays subsp. mays
  peptide (1)..(463): Ceres Seq. ID no. 12366177
MYSTTILRAYHGVDREGRPVYIERLGKVDPNKLMQITSVDRYIKYHVQEFERAFRERFPACTLSAKRHIDSTTTILDVHGVGFKNFSKTARELVQRMQRIDSDYYPETLHQMYVVNAGSGFKLIWNSVKGFLDPKTSSKIHVLGSNYQSRLIEVIDSSELPKFLGGSCTCSEKGGCLRSNRGPWNDPVIMKLIHSMEGGSTREIKQVSDGDERSGSSLRAENLKGMLSDISNAESESDVDDVGLTVVQKSTDHSLLTPVHEEVKGSDTSIFCSSSSKHLLDTTPRSPQATPQMEMPIQLTCRKYFPTFGWLNNLGNAYISLHGTSAGRTLENLATGLITLLIRISSFFHLSVYRQERYLETVQPCAAAQEPEPQREEDMSACLRRLKKLESLCDHLMSKPPDMPKEKELVLMQSFDRIKSLEAELEATKNALQAAVEKQMELVETVESLQHQTSSVRRRFCCS

SEQ ID NO: 17345 - protein, 430 aa, Zea mays subsp. mays
  peptide (1)..(430): Ceres Seq. ID no. 12366178
MQITSVDRYIKYHVQEFERAFRERFPACTLSAKRHIDSTTTILDVHGVGFKNFSKTARELVQRMQRIDSDYYPETLHQMYVVNAGSGFKLIWNSVKGFLDPKTSSKIHVLGSNYQSRLIEVIDSSELPKFLGGSCTCSEKGGCLRSNRGPWNDPVIMKLIHSMEGGSTREIKQVSDGDERSGSSLRAENLKGMLSDISNAESESDVDDVGLTVVQKSTDHSLLTPVHEEVKGSDTSIFCSSSSKHLLDTTPRSPQATPQMEMPIQLTCRKYFPTFGWLNNLGNAYISLHGTSAGRTLENLATGLITLLIRISSFFHLSVYRQERYLETVQPCAAAQEPEPQREEDMSACLRRLKKLESLCDHLMSKPPDMPKEKELVLMQSFDRIKSLEAELEATKNALQAAVEKQMELVETVESLQHQTSSVRRRFCCS

SEQ ID NO: 17346 - protein, 367 aa, Zea mays subsp. mays
  peptide (1)..(367): Ceres Seq. ID no. 12366179
MQRIDSDYYPETLHQMYVVNAGSGFKLIWNSVKGFLDPKTSSKIHVLGSNYQSRLIEVIDSSELPKFLGGSCTCSEKGGCLRSNRGPWNDPVIMKLIHSMEGGSTREIKQVSDGDERSGSSLRAENLKGMLSDISNAESESDVDDVGLTVVQKSTDHSLLTPVHEEVKGSDTSIFCSSSSKHLLDTTPRSPQATPQMEMPIQLTCRKYFPTFGWLNNLGNAYISLHGTSAGRTLENLATGLITLLIRISSFFHLSVYRQERYLETVQPCAAAQEPEPQREEDMSACLRRLKKLESLCDHLMSKPPDMPKEKELVLMQSFDRIKSLEAELEATKNALQAAVEKQMELVETVESLQHQTSSVRRRFCCS

SEQ ID NO: 17347 - DNA, 1296 bp, Zea mays subsp. mays
  misc_feature (1)..(1296): Ceres Seq. ID no. 12366185
  misc_feature (1)..(1296): Ortholog of  Ceres SEQ ID NO 15177758 as cited in SEQ ID NO 57504
  misc_feature (1)..(1296): Ortholog of  Ceres SEQ ID NO 13624040 as cited in SEQ ID NO 0
aacgacgagcagtgcaagccaagcattctcacgctagctgttctcttcttgcgcctcatccatcttgcatctatattctcggcgcgagttacgttttcgtcgtccggccggccggcgagcattttgcttctgcgatcgatcggcgcgacgtgtgcacggccatggagatgatcgacgcagagctgcgtctgggtccgcccggcagcaccaacagagacgtcatcaacgtcgtgcagccggcgttggcggcggcgaaacggccgtcgtcgtcggtggtggagagcgaggcgtccgggacggacgaccatgacgacgctgcaccgacctccaaggtgcaggtggtggggtggccgccggtgagagtgtaccggaagaacgcgttccacgcggcggcggaggcgaggaggaccaggcggggcgagcagcaaggaggaggaggcctgtacgtgaaggtgagcatggacggggcgccatacctccggaaggtggacctgcggacctacggcggctaccgtgagctgagggacgcactggacgcgctcttcggctgcttctcctcctcggccgacggcggatgccagttcgccgtcgcctacgaggacaaggacggcgacctcatgctcgccggcgacgtgccatgggagatgttcatctgttcttgcaagaagctgaggatcatgagggggtccgaaacaagataaccaagcaacgaggatgcaagaaccctgttggatgcatatgcatggagaggccggccggactcatggtgtcatgcacgagagagaagaagaagaagacgacgacctgctggaactgaaggcggttgggtatacctgcatgcatggggagggagcccacgcatgcacgcgcgcgtcgtcgtgttctagccaccagaccggccgccggcccatatgctcaccacggagatggaggtgatggttcaaggatcacggcggcgtacgcgtcatcagtcacgccgtcgtcctgtcatcagatgagagatggaggggtgatgcatgagggcagtgctgtcgacggctggctggacgtgcagatcggagcgagattgtactgtgcacgcacatgagctttgtaattcattctaggggtgcagccgcacccacgtagaaataaataagaataccgccgtggttagagccaaattttttgccatttatattgttagcgtctcgtcagcgcagagaggagaagagaagaatcgggatgcgtggagaagaagaatagtgtagcgacgaggggaaatgtgtaatgtaagtatatgttcttttgatgcct

SEQ ID NO: 17348 - protein, 232 aa, Zea mays subsp. mays
  peptide (1)..(232): Ceres Seq. ID no. 12366186
RRAVQAKHSHASCSLLAPHPSCIYILGASYVFVVRPAGEHFASAIDRRDVCTAMEMIDAELRLGPPGSTNRDVINVVQPALAAAKRPSSSVVESEASGTDDHDDAAPTSKVQVVGWPPVRVYRKNAFHAAAEARRTRRGEQQGGGGLYVKVSMDGAPYLRKVDLRTYGGYRELRDALDALFGCFSSSADGGCQFAVAYEDKDGDLMLAGDVPWEMFICSCKKLRIMRGSETR

SEQ ID NO: 17349 - protein, 179 aa, Zea mays subsp. mays
  peptide (1)..(179): Ceres Seq. ID no. 12366187
MEMIDAELRLGPPGSTNRDVINVVQPALAAAKRPSSSVVESEASGTDDHDDAAPTSKVQVVGWPPVRVYRKNAFHAAAEARRTRRGEQQGGGGLYVKVSMDGAPYLRKVDLRTYGGYRELRDALDALFGCFSSSADGGCQFAVAYEDKDGDLMLAGDVPWEMFICSCKKLRIMRGSETR

SEQ ID NO: 17350 - protein, 177 aa, Zea mays subsp. mays
  peptide (1)..(177): Ceres Seq. ID no. 12366188
MIDAELRLGPPGSTNRDVINVVQPALAAAKRPSSSVVESEASGTDDHDDAAPTSKVQVVGWPPVRVYRKNAFHAAAEARRTRRGEQQGGGGLYVKVSMDGAPYLRKVDLRTYGGYRELRDALDALFGCFSSSADGGCQFAVAYEDKDGDLMLAGDVPWEMFICSCKKLRIMRGSETR

SEQ ID NO: 17351 - DNA, 1198 bp, Zea mays subsp. mays
  misc_feature (1)..(1198): Ceres Seq. ID no. 12435386
  misc_feature (1)..(1198): Ortholog of  Ceres SEQ ID NO 13595411 as cited in SEQ ID NO 56528
  misc_feature (1)..(1198): Ortholog of  Ceres SEQ ID NO 12598859 as cited in SEQ ID NO 62872
  misc_feature (1)..(1198): Ortholog of  Ceres SEQ ID NO 12617350 as cited in SEQ ID NO 63777
  misc_feature (1)..(1198): Ortholog of  Ceres SEQ ID NO 13598749 as cited in SEQ ID NO 64341
  misc_feature (1)..(1198): Ortholog of  Ceres SEQ ID NO 13656096 as cited in SEQ ID NO 65511
  misc_feature (1)..(1198): Ortholog of  Ceres SEQ ID NO 15176153 as cited in SEQ ID NO 0
  misc_feature (1)..(1198): Ortholog of  Ceres SEQ ID NO 15179157 as cited in SEQ ID NO 0
gtgttccacttgctagtccactcccctctcagtcgaggcaatggccttcgcttccagtagcttccgcctcgctctgttcttggttctgctggcgtttgtcagcttggcacggcacgccacgggggaggccagcccgagcaggaggctcatggagctgtacaagccaccgcccagcgatctcctaaggtaccacgacggcgccgtgctgagcggcgacatccccgtctccgtcctctggtacggccgcttcacgcccgcgcagaaggccatcgtcaccgacttcctcctctccctctccgccgcgccgacgtcccctgcgccttccgtctcccagtggtggggcaccatcgaccggctctacctatcgaaggcggcggacgcggccgccgtcgggaagagcggcgcgcacggcggcggtggtggcaggaaaggcgctcgggtggtcctggccggccaggtctccgacgaagggtgctcgctggggaagagcctgacgctcgcccagctcccggcgctggcggccgcggcgcgccccgcgaagggcggcctcgcgctgctgctcacggcgcaggacgtgctggtggagggcttctgcatgagccggtgcggccaccacgggtcgtacggcgcgcggccccgcgtggcggcggcggcgtacgcgtgggtcgggaacccgggcacgcagtgccccggccagtgcgcgtggncgttccaccagccgccgtacgggccgcaggcgccgccgctggtgccgccgaacggggacgcgggcatggacggcgccatgatcagcgtggccagcatggtggccggcgcggtcaccaaccccttcggagacgggttctaccagggcgaccgcgccgcgccgcttgaggccgccacggcgtgcgcgggcgtctacggcaacggcgcgtaccccggctacgccggccagctgctcgtggacgcggccacgggtgccagctacaacgccaacggggcgcgcgggaggaagtacctgctccccgcgctgtacgatcccgacacggctgcctgcaccaccttggtttgagcaaacgcgcggcgccgtgttttggcatctgtcaccgtaggtgggcggggatacagtgaagtgataatgcgcttgtgttaggcgcatgtatatatataataattagatggatacccgtgcgttacaatataaacatataataccatg

SEQ ID NO: 17352 - protein, 336 aa, Zea mays subsp. mays
  peptide (1)..(336): Ceres Seq. ID no. 12435387
  misc_feature (223)..(223): Xaa is any aa, unknown or other
MAFASSSFRLALFLVLLAFVSLARHATGEASPSRRLMELYKPPPSDLLRYHDGAVLSGDIPVSVLWYGRFTPAQKAIVTDFLLSLSAAPTSPAPSVSQWWGTIDRLYLSKAADAAAVGKSGAHGGGGGRKGARVVLAGQVSDEGCSLGKSLTLAQLPALAAAARPAKGGLALLLTAQDVLVEGFCMSRCGHHGSYGARPRVAAAAYAWVGNPGTQCPGQCAWXFHQPPYGPQAPPLVPPNGDAGMDGAMISVASMVAGAVTNPFGDGFYQGDRAAPLEAATACAGVYGNGAYPGYAGQLLVDAATGASYNANGARGRKYLLPALYDPDTAACTTLV

SEQ ID NO: 17353 - protein, 300 aa, Zea mays subsp. mays
  peptide (1)..(300): Ceres Seq. ID no. 12435388
  misc_feature (187)..(187): Xaa is any aa, unknown or other
MELYKPPPSDLLRYHDGAVLSGDIPVSVLWYGRFTPAQKAIVTDFLLSLSAAPTSPAPSVSQWWGTIDRLYLSKAADAAAVGKSGAHGGGGGRKGARVVLAGQVSDEGCSLGKSLTLAQLPALAAAARPAKGGLALLLTAQDVLVEGFCMSRCGHHGSYGARPRVAAAAYAWVGNPGTQCPGQCAWXFHQPPYGPQAPPLVPPNGDAGMDGAMISVASMVAGAVTNPFGDGFYQGDRAAPLEAATACAGVYGNGAYPGYAGQLLVDAATGASYNANGARGRKYLLPALYDPDTAACTTLV

SEQ ID NO: 17354 - DNA, 457 bp, Zea mays subsp. mays
  misc_feature (1)..(457): Ceres Seq. ID no. 1673321
  misc_feature (1)..(457): Ortholog of  Ceres SEQ ID NO 15179752 as cited in SEQ ID NO 63074
gtacgctctgccgcgccaagctccgcctccatccgcgcggatctgagtttgtgctgtctggctctctgcgcagatgtcggctgcagaggcgaaggcggcggcggtcccggagtctgtgctgcggaagcgcaagcgggaggagcaatgggcagcggacaagaaggagaaggcgctcgcggacaggaagaaggcgctcgagagccgcaagatcatcttcgcccgcgccaagcagtacgccgaggagtaccacgcccaggagaaggagcttgtgcagctcaagcgtgaggcccggttgaagggtgggttctatgtgagcccagaggccaagcttctgtttgtggttcgcatccgtggtatcaatgccatgcaccccaagacccgcaagatcttgcagctcctgcgattgaggcagatcttcaacggtgtcttcctcaaggttaacaaggcaaccattaac

SEQ ID NO: 17355 - protein, 94 aa, Zea mays subsp. mays
  peptide (1)..(94): Ceres Seq. ID no. 1673322
VRSAAPSSASIRADLSLCCLALCADVGCRGEGGGGPGVCAAEAQAGGAMGSGQEGEGARGQEEGAREPQDHLRPRQAVRRGVPRPGEGACAAQA

SEQ ID NO: 17356 - protein, 97 aa, Zea mays subsp. mays
  peptide (1)..(97): Ceres Seq. ID no. 1673323
TLCRAKLRLHPRGSEFVLSGSLRRCRLQRRRRRRSRSLCCGSASGRSNGQRTRRRRRSRTGRRRSRAARSSSPAPSSTPRSTTPRRRSLCSSSVRPG

SEQ ID NO: 17357 - protein, 128 aa, Zea mays subsp. mays
  peptide (1)..(128): Ceres Seq. ID no. 1673324
MSAAEAKAAAVPESVLRKRKREEQWAADKKEKALADRKKALESRKIIFARAKQYAEEYHAQEKELVQLKREARLKGGFYVSPEAKLLFVVRIRGINAMHPKTRKILQLLRLRQIFNGVFLKVNKATIN

SEQ ID NO: 17358 - DNA, 1080 bp, Zea mays subsp. mays
  misc_feature (1)..(1080): Ceres Seq. ID no. 12417528
  misc_feature (1)..(1080): Ortholog of  Ceres SEQ ID NO 13583408 as cited in SEQ ID NO 62616
  misc_feature (1)..(1080): Ortholog of  Ceres SEQ ID NO 15179752 as cited in SEQ ID NO 63074
gattttgaaaccctcgcctccctcttcctttccggccgccgcctgccgccggaaggagaaaaaatgggtgccggtggggaggaagcgccgcggataatcgtgcctatggcggtggagggtaccccgaatcagctggcgtttgtagaggagtcgaagctgcagaagcgcaaggagaacgtggactgggccgtgaggaaccgggagcgcagggcggccaagcgccagcgcatccgcgacaagcacaaggtcgccgtcaggcggcccgaggagttcgtcaccgcgttccgtaacaaggagcgcgacttcctgcggatgaggacccgcatcaaggtccgcagccagccgcccgtcgaggcgctcggctccaggctcgtcttcgcgattcgcatccctggctccgtggacttgcacccgcacatcaggaaggttttgaggaaactacgactgacgaaggtcctcactggggtgttcctcagggccaccgagttgacgctgaagaggctgcttgtggtcgaaccctttgtcacatacgggtttccgaacttaaagagtgtgaaagagcttatctacaagaagggccgcgggttctttgacatggaacctttccctcttaccagcaacgatctaattgagaaggctcttggagatcatggcatcatatgcttggaagaccttgtgtacgagatcgccactgtaggcccgcacttccgagaagcatctaggttcctcatgcccttccagctcaagtgtccggagaggaggctgcagatgaagaggaaaccgtacagggatggtggcgactcaggcaaccggggcgacaaagtcaacgaactaattgaaaaattgaattaaagcagagttgttcgcttcggactaatctatagagacaaaaatactgtataagtagtagaaactggtacggattaaaaccaagcgaacagacttgtctctctctagttgtgattttgtggtggagtgatggatctgttactttgtcagttttgtaatagcatagctggatgtaatctcgaggtgctgtttggtttacgaaatataatgctaacgataatgattcacacc

SEQ ID NO: 17359 - protein, 283 aa, Zea mays subsp. mays
  peptide (1)..(283): Ceres Seq. ID no. 12417529
DFETLASLFLSGRRLPPEGEKMGAGGEEAPRIIVPMAVEGTPNQLAFVEESKLQKRKENVDWAVRNRERRAAKRQRIRDKHKVAVRRPEEFVTAFRNKERDFLRMRTRIKVRSQPPVEALGSRLVFAIRIPGSVDLHPHIRKVLRKLRLTKVLTGVFLRATELTLKRLLVVEPFVTYGFPNLKSVKELIYKKGRGFFDMEPFPLTSNDLIEKALGDHGIICLEDLVYEIATVGPHFREASRFLMPFQLKCPERRLQMKRKPYRDGGDSGNRGDKVNELIEKLN

SEQ ID NO: 17360 - protein, 262 aa, Zea mays subsp. mays
  peptide (1)..(262): Ceres Seq. ID no. 12417530
MGAGGEEAPRIIVPMAVEGTPNQLAFVEESKLQKRKENVDWAVRNRERRAAKRQRIRDKHKVAVRRPEEFVTAFRNKERDFLRMRTRIKVRSQPPVEALGSRLVFAIRIPGSVDLHPHIRKVLRKLRLTKVLTGVFLRATELTLKRLLVVEPFVTYGFPNLKSVKELIYKKGRGFFDMEPFPLTSNDLIEKALGDHGIICLEDLVYEIATVGPHFREASRFLMPFQLKCPERRLQMKRKPYRDGGDSGNRGDKVNELIEKLN

SEQ ID NO: 17361 - protein, 248 aa, Zea mays subsp. mays
  peptide (1)..(248): Ceres Seq. ID no. 12417531
MAVEGTPNQLAFVEESKLQKRKENVDWAVRNRERRAAKRQRIRDKHKVAVRRPEEFVTAFRNKERDFLRMRTRIKVRSQPPVEALGSRLVFAIRIPGSVDLHPHIRKVLRKLRLTKVLTGVFLRATELTLKRLLVVEPFVTYGFPNLKSVKELIYKKGRGFFDMEPFPLTSNDLIEKALGDHGIICLEDLVYEIATVGPHFREASRFLMPFQLKCPERRLQMKRKPYRDGGDSGNRGDKVNELIEKLN

SEQ ID NO: 17362 - DNA, 2740 bp, Zea mays subsp. mays
  misc_feature (1)..(2740): Ceres Seq. ID no. 12362470
  misc_feature (1)..(2740): Ortholog of  Ceres SEQ ID NO 15225015 as cited in SEQ ID NO 0
gcacgagaccattacctagaacatcctaatcgaaaaacactcctgaagtgcggaaatccaaagtgtgttgcgttgcctgcccgccgccaaaacccataaaccctaccctctacagcgcctccgtcgctcgctcccggcggcgatggggggtgggccgcgcacgttcccgggcgggctgtctaagtggcagtacaaacgcatgcacgagaagctggcgcggcagaagcagcgggggctcctccgccacgagaagcagctctacctagcccgcctccgctccgagatccgcgcctcccgcctccctggcgccgccgcggaagctccaccggggggcgaggggcccacctcgtcgcgcgcccacatccgcgcccttgccgaccgcttccgcaggcccggcgccgaggacctctggaacgaggacgacgggcccctccgccgcgtcaagcggccgcccactgggatcgcgtcgggtgtccggcaccagcagcagcagttggactcggggaagccccgcggaggaccgagttgggaggacctgacctctctggatcaaccgaggcctttagacaggggaaaagggccgacctcggccgcgttcaatccgagaagagagtacctaacggtggtggcgccctggtgcccgcgttgggatccgcgacctctcggtttcgttgctcccaaaaagtcttatccggtgatgactcgttgctccgtgagttgccagccatgtgtcgacctgaggccattggttgctagtgggcttactgaggatgggaatggaaggaaggacacgccattggcacagtttaatcaggagaggttctactcggtggctgcgaggcgattcggcaggaaatggagaccagattcgtcggaccaggatgacaagggcacgtctgcgcccaagaagaatctgaggttcggaaaaaagtttggggcttcgagcgaagaggattcagaaattgacgagtctggggacacaggtgccatcaggaggaggtggagcagtgctgctctcaggaactgcgatgtgaagaaggaaaggcgggtgctcaagtcttacgaggaggaaagcaatgatctcgcgggtagaatccaagagctgcgagaggagattagaaatagggaggttttgggcactgagaggaggcgttacgagtccaggggtgaatctctgcttaccagtaaaagatttgatcagtgtggtgtctccgcgctgacagtcaaagcacttactgatgctggatatgtacagacaactgtggttcaagaggcagctcttcctatatgtcttgaaggtaaagatgttcttgtcaaggccaaaactggaaccggcaaaagtgcagcttttctgcttcctgcaattgaatcagtcttgaatgctatgaagagcaatacaaatcagcgagtatctccaatatttgctcttgtcctatgccctacaagagagcttgctattcagcttacagctgaagcaaatgtcttgttaaagtaccatgaaggaattggtgttcaatctcttattggtggcactagattcaagccgatcagagacgattagaatctgatccatgccagattttagttgcaacacctggtagactgctggatcacattgaaaacaaatcatcattctctgttcgtttgatgagattgaaattgcttgtgttggatgaagctgatcatttgctagatctgggtttccgtaaagacatagaaaagattgtcgataccttgccacgtcaaagacaaacattgctcttctcagctactattccaaaagaggttcgaagagtttcacagctagtattaaagagggatcacgttttttgttgacacagtgggccttggagctgttgaaaccccaactaaggttcagcagtcatgtcttgtggtgccacatgagctgcattttcatacggttcatcacctgcttcgagagcatattgatcgtgaagttgattacaaggttattgttttctgcacgacagccatggtgactgagtttatgtatatcatgcttcgagatttgaagttaaatgtcagggaaattcactcgaggaaacctcagctctatagaactcgcatatctgaagagttccggggctctaaccgcatagttctcgtaacgtcagatgtttctactcgtggggtgaactatccagatgtcacccttgtgattcaggttggtgttcctcccgatagagagcattacatccatcggcttggaaggactgcaagggaaggtaaatctggcaagggaattcttttgcttgcgccatgggaacaatacttcttggacgagataggcgatctcccgattgacaagtatccagcaccagacgttgaccaggagatgaagcaaaaggttgacgattcaatagagatggttgacatgagcatcaaagaagcagcataccatgcgtggctgggttactacaactccatcgctgacataggtagagataaaagaatggttgttgacctagcaaatcgatttggtgcctcgattggcctggagaagcctccagcgatataccggaagaccgctctgaagatggggctcaaagatgtccctgggattcgaataaggaaatgacatgttcctccacagcaataagggaccttttagcctcgacattggattggaggacatgtaattgaattgggttcaaaatatacaaaattactcacctctgttgcaatgacctaactccttaaatgcatcttcgatttcttc

SEQ ID NO: 17363 - protein, 472 aa, Zea mays subsp. mays
  peptide (1)..(472): Ceres Seq. ID no. 12362471
MGGGPRTFPGGLSKWQYKRMHEKLARQKQRGLLRHEKQLYLARLRSEIRASRLPGAAAEAPPGGEGPTSSRAHIRALADRFRRPGAEDLWNEDDGPLRRVKRPPTGIASGVRHQQQQLDSGKPRGGPSWEDLTSLDQPRPLDRGKGPTSAAFNPRREYLTVVAPWCPRWDPRPLGFVAPKKSYPVMTRCSVSCQPCVDLRPLVASGLTEDGNGRKDTPLAQFNQERFYSVAARRFGRKWRPDSSDQDDKGTSAPKKNLRFGKKFGASSEEDSEIDESGDTGAIRRRWSSAALRNCDVKKERRVLKSYEEESNDLAGRIQELREEIRNREVLGTERRRYESRGESLLTSKRFDQCGVSALTVKALTDAGYVQTTVVQEAALPICLEGKDVLVKAKTGTGKSAAFLLPAIESVLNAMKSNTNQRVSPIFALVLCPTRELAIQLTAEANVLLKYHEGIGVQSLIGGTRFKPIRDD

SEQ ID NO: 17364 - protein, 453 aa, Zea mays subsp. mays
  peptide (1)..(453): Ceres Seq. ID no. 12362472
MHEKLARQKQRGLLRHEKQLYLARLRSEIRASRLPGAAAEAPPGGEGPTSSRAHIRALADRFRRPGAEDLWNEDDGPLRRVKRPPTGIASGVRHQQQQLDSGKPRGGPSWEDLTSLDQPRPLDRGKGPTSAAFNPRREYLTVVAPWCPRWDPRPLGFVAPKKSYPVMTRCSVSCQPCVDLRPLVASGLTEDGNGRKDTPLAQFNQERFYSVAARRFGRKWRPDSSDQDDKGTSAPKKNLRFGKKFGASSEEDSEIDESGDTGAIRRRWSSAALRNCDVKKERRVLKSYEEESNDLAGRIQELREEIRNREVLGTERRRYESRGESLLTSKRFDQCGVSALTVKALTDAGYVQTTVVQEAALPICLEGKDVLVKAKTGTGKSAAFLLPAIESVLNAMKSNTNQRVSPIFALVLCPTRELAIQLTAEANVLLKYHEGIGVQSLIGGTRFKPIRDD

SEQ ID NO: 17365 - protein, 287 aa, Zea mays subsp. mays
  peptide (1)..(287): Ceres Seq. ID no. 12362473
MTRCSVSCQPCVDLRPLVASGLTEDGNGRKDTPLAQFNQERFYSVAARRFGRKWRPDSSDQDDKGTSAPKKNLRFGKKFGASSEEDSEIDESGDTGAIRRRWSSAALRNCDVKKERRVLKSYEEESNDLAGRIQELREEIRNREVLGTERRRYESRGESLLTSKRFDQCGVSALTVKALTDAGYVQTTVVQEAALPICLEGKDVLVKAKTGTGKSAAFLLPAIESVLNAMKSNTNQRVSPIFALVLCPTRELAIQLTAEANVLLKYHEGIGVQSLIGGTRFKPIRDD

SEQ ID NO: 17366 - DNA, 2275 bp, Zea mays subsp. mays; identical to SEQ ID NO: 17180
  misc_feature (1)..(2275): Ceres Seq. ID no. 13495441
  misc_feature (1)..(2275): Ortholog of  Ceres SEQ ID NO 15171212 as cited in SEQ ID NO 56899
  misc_feature (1)..(2275): Ortholog of  Ceres SEQ ID NO 12613725 as cited in SEQ ID NO 68196
  misc_feature (1)..(2275): Ortholog of  Ceres SEQ ID NO 14301486 as cited in SEQ ID NO 69222

SEQ ID NO: 17367 - protein, 574 aa, Zea mays subsp. mays; identical to SEQ ID NO: 17181
  peptide (1)..(574): Ceres Seq. ID no. 13495442

SEQ ID NO: 17368 - protein, 523 aa, Zea mays subsp. mays; identical to SEQ ID NO: 17182
  peptide (1)..(523): Ceres Seq. ID no. 13495443

SEQ ID NO: 17369 - protein, 457 aa, Zea mays subsp. mays; identical to SEQ ID NO: 17183
  peptide (1)..(457): Ceres Seq. ID no. 13495444

SEQ ID NO: 17370 - DNA, 919 bp, Zea mays subsp. mays
  misc_feature (1)..(919): Ceres Seq. ID no. 12435382
  misc_feature (1)..(919): Ortholog of  Ceres SEQ ID NO 14311859 as cited in SEQ ID NO 51658
  misc_feature (1)..(919): Ortholog of  Ceres SEQ ID NO 13638685 as cited in SEQ ID NO 51871
  misc_feature (1)..(919): Ortholog of  Ceres SEQ ID NO 13599200 as cited in SEQ ID NO 0
ctcttcgtctgcagtctgctcgctcgcgattgcgattcccactcagccctccaggctcgaaacctaacccacccgcccggggatcccaagcggcggcggcggcggccatggagccctcccccgtcggcgacggtggctcggcggagcggtggcgcgcggaggcgtcgcgggcgttccagcactacctggaccgcgcggcgccgcacacggcggggcggtgggcgggcacgctcgtggccgcggcggtgtacgcgcttcgggtctactacgtgcgcggcttctacgtcgtcacctacgggctgggcatctacctgctcaacctcctcatcggcttcctctcccccatggtcgacccggagctcgaggcgctcgaggccgggcccgggctccccacccgcggntccgaagagttcaagcccttcgtccgccgcctccccgagttcaagttctggtatgccataacaaaagccttttgcattgctttcgtcatgaccttcttctctgtattcgatgttcctgtcttctggccaatacttctctgttactggattgtgctctttgtcctgacaatgaagcgacaaattatgcatatggncaagtacaantatgtcccattcagctttggaaagcagaggtatngcggaaagaaacgccctggagccagtgcatnaaaagagtaaagaccggagggtcttgtacctcaaagagcaaatgcctgtgttatctgtgaggcattttgctggcatcatggtattttgagtaccagctactgatagtgaatgcacaccatattcactagtggagtctgcagagaagctaaccagacttttgcattggttaatgattcctgtttcacaagtcggtagtttatgtacaatgacatggaacatagctagtaaatcagattctcagttcctct

SEQ ID NO: 17371 - protein, 225 aa, Zea mays subsp. mays
  peptide (1)..(225): Ceres Seq. ID no. 12435383
  misc_feature (133)..(133): Xaa is any aa, unknown or other
  misc_feature (198)..(198): Xaa is any aa, unknown or other
  misc_feature (201)..(201): Xaa is any aa, unknown or other
  misc_feature (213)..(213): Xaa is any aa, unknown or other
  misc_feature (223)..(223): Xaa is any aa, unknown or other
LRLQSARSRLRFPLSPPGSKPNPPARGSQAAAAAAMEPSPVGDGGSAERWRAEASRAFQHYLDRAAPHTAGRWAGTLVAAAVYALRVYYVRGFYVVTYGLGIYLLNLLIGFLSPMVDPELEALEAGPGLPTRXSEEFKPFVRRLPEFKFWYAITKAFCIAFVMTFFSVFDVPVFWPILLCYWIVLFVLTMKRQIMHMXKYXYVPFSFGKQRYXGKKRPGASAXKE

SEQ ID NO: 17372 - protein, 190 aa, Zea mays subsp. mays
  peptide (1)..(190): Ceres Seq. ID no. 12435384
  misc_feature (98)..(98): Xaa is any aa, unknown or other
  misc_feature (163)..(163): Xaa is any aa, unknown or other
  misc_feature (166)..(166): Xaa is any aa, unknown or other
  misc_feature (178)..(178): Xaa is any aa, unknown or other
  misc_feature (188)..(188): Xaa is any aa, unknown or other
MEPSPVGDGGSAERWRAEASRAFQHYLDRAAPHTAGRWAGTLVAAAVYALRVYYVRGFYVVTYGLGIYLLNLLIGFLSPMVDPELEALEAGPGLPTRXSEEFKPFVRRLPEFKFWYAITKAFCIAFVMTFFSVFDVPVFWPILLCYWIVLFVLTMKRQIMHMXKYXYVPFSFGKQRYXGKKRPGASAXKE

SEQ ID NO: 17373 - protein, 153 aa, Zea mays subsp. mays
  peptide (1)..(153): Ceres Seq. ID no. 12435385
  misc_feature (134)..(134): Xaa is any aa, unknown or other
LFVCSLLARDCDSHSALQARNLTHPPGDPKRRRRRPWSPPPSATVARRSGGARRRRGRSSTTWTARRRTRRGGGRARSWPRRCTRFGSTTCAASTSSPTGWASTCSTSSSASSPPWSTRSSRRSRPGPGSPPAXPKSSSPSSAASPSSSSGMP

SEQ ID NO: 17374 - DNA, 1347 bp, Zea mays subsp. mays
  misc_feature (1)..(1347): Ceres Seq. ID no. 12368098
  misc_feature (1)..(1347): Ortholog of  Ceres SEQ ID NO 12336358 as cited in SEQ ID NO 20733
  misc_feature (1)..(1347): Ortholog of  Ceres SEQ ID NO 12623467 as cited in SEQ ID NO 60951
aaacacaaatggcgtattggcgttccacagaacaatggcacggtgtctatgggtaggcaagaacgcagccgctagcggcgctggcgcggccattcccaaacctccggctccccatcccccggcaccgcgatctctgccggccgtggacgactgcccgactctcgcattcctgcggccgaagccgaccgcggtcgggtacgccaccgcgaccgtcccgctcccggcgcactgcttccccgccctccccgtcggcgaccacctcttccaccgcctccagctcgacgggcttatacctcccgtgagcacggcgacgcggccgccggagcatgcgggcgtgacggtggagcaggcgaggaaggtggcgagggcggccgagatggaggtggcgagggcgaggctgaggtcgaacgcccagagcgtcgtgtccgggtcggaattcgccgcgctctgcgtcgacattgccggcggcgtcgagggaggccagccggctggtccgtgcgctggacgagtccggcgtcgtcatcgtcctcggcgacgccgtcttcctccgccccgacatgaaatcgggatcttgcgacgataaatcggagcgaacggcgatactggaacaaacggaaagagagagagcaaaggaaagaaaaaaagaaacagcggcggcggcacgagtcgagggccgccagaacctaggcatgcgccgccgacagcaaggtagcgaaggccatcgggagcatcctccccgggaaacagcagctgcaggcgccgcgagccggagacgggagcgaggcgcgcaagcgcgagctggaggctatggaagctcagaaggcggcgatcgacgcggacgcggccgcgcaggtgcggcgcgagctgtggtgcgggctgggcctgctggcgacgcagacgctggggttcatgcggctcaccttctgggagctgtcgtgggacgtgatggagccggtgtgcttctacgccacgtcgctctacttcatgtccggctacgccttcttcatgcgcacggccacggagccgtccttcgagggcttctaccggagccgcttcgcgtccaagcagcgccgcctcatgcgggcgcgcgggttcgacgtcgaccgctacaacgccctgcggaagggccaggggcaggggctcgttcccctcgccgaccccgacgcgtgtaggcacgtcagccatgtacaatagcgcgtcgctccgcccggacgaggtcgcttgggataaacgtgcgtcgcatcgtcggctcaccgtctaatcgtgaagcaatagctctctgtacagattcaggaggacgagccattgtagaagaaggctcgtcagaacggaaactatatctatact

SEQ ID NO: 17375 - protein, 204 aa, Zea mays subsp. mays
  peptide (1)..(204): Ceres Seq. ID no. 12368099
MKSGSCDDKSERTAILEQTERERAKERKKETAAAARVEGRQNLGMRRRQQGSEGHREHPPRETAAAGAASRRRERGAQARAGGYGSSEGGDRRGRGRAGAARAVVRAGPAGDADAGVHAAHLLGAVVGRDGAGVLLRHVALLHVRLRLLHAHGHGAVLRGLLPEPLRVQAAPPHAGARVRRRPLQRPAEGPGAGARSPRRPRRV

SEQ ID NO: 17376 - protein, 193 aa, Zea mays subsp. mays
  peptide (1)..(193): Ceres Seq. ID no. 12368100
NTNGVLAFHRTMARCLWVGKNAAASGAGAAIPKPPAPHPPAPRSLPAVDDCPTLAFLRPKPTAVGYATATVPLPAHCFPALPVGDHLFHRLQLDGLIPPVSTATRPPEHAGVTVEQARKVARAAEMEVARARLRSNAQSVVSGSEFAALCVDIAGGVEGGQPAGPCAGRVRRRHRPRRRRLPPPRHEIGILRR

SEQ ID NO: 17377 - protein, 182 aa, Zea mays subsp. mays
  peptide (1)..(182): Ceres Seq. ID no. 12368101
MARCLWVGKNAAASGAGAAIPKPPAPHPPAPRSLPAVDDCPTLAFLRPKPTAVGYATATVPLPAHCFPALPVGDHLFHRLQLDGLIPPVSTATRPPEHAGVTVEQARKVARAAEMEVARARLRSNAQSVVSGSEFAALCVDIAGGVEGGQPAGPCAGRVRRRHRPRRRRLPPPRHEIGILRR

SEQ ID NO: 17378 - DNA, 2068 bp, Zea mays subsp. mays
  misc_feature (1)..(2068): Ceres Seq. ID no. 12360559
  misc_feature (1)..(2068): Ortholog of  Ceres SEQ ID NO 15176298 as cited in SEQ ID NO 58961
gaaccaagcggcgatcgatcgaaacgaggcgtcgcgtggctgccggagatgtcgcagaagaggcagccggaggagggcgacgtcccgcggcgcgccgccgatgccggcggcggcggcggaggaggagacgagcccggtgggagctcgtcgcgctcctctctgccccagcgccacggcgagccgaagcgacagaggatcgcccttcgcgatgtgatcacggaggtgatgcggaacaccagcatcgagaagtttctaatcgcgctcgagcccctcatcaggagagtggtaaaagaagaaattgagtcggcttttgcaaaccatgcctctatgatggcaaggagtgtcacagacagtgttccatctgtgtcaaagaatttgcagctgcagttcatgaccagactttctcttccaatatttactggatccaagattgaaggagagggctcccttgagtataactattgctctagtcgacgctttgacaagacaaattgtagcaccaggcaaagagttccagataaaggttgagattgtagttctggagggggattttgaaagtggagaagatgatgactggacagctcaggagtttaacaataacattgttaaagaaagagaaggcaaaaggcccttgatttctggggatgcatccattgccctcgtcgatggcattggaacagtaggggaactttcattcacagataactccagctggacacggagccgaaagttcaggctaggagcaagaacagaggatggttctttcaatggtgtaagagtacgggaagcaaaaactgaatcatttgtggttaaggatcatcgaggagaattgtacaagaagcaccacccaccatttcttgaagatgaagtctggcgcctagagaaaattggcaaggaaggtgcttttcacaagcgtttgaatagggagaacatttgcactgtcaaagattttctcaccttgttaaatcttgatgcttctaggcttcgaaagatattaggtagtggcatgtcaacaaagatgtgggaggccactgtggaacatgcaaaaacatgtgttctaactgacaaagtgcatcactactatcctgatggtctaaacaaagctggtgttgtattcaatgtagttggagaagtaagagggttaatatctgataaatatgtttttgttgatgactttactgaaaaggagaaggccgaagcacgtgcagcagtgaagcaagcatatgaacactggaaggatgtccatacttgtgacaatgaaacgcttgtggaaaacccttcacatccattcaatttgggatctccatctttgcatgaaaatcagtataaccagttgcctacacaagtttctactgatggttttagtttgagcaattcggccatactgtcacccaacattttctcaatggagccatcgagtgctttagacccttgtagtatattggagactgaagaaagcagtgctaatcaatttcagtcggtgttgcccccagttgggggccatgaagtgcctcgagaacctcagacgctggataagttctccaactcgttggtatatgatgactgcagcgcccatccctcattcagtgaaagctattacagcagtgtagatcccagcatgtccttcgacacacaagatcttggagctgcactgaaaggcttcattgcaaccatatcgaagcctaaggcggcatatagaggatggagaacattgtcttatgtgctaggatggattttctataccaagagaattgttgcaaggagaaagaaacatgggaaataagtgaacacaagtctttgtgtagttaaatgcgaatataagcttagaaaatgagaaattatgtacattagtttgtttcttgtcacagctggtaagctctgctggtttcttcagctgtaaatggtcatgttctcagctatggttcgctatgcggctgtaaataatcaaatgaagtttgtacagggtgagggatgcgcatagcatttctgatgttttggatggatgccggagcttgctttttgatgcggcccgtgtattatctatgtagtagtatgcagtatgctgctg

SEQ ID NO: 17379 - protein, 258 aa, Zea mays subsp. mays
  peptide (1)..(258): Ceres Seq. ID no. 12360560
MSTKMWEATVEHAKTCVLTDKVHHYYPDGLNKAGVVFNVVGEVRGLISDKYVFVDDFTEKEKAEARAAVKQAYEHWKDVHTCDNETLVENPSHPFNLGSPSLHENQYNQLPTQVSTDGFSLSNSAILSPNIFSMEPSSALDPCSILETEESSANQFQSVLPPVGGHEVPREPQTLDKFSNSLVYDDCSAHPSFSESYYSSVDPSMSFDTQDLGAALKGFIATISKPKAAYRGWRTLSYVLGWIFYTKRIVARRKKHGK

SEQ ID NO: 17380 - protein, 254 aa, Zea mays subsp. mays
  peptide (1)..(254): Ceres Seq. ID no. 12360561
MWEATVEHAKTCVLTDKVHHYYPDGLNKAGVVFNVVGEVRGLISDKYVFVDDFTEKEKAEARAAVKQAYEHWKDVHTCDNETLVENPSHPFNLGSPSLHENQYNQLPTQVSTDGFSLSNSAILSPNIFSMEPSSALDPCSILETEESSANQFQSVLPPVGGHEVPREPQTLDKFSNSLVYDDCSAHPSFSESYYSSVDPSMSFDTQDLGAALKGFIATISKPKAAYRGWRTLSYVLGWIFYTKRIVARRKKHGK

SEQ ID NO: 17381 - protein, 175 aa, Zea mays subsp. mays
  peptide (1)..(175): Ceres Seq. ID no. 12360562
EPSGDRSKRGVAWLPEMSQKRQPEEGDVPRRAADAGGGGGGGDEPGGSSSRSSLPQRHGEPKRQRIALRDVITEVMRNTSIEKFLIALEPLIRRVVKEEIESAFANHASMMARSVTDSVPSVSKNLQLQFMTRLSLPIFTGSKIEGEGSLEYNYCSSRRFDKTNCSTRQRVPDKG

SEQ ID NO: 17382 - DNA, 2151 bp, Zea mays subsp. mays
  misc_feature (1)..(2151): Ceres Seq. ID no. 12383480
  misc_feature (1)..(2151): Ortholog of  Ceres SEQ ID NO 14307728 as cited in SEQ ID NO 54710
ctcgatcacttctctcccgatcctcactcccgtgtcgtgtctagcgccgacggcgttgctaccggagccggccagcggccacgatgcctacaatgcacgcgctccgcctatgcccgctgctctccaccatccgatccacaccaccgcgggccactgccgcagcccgccagggcgcgctcttcgtcgcccgctgctcctccgccgggacgccgtcagccgcccaggcgctcaagatcagttcgatcccgaccaagccagttgaggggcagaagactgggactagtggcctgaggaaaaaggtgaaagtgttccagcaggagaactaccttgctaattggattcaggctctattcaattccttgccccctgaagattatgtgggtgcaacccttgtacttgggggtgatggccggtactttaacaaggaggctgctcagatcatcattaagattgcagctggaaatggagttcagaagatcatagttggcaggaatggtctactgtcaacacctgctgtatctgctgtaattcgtaaaagaaaagccaatggcggctttatcatgagtgcaagccataatccaggtggaccagacaatgactggggtattaagtttaactacagcagtggacagccagcaccggagacgattactgatcaaatttatgggaacacactatcaatttctgaaataaaaacagcagacattcctgatactgatttgtcctctgttggagttgtaagctatggtgatttcgccatagaagtgatagatcctgtttcagattaccttgaactaatggagaatgtgtttgacttccaacttatcaaggatttgctttctcggcctgatttcaggttcatattcgatgcaatgcatgcaattactggtgcgtatgccggacccatttttgttgagaaacttggagctgatccggactgcatattaaatggggtgcctcttgaagattttggaaatggccatccagatccaaatctaacttacgctaaggagcttgtttttactatgtttggaacccatgcacctgactttggtgcagcaagtgatggtgatggtgatcggaacatgattcttgggaaaaggttctttattaccccatcagactctgttgcaataattgcagccaatgcacaggcagcaattccttatttccagtttggtacaaaaggactcgcgagatcaatgccaaccagtggtgctcttgatcgtgttgccgagaaattgaatgttccattctttgaggaaaattgtctatttgtggagaggaaagttttgggactggatctgatcacatcagagagaaggatggcatctgggctgttctggcttggctttccatacttgcacaccggaacaaggataagaaggtcggagagagattagtgtcagttgaagatattgctatggagcactggaaaacctatggcaggaatttcttttctagatacgattatgaggcgtgtgaatcacacagtgcaaaccagatgatggatcaccttagagatgttatggcaaatagcaagcctggagagaaatacggaaattacaccctccaatttgctgatgatttcagctatactgatcctgtagacggtagtacggtatcaaaacaaggacttcgatttgttttcactgatggatctaggattatcttccggctttcgggaaccggatctgctggagctactatccgcctctacatagaacaatttgaatctgatatctcgaagcatagtctcgatgctcaaacagctttgaagcctttaatagacctggctttgtctgtttcgaagctcaaggacttcacaggaagagagaaacctactgtcataacataatatttagatgttgttgtcctcggccataccaactgagcagcatgggccaagaattgaactgatggcaaatatgtatcattaggacaaattgcgccagaataagttgtttctcggaagtgttgagcacctccagcatcttccaaatatatctccaataagatattagtgggataacatatggcagatgttatcaaataatgtaaatatagatcgaacacgagacatgttttacgtggagaactcttgtatgaaaaaaaaatcatggatgctaactcgtgattttcattgtattc

SEQ ID NO: 17383 - protein, 439 aa, Zea mays subsp. mays
  peptide (1)..(439): Ceres Seq. ID no. 12383481
MPTMHALRLCPLLSTIRSTPPRATAAARQGALFVARCSSAGTPSAAQALKISSIPTKPVEGQKTGTSGLRKKVKVFQQENYLANWIQALFNSLPPEDYVGATLVLGGDGRYFNKEAAQIIIKIAAGNGVQKIIVGRNGLLSTPAVSAVIRKRKANGGFIMSASHNPGGPDNDWGIKFNYSSGQPAPETITDQIYGNTLSISEIKTADIPDTDLSSVGVVSYGDFAIEVIDPVSDYLELMENVFDFQLIKDLLSRPDFRFIFDAMHAITGAYAGPIFVEKLGADPDCILNGVPLEDFGNGHPDPNLTYAKELVFTMFGTHAPDFGAASDGDGDRNMILGKRFFITPSDSVAIIAANAQAAIPYFQFGTKGLARSMPTSGALDRVAEKLNVPFFEENCLFVERKVLGLDLITSERRMASGLFWLGFPYLHTGTRIRRSERD

SEQ ID NO: 17384 - protein, 436 aa, Zea mays subsp. mays
  peptide (1)..(436): Ceres Seq. ID no. 12383482
MHALRLCPLLSTIRSTPPRATAAARQGALFVARCSSAGTPSAAQALKISSIPTKPVEGQKTGTSGLRKKVKVFQQENYLANWIQALFNSLPPEDYVGATLVLGGDGRYFNKEAAQIIIKIAAGNGVQKIIVGRNGLLSTPAVSAVIRKRKANGGFIMSASHNPGGPDNDWGIKFNYSSGQPAPETITDQIYGNTLSISEIKTADIPDTDLSSVGVVSYGDFAIEVIDPVSDYLELMENVFDFQLIKDLLSRPDFRFIFDAMHAITGAYAGPIFVEKLGADPDCILNGVPLEDFGNGHPDPNLTYAKELVFTMFGTHAPDFGAASDGDGDRNMILGKRFFITPSDSVAIIAANAQAAIPYFQFGTKGLARSMPTSGALDRVAEKLNVPFFEENCLFVERKVLGLDLITSERRMASGLFWLGFPYLHTGTRIRRSERD

SEQ ID NO: 17385 - protein, 280 aa, Zea mays subsp. mays
  peptide (1)..(280): Ceres Seq. ID no. 12383483
MSASHNPGGPDNDWGIKFNYSSGQPAPETITDQIYGNTLSISEIKTADIPDTDLSSVGVVSYGDFAIEVIDPVSDYLELMENVFDFQLIKDLLSRPDFRFIFDAMHAITGAYAGPIFVEKLGADPDCILNGVPLEDFGNGHPDPNLTYAKELVFTMFGTHAPDFGAASDGDGDRNMILGKRFFITPSDSVAIIAANAQAAIPYFQFGTKGLARSMPTSGALDRVAEKLNVPFFEENCLFVERKVLGLDLITSERRMASGLFWLGFPYLHTGTRIRRSERD

SEQ ID NO: 17386 - DNA, 1739 bp, Zea mays subsp. mays
  misc_feature (1)..(1739): Ceres Seq. ID no. 13494501
  misc_feature (1)..(1739): Ortholog of  Ceres SEQ ID NO 13597446 as cited in SEQ ID NO 64098
  misc_feature (1)..(1739): Ortholog of  Ceres SEQ ID NO 15226246 as cited in SEQ ID NO 68314
tagaacatcctaatcgaaaaaccctaccccccacacggccacacacacaccgccgcgtccgacccccacgccgtcgactgctcgaccggtcggctccgatggggtacgtgctgtcggcggtgggcagggtgctggagcagcccacggcgtggggggcggcctgggagatggcactcctcgcggggcccctgtgggcggcggccctcctcggcctgctgctcggctgggcctggcgcccgcgctgggcatccggcctcgtcgtcgccaccgcggacgacggcggtagccccgccgccgccgcgcagccgcccttcgccacgctcgacttctggaaggcccagctccccgcccgcctccgcgccccgctcggcaccgccgtgcagcagagggagggtgacacggacgccgtgcaacggaaccgcggaacggtggcgcttggcaggtcctcagagacggagacggcgacggtggcggtggggatggccgacctggtgaacctctggaggctggtggagggcgcggacggcggcccggcctggaccaagatgatggagaagtcgctgcccaccatgacctaccgggcgtggaggagggacgcccagaccgggcctccgcagtaccagagcagcagcatcttcgagaacgccagtccagaggaggtgagggacttcttcggggacgacgagttccggatgtccaacaggtgggacgacatgctcatctaccacaagaccctggaggagtgccggaccactgggacgatgaaagtgcattgggtccggaagttccccttcttctgcagcgacagggagtacataatcgcccggcggatatggaagctggggggcgcctattattgcgtcacaaagggcataccatgctcatccattccacggcgtagcagacctcggagagtcgatctgtattactcaagctggtgcatccgcgcagtggagtccaggagagggaacggaggaggaaggggggcgacggcctgtgaggttctgctgttccaccacgaggacatgggcatcccgtacgagatcgccaagctgggcatcaggcaggggatgtgggggtgcgtgaagaggatcgagccggggctccgggcctaccagcaggcgcgggccgcgggggcgccgccgtcgcggagcgccctgatggcccggatcaacaccaaggtcagcgccgacggtttcactcgccagtcgtcgtccagttccagcggcggcgacgggccggagaccgcggacgacgcgcaggagaccgagaacaagaagcccgcgacgaggagccacgcagcggcgaggctcctcgtgctcggcggcgcggtcgctctggcctgctgcacccttgaccaggggctcctgaccaaggctctcatcttcggcgtcgcgcggaggttcgtcgggcagaggaaggacgttgtagcgtcccacacaccttgtcgctcgtacggtcgtgccgtgtgctgatcgccgacgtcgagaagcgggggaaggaggtggtttgtgtgggctttgtggatgtgtaattggtgctgatgccattgtggctgaaagagagcggacgaagagcgttttggtgtctacgtgtgtatacgctgccggctgtcggatcacgagggagaggggtttcctactatatacatgtgtaaaaatttgtttcatgtaatcttgtatctgagtgaccagatcaggtgattatgcagatgagaagaacagagttttttttcggcc

SEQ ID NO: 17387 - protein, 490 aa, Zea mays subsp. mays
  peptide (1)..(490): Ceres Seq. ID no. 13494502
EHPNRKTLPPTRPHTHRRVRPPRRRLLDRSAPMGYVLSAVGRVLEQPTAWGAAWEMALLAGPLWAAALLGLLLGWAWRPRWASGLVVATADDGGSPAAAAQPPFATLDFWKAQLPARLRAPLGTAVQQREGDTDAVQRNRGTVALGRSSETETATVAVGMADLVNLWRLVEGADGGPAWTKMMEKSLPTMTYRAWRRDAQTGPPQYQSSSIFENASPEEVRDFFGDDEFRMSNRWDDMLIYHKTLEECRTTGTMKVHWVRKFPFFCSDREYIIARRIWKLGGAYYCVTKGIPCSSIPRRSRPRRVDLYYSSWCIRAVESRRGNGGGRGATACEVLLFHHEDMGIPYEIAKLGIRQGMWGCVKRIEPGLRAYQQARAAGAPPSRSALMARINTKVSADGFTRQSSSSSSGGDGPETADDAQETENKKPATRSHAAARLLVLGGAVALACCTLDQGLLTKALIFGVARRFVGQRKDVVASHTPCRSYGRAVC

SEQ ID NO: 17388 - protein, 458 aa, Zea mays subsp. mays
  peptide (1)..(458): Ceres Seq. ID no. 13494503
MGYVLSAVGRVLEQPTAWGAAWEMALLAGPLWAAALLGLLLGWAWRPRWASGLVVATADDGGSPAAAAQPPFATLDFWKAQLPARLRAPLGTAVQQREGDTDAVQRNRGTVALGRSSETETATVAVGMADLVNLWRLVEGADGGPAWTKMMEKSLPTMTYRAWRRDAQTGPPQYQSSSIFENASPEEVRDFFGDDEFRMSNRWDDMLIYHKTLEECRTTGTMKVHWVRKFPFFCSDREYIIARRIWKLGGAYYCVTKGIPCSSIPRRSRPRRVDLYYSSWCIRAVESRRGNGGGRGATACEVLLFHHEDMGIPYEIAKLGIRQGMWGCVKRIEPGLRAYQQARAAGAPPSRSALMARINTKVSADGFTRQSSSSSSGGDGPETADDAQETENKKPATRSHAAARLLVLGGAVALACCTLDQGLLTKALIFGVARRFVGQRKDVVASHTPCRSYGRAVC

SEQ ID NO: 17389 - protein, 435 aa, Zea mays subsp. mays
  peptide (1)..(435): Ceres Seq. ID no. 13494504
MALLAGPLWAAALLGLLLGWAWRPRWASGLVVATADDGGSPAAAAQPPFATLDFWKAQLPARLRAPLGTAVQQREGDTDAVQRNRGTVALGRSSETETATVAVGMADLVNLWRLVEGADGGPAWTKMMEKSLPTMTYRAWRRDAQTGPPQYQSSSIFENASPEEVRDFFGDDEFRMSNRWDDMLIYHKTLEECRTTGTMKVHWVRKFPFFCSDREYIIARRIWKLGGAYYCVTKGIPCSSIPRRSRPRRVDLYYSSWCIRAVESRRGNGGGRGATACEVLLFHHEDMGIPYEIAKLGIRQGMWGCVKRIEPGLRAYQQARAAGAPPSRSALMARINTKVSADGFTRQSSSSSSGGDGPETADDAQETENKKPATRSHAAARLLVLGGAVALACCTLDQGLLTKALIFGVARRFVGQRKDVVASHTPCRSYGRAVC

SEQ ID NO: 17390 - DNA, 1623 bp, Zea mays subsp. mays
  misc_feature (1)..(1623): Ceres Seq. ID no. 12435326
  misc_feature (1)..(1623): Ortholog of  Ceres SEQ ID NO 12609146 as cited in SEQ ID NO 52118
  misc_feature (1)..(1623): Ortholog of  Ceres SEQ ID NO 13638136 as cited in SEQ ID NO 58644
  misc_feature (1)..(1623): Ortholog of  Ceres SEQ ID NO 15225826 as cited in SEQ ID NO 64774
  misc_feature (1)..(1623): Ortholog of  Ceres SEQ ID NO 12566239 as cited in SEQ ID NO 0
  misc_feature (1)..(1623): Ortholog of  Ceres SEQ ID NO 13599119 as cited in SEQ ID NO 0
aacccaaaatccacgagcacctcccccatcgtcctcacggacctcacgcgccctgcccctctcgctctccgcctccccgccccacacccatcgccacccaccagcacctccggcggcccccacccccgcctcctccccgcgtgtccgcggtctgcacccggcgtccctcgcggcgttgacgcgcgaacgtcccgtcgcccggtgagtaacggagagaccgaaccatgagcggaggggtggaaccggagaccccgccgggtagcagcagcaggagcgggggcagcaggagcgtcggtggcaagccgccacgccaccacctcacgtctatccgccactgcgccagcatcgcccgcatcgccgccgcctccgccggattcgggctggattcggggacgctcagcttgatctcacctaccgcagacatccatccgggcttcttgcctgtgttcaggtcggggagtttcgctgatattggacccaaaacgtacatggaggacgaacatgtctgtgtggacaacctggttgagcacctcgggttctatggcccgggcatccctgcaccgggtgctttctatggggtgtttgatggccatggtggcactgatgctgcctgttttgtccggaaaaatatactgaagttcataaccgaagattgccacttccccaacagcatcgagaaggcaatcagaagcgcttttgtaaaggccgacaatgcaattgcggattcccattctcttgaccggaattctgggaccacagcattgacggtccttatatttggcaggacactgcttgttgcgaatgccggtgactgtcgagctgtattaggaaagcgaggccgagctgttgaactctctagagaccacaaacccagctgcatagttgaaaggctcagaatcgaaaacctgggtggtaccgtctttgatggctacctcaacggtcagctggctgtagcaagggcaatcggtgattggcacatgaaaggctccaagggctctgtatgccctcttacaccagaacctgagtttagggaggttaggcttactgaggaagatgagttcttgataataggctgtgatggcctttgggatgtgatgagcagccagtttgctgtttccatggtcaggaaagagctgatggaacacaatgatccacaacggtgctcgcgagagcttgtccacgaagcgcttaggcgcgactgctgtgataacctaaccgtagttgttgtgtgcttctcagcggacccaccccctcaaatcgagatcccaagattccgagtacgaagaagcatctcaatggaagggcttcataggctgaggggtgctcttgacagtaatatctgaagcttaaaagtgtcccttcggctgtaacttctgtcgtcgttggtatgttgaagttgctccacccattggtgttttgagatagtctcagaataagttttgtagaattattttggaagaaattttgttgaggtgtaggctaattaatcttttttttgttgaggcagtgatttatatgtaccggtcaccatttgattgttggatgctcacgatgtaatcgagcaattaaccgacattgttctggtacgaatgagagttataggagttgatcatttttttctct

SEQ ID NO: 17391 - protein, 372 aa, Zea mays subsp. mays
  peptide (1)..(372): Ceres Seq. ID no. 12435327
MSGGVEPETPPGSSSRSGGSRSVGGKPPRHHLTSIRHCASIARIAAASAGFGLDSGTLSLISPTADIHPGFLPVFRSGSFADIGPKTYMEDEHVCVDNLVEHLGFYGPGIPAPGAFYGVFDGHGGTDAACFVRKNILKFITEDCHFPNSIEKAIRSAFVKADNAIADSHSLDRNSGTTALTVLIFGRTLLVANAGDCRAVLGKRGRAVELSRDHKPSCIVERLRIENLGGTVFDGYLNGQLAVARAIGDWHMKGSKGSVCPLTPEPEFREVRLTEEDEFLIIGCDGLWDVMSSQFAVSMVRKELMEHNDPQRCSRELVHEALRRDCCDNLTVVVVCFSADPPPQIEIPRFRVRRSISMEGLHRLRGALDSNI

SEQ ID NO: 17392 - protein, 284 aa, Zea mays subsp. mays
  peptide (1)..(284): Ceres Seq. ID no. 12435328
MEDEHVCVDNLVEHLGFYGPGIPAPGAFYGVFDGHGGTDAACFVRKNILKFITEDCHFPNSIEKAIRSAFVKADNAIADSHSLDRNSGTTALTVLIFGRTLLVANAGDCRAVLGKRGRAVELSRDHKPSCIVERLRIENLGGTVFDGYLNGQLAVARAIGDWHMKGSKGSVCPLTPEPEFREVRLTEEDEFLIIGCDGLWDVMSSQFAVSMVRKELMEHNDPQRCSRELVHEALRRDCCDNLTVVVVCFSADPPPQIEIPRFRVRRSISMEGLHRLRGALDSNI

SEQ ID NO: 17393 - DNA, 2312 bp, Zea mays subsp. mays
  misc_feature (1)..(2312): Ceres Seq. ID no. 12379167
  misc_feature (1)..(2312): Ortholog of  Ceres SEQ ID NO 15178728 as cited in SEQ ID NO 67280
gcacgagaccattacctagaacatcctaatcgaaaagaggagtcacagagaaagtttggtggtgaggcaaaggtttccttccagggttcgtcaggaacgaggcgactcgcaatctgaagcctttcgtcggttccgtctagctgccccccctcggattcggccatggagcggcagtccagcatccggctgggcgcgctggagaagctgaggagcttccgggggatggagaagcagaagagcttccgcgggatcatgtccctcgagcggcggagcagggacagcccggggaaacgcggcgacacgccgctccacctcgcggcgagggccgggagcgtggcccacgcgcagaggatcctcgcggagctcgaccgggcgctggccgccgagatggccgccaggcagaaccaggacggcgagacgccgctgtacgtcgccgccgagaagggccacgcggaggtcgtgcgcgagatcctcaaggtctgtggcgtgcagacggccggcatcaaggccagcaatagtttcgacgcgttccacatcgccgccaagcagggccaccttgaagttctgaaggagatgctgcaggctcttcctgctcttgctatgacaacaaattctgtaaacgctacggccctggacaccgcggcgattcagggccatgttgacatcgtcaatctcctgctggaaaccgatgctagcctcgccaggatcacgaggaacaacgggaaaacggttttacactcagcagcaagaatgggccacgtggaagttgtaagatcgttgctgaataaggatcccaggattggtttgaggacagacaagaaggggcaaactgcgctgcatatggcttcgaaagcgcagaatgctgagatcgtggtcgagttgttgaagccagatgtctcggtcatccatatcgaagacaacaaggggaacaggcccttgcatgttgctactcggaaggggaatatcattatagtgcagactctgttatcagttgaggggatcgatgtcaatgcagttaacaggtctggagagactgcatttgccatcgccgagaaaatggacagtgtagaactcgtgaacatcctgaaagaggctggtggagaagccgcaaagcagcagcaagtacatcctccgaattcggcgaagcagctgaaggaaacagtcagcgatatcagacacgacgtccagtcccagttcaagcaaacacgtcagaccaagatgcaagtcaaccagatcaagaagaggctggagaagctccacatcggcgggctgaacaacgccatcaactccaacaccgtcgtcgcggtgctcatcgccacggtcgccttcgccgccatattcacggtcccgggaaacttcgtggaggagctgagccaggcgcctccgggcatgtccctggggcaggcgtacgtggcgagcaacccggcgttcatcgtcttcctggtcttcgacgcgctggccctcttcatctcgctcgcggtggtcgtggtgcagacctcgctgatcgtggtggagcggagggcgaagaagcggatggtgttcgtgatgaacaagctcatgtggctggcgtgcctcttcatctcggtggccttcatcgcgctgacctacgtggtggtggggcgcgacgactggtggctggcctggtgcaccatgggcatcggcgccgcgatcatgctcaccaccctcggctccatgtgctactgcatcgtcgcgcacaggctggaggagaagaacaccaggaagatcaggagggcctccgcgagccagtcccgcggctcgtggtcccgatcggtcgactcggacgaggagatacttaacagcgagtacaagacgaagatgtacgcgctgtaggatggatagcaagtgtaacatgacggattcttttgtacataccagtgctttgtttcgccagaggctgctccatggcatgcggcaccacatcagtcttcttcaaccaaagggactgaaggcccttcctgcggaaccaagttcaggtcacttgaccggtgtgcctgttcctggggagtgagagtctgctcaactgtgtggttcttagcgcctgaaaccgtcaatggtgatggagataattcagctagaaatttagaatagaataaagtgtccggtacaaaatgcattgtgtcgtgcagtagatatgatgatcttgtacacgaggatctcatctgagagagtgatttgttgaactcttgtgggcagttttttttcccttgggattgggacttgggcctgtggtctgtgacgcagggaatatatgtgttgacaagatgaaaactatcattgatcggccatttccg

SEQ ID NO: 17394 - protein, 562 aa, Zea mays subsp. mays
  peptide (1)..(562): Ceres Seq. ID no. 12379168
MERQSSIRLGALEKLRSFRGMEKQKSFRGIMSLERRSRDSPGKRGDTPLHLAARAGSVAHAQRILAELDRALAAEMAARQNQDGETPLYVAAEKGHAEVVREILKVCGVQTAGIKASNSFDAFHIAAKQGHLEVLKEMLQALPALAMTTNSVNATALDTAAIQGHVDIVNLLLETDASLARITRNNGKTVLHSAARMGHVEVVRSLLNKDPRIGLRTDKKGQTALHMASKAQNAEIVVELLKPDVSVIHIEDNKGNRPLHVATRKGNIIIVQTLLSVEGIDVNAVNRSGETAFAIAEKMDSVELVNILKEAGGEAAKQQQVHPPNSAKQLKETVSDIRHDVQSQFKQTRQTKMQVNQIKKRLEKLHIGGLNNAINSNTVVAVLIATVAFAAIFTVPGNFVEELSQAPPGMSLGQAYVASNPAFIVFLVFDALALFISLAVVVVQTSLIVVERRAKKRMVFVMNKLMWLACLFISVAFIALTYVVVGRDDWWLAWCTMGIGAAIMLTTLGSMCYCIVAHRLEEKNTRKIRRASASQSRGSWSRSVDSDEEILNSEYKTKMYAL

SEQ ID NO: 17395 - protein, 542 aa, Zea mays subsp. mays
  peptide (1)..(542): Ceres Seq. ID no. 12379169
MEKQKSFRGIMSLERRSRDSPGKRGDTPLHLAARAGSVAHAQRILAELDRALAAEMAARQNQDGETPLYVAAEKGHAEVVREILKVCGVQTAGIKASNSFDAFHIAAKQGHLEVLKEMLQALPALAMTTNSVNATALDTAAIQGHVDIVNLLLETDASLARITRNNGKTVLHSAARMGHVEVVRSLLNKDPRIGLRTDKKGQTALHMASKAQNAEIVVELLKPDVSVIHIEDNKGNRPLHVATRKGNIIIVQTLLSVEGIDVNAVNRSGETAFAIAEKMDSVELVNILKEAGGEAAKQQQVHPPNSAKQLKETVSDIRHDVQSQFKQTRQTKMQVNQIKKRLEKLHIGGLNNAINSNTVVAVLIATVAFAAIFTVPGNFVEELSQAPPGMSLGQAYVASNPAFIVFLVFDALALFISLAVVVVQTSLIVVERRAKKRMVFVMNKLMWLACLFISVAFIALTYVVVGRDDWWLAWCTMGIGAAIMLTTLGSMCYCIVAHRLEEKNTRKIRRASASQSRGSWSRSVDSDEEILNSEYKTKMYAL

SEQ ID NO: 17396 - protein, 532 aa, Zea mays subsp. mays
  peptide (1)..(532): Ceres Seq. ID no. 12379170
MSLERRSRDSPGKRGDTPLHLAARAGSVAHAQRILAELDRALAAEMAARQNQDGETPLYVAAEKGHAEVVREILKVCGVQTAGIKASNSFDAFHIAAKQGHLEVLKEMLQALPALAMTTNSVNATALDTAAIQGHVDIVNLLLETDASLARITRNNGKTVLHSAARMGHVEVVRSLLNKDPRIGLRTDKKGQTALHMASKAQNAEIVVELLKPDVSVIHIEDNKGNRPLHVATRKGNIIIVQTLLSVEGIDVNAVNRSGETAFAIAEKMDSVELVNILKEAGGEAAKQQQVHPPNSAKQLKETVSDIRHDVQSQFKQTRQTKMQVNQIKKRLEKLHIGGLNNAINSNTVVAVLIATVAFAAIFTVPGNFVEELSQAPPGMSLGQAYVASNPAFIVFLVFDALALFISLAVVVVQTSLIVVERRAKKRMVFVMNKLMWLACLFISVAFIALTYVVVGRDDWWLAWCTMGIGAAIMLTTLGSMCYCIVAHRLEEKNTRKIRRASASQSRGSWSRSVDSDEEILNSEYKTKMYAL

SEQ ID NO: 17397 - DNA, 2125 bp, Zea mays subsp. mays
  misc_feature (1)..(2125): Ceres Seq. ID no. 12366165
  misc_feature (1)..(2125): Ortholog of  Ceres SEQ ID NO 15176403 as cited in SEQ ID NO 52988
gcacgagaccattacctagaacatcctaatcgaaaagaaagccgaagcgagtgcgagtgcggccctcagctgctgcagttgctcctgcagtcctgctcgtttctgcggcggcggcggcggcctagcacctgagcggggcggcgagaggggacggagatggatatcgcgcgggcggctgctggcgtggcctgctgcaaggagcaccagaggatctacgccgagtggttcgccctcgccgacccagatggcgacggccgcgtcacgggcgccgatgccaccagcttcttcgccatgtccgcgctttcacgcgccgatctcaagcaggtgtgggcgatcgcggattccaggcggcaggggtacctcggattcgccgagttcgtcacagcaatgcagctcgtgtctctggcccaagcagggaacgagatcacacaggacagtctgaaacgtgaagacctgagcaccttggatccgcctgtgatggaaggtgttgatgagctactggctagatccaaggctgttgtaaagagagttcacccagatgacaatggcaccactcaggcccaagcaccttccatatatcactggtttggttcaaaatcagcacagaaggtgcagatgcctctgactgctgttacctctgtaattgatggcttgaaaagactctatgttgaaaaactgaagcctttggaagtcgcctacagatacaatgatttttctcacccattattgacaaacagtgactttgaagcaaagccaatggttatgctcttgggtcagtattcaacaggcaaaacaacattcattaagcatctgctaaagacaagctacccaggagctcacgtcggaccagagccaacaactgatagattcgtagttgtcatgtcaggatctgatggaaggaccattcctggcaatactattgccgttcaagccgacatgccattcactggtcttacaacctttgggggagcgtttctgtcgaagtttgaatgctctcagatgccacatcccctgctagagcatatcacctttgtggacactcctggtgttctctctggggaaaagcaacggacccaacgtagctatgatttcactggtgtgacctcatggtttgctgccaagtgtgaccttatccttcttctgtttgaccctcacaagcttgatataagtgatgagttcaaacgtgtcatttcatctttacgtgggcatgatgacaaaatacgcgtagtgttgaacaaggccgaccaagttgacacacaacagcttatgagagtgtatggtgcattgatgtggtctcttgggaaagtgctaaatactcctgaggttgcgcgtgtgtatatcggatcatttaatgataagccagtgaatgattcagctgttgggccaattggaaaagacttgtttgagagggagcaagatgacctcctctgtgacctgaaggacattcctaagaaggcttgtgatcgacgggtcaatgagtttgttaagcgtgcccgagctgccaagatccatgcttacataattggccatctgaagaaggagatgcctgcagtgatgggaaaagccaaggctcagcagcgactcatagacaacttagaggaggagtttgcaaaggtgcagagggaatatcatctccccgccggagacttccccgacgtcgagcacttcaagcaggtgctgggcgggtacagcatcgacaagttcgagaagctgaagccgaagatggtgcaggcggtggacgacatgctcgctcacgacatcccggagctcctcaagaacttgcggaacccgtacgagtgaaactgacctgacctctcgcgtccgtcggttgtaaaaagattatcttagctgtcacgtccggtgatggcggacggacgaggcagacgttcctgggagagagatgcctagacggttacgggtcactactcactcactagctgtccgcagctgtgccaaaaccgagaggacacatgagggttcagatcggacagccacagcgcatagcctgtgttggtttcggcgtcagtgctctctgcacgcgaaggagctgctgcggcaccgttgccgtgccgtctcgctgtgatacatttcccctcgtgacgagatgaaaagagttgcaggcggc

SEQ ID NO: 17398 - protein, 547 aa, Zea mays subsp. mays
  peptide (1)..(547): Ceres Seq. ID no. 12366166
MDIARAAAGVACCKEHQRIYAEWFALADPDGDGRVTGADATSFFAMSALSRADLKQVWAIADSRRQGYLGFAEFVTAMQLVSLAQAGNEITQDSLKREDLSTLDPPVMEGVDELLARSKAVVKRVHPDDNGTTQAQAPSIYHWFGSKSAQKVQMPLTAVTSVIDGLKRLYVEKLKPLEVAYRYNDFSHPLLTNSDFEAKPMVMLLGQYSTGKTTFIKHLLKTSYPGAHVGPEPTTDRFVVVMSGSDGRTIPGNTIAVQADMPFTGLTTFGGAFLSKFECSQMPHPLLEHITFVDTPGVLSGEKQRTQRSYDFTGVTSWFAAKCDLILLLFDPHKLDISDEFKRVISSLRGHDDKIRVVLNKADQVDTQQLMRVYGALMWSLGKVLNTPEVARVYIGSFNDKPVNDSAVGPIGKDLFEREQDDLLCDLKDIPKKACDRRVNEFVKRARAAKIHAYIIGHLKKEMPAVMGKAKAQQRLIDNLEEEFAKVQREYHLPAGDFPDVEHFKQVLGGYSIDKFEKLKPKMVQAVDDMLAHDIPELLKNLRNPYE

SEQ ID NO: 17399 - protein, 502 aa, Zea mays subsp. mays
  peptide (1)..(502): Ceres Seq. ID no. 12366167
MSALSRADLKQVWAIADSRRQGYLGFAEFVTAMQLVSLAQAGNEITQDSLKREDLSTLDPPVMEGVDELLARSKAVVKRVHPDDNGTTQAQAPSIYHWFGSKSAQKVQMPLTAVTSVIDGLKRLYVEKLKPLEVAYRYNDFSHPLLTNSDFEAKPMVMLLGQYSTGKTTFIKHLLKTSYPGAHVGPEPTTDRFVVVMSGSDGRTIPGNTIAVQADMPFTGLTTFGGAFLSKFECSQMPHPLLEHITFVDTPGVLSGEKQRTQRSYDFTGVTSWFAAKCDLILLLFDPHKLDISDEFKRVISSLRGHDDKIRVVLNKADQVDTQQLMRVYGALMWSLGKVLNTPEVARVYIGSFNDKPVNDSAVGPIGKDLFEREQDDLLCDLKDIPKKACDRRVNEFVKRARAAKIHAYIIGHLKKEMPAVMGKAKAQQRLIDNLEEEFAKVQREYHLPAGDFPDVEHFKQVLGGYSIDKFEKLKPKMVQAVDDMLAHDIPELLKNLRNPYE

SEQ ID NO: 17400 - protein, 470 aa, Zea mays subsp. mays
  peptide (1)..(470): Ceres Seq. ID no. 12366168
MQLVSLAQAGNEITQDSLKREDLSTLDPPVMEGVDELLARSKAVVKRVHPDDNGTTQAQAPSIYHWFGSKSAQKVQMPLTAVTSVIDGLKRLYVEKLKPLEVAYRYNDFSHPLLTNSDFEAKPMVMLLGQYSTGKTTFIKHLLKTSYPGAHVGPEPTTDRFVVVMSGSDGRTIPGNTIAVQADMPFTGLTTFGGAFLSKFECSQMPHPLLEHITFVDTPGVLSGEKQRTQRSYDFTGVTSWFAAKCDLILLLFDPHKLDISDEFKRVISSLRGHDDKIRVVLNKADQVDTQQLMRVYGALMWSLGKVLNTPEVARVYIGSFNDKPVNDSAVGPIGKDLFEREQDDLLCDLKDIPKKACDRRVNEFVKRARAAKIHAYIIGHLKKEMPAVMGKAKAQQRLIDNLEEEFAKVQREYHLPAGDFPDVEHFKQVLGGYSIDKFEKLKPKMVQAVDDMLAHDIPELLKNLRNPYE

SEQ ID NO: 17401 - DNA, 1144 bp, Zea mays subsp. mays
  misc_feature (1)..(1144): Ceres Seq. ID no. 12417524
  misc_feature (1)..(1144): Ortholog of  Ceres SEQ ID NO 15168436 as cited in SEQ ID NO 56974
agcctcagcctcagcctcacacggccgaagcagaacccgtgaacacctcaaacctcacggctcacgccaccgtcctccagccccgttctccggcgatcctgtcattccagacgcgtctccgcccctctcggtccaccaccccgacgccgccacatgtcgacgcagtccatttcgccggcctctgcgtccgcgcagttcacctacccggcggcagcggccccgtcttacttccccgtgcccttccacctccagaacgcgcaatacaccgcatggaccgcagccgcgccggcggtgcctgtgtacaacgccatctatcccatgccccaagtccagcaggcccaacagttgttccaaaaggactcgaagataattactcctgaagctctagctactgttaaggctgctattgcaaatagtgagaaagacaagaaggttgatgcaacaaaaaaggcagtgcctcgaaaggcagctgggcaaagttgggaggaccctaccttggctgattggcctgaaaatgatttccgtttgttctgcggtgatcttggaaatgaagtgaatgatgatgttcttgcaaaggcattctcaaaatatccatccttcaatatggccagggtttatacgggacaagtggactggtaaaactaaaggatatggttttgttagttttgctgatgcgtctgatcttacttctgccttgaaagatatgaatggtaaatatgtaggaaatcggccaatcaaattacggaagagcacatggaagaacaggatagacttagaagctttggagaagggaaagacccaaccacagaagaaaatcaaactgcagaaaagaagtgttcttcacaaatgaatctgaaaaattctgctcgttcatcgtctgtcagtatcgtttgggaaagctgtctgaagcattaacagttttacttaacgtcagatgtgtaggactgatggtcaccaagttcccggtgacactgtatacaatcgcagacgcgatgctatgttggtgattgaacaggtgtagccgaatagttggatccaataacttcacctgtagtgtaatggtccaattttatcatgggaactgtagttctaaatactccagtgaccagtgctattgtggtgaattattctgtgatctttattc

SEQ ID NO: 17402 - protein, 161 aa, Zea mays subsp. mays
  peptide (1)..(161): Ceres Seq. ID no. 12417525
MSTQSISPASASAQFTYPAAAAPSYFPVPFHLQNAQYTAWTAAAPAVPVYNAIYPMPQVQQAQQLFQKDSKIITPEALATVKAAIANSEKDKKVDATKKAVPRKAAGQSWEDPTLADWPENDFRLFCGDLGNEVNDDVLAKAFSKYPSFNMARVYTGQVDW

SEQ ID NO: 17403 - protein, 125 aa, Zea mays subsp. mays
  peptide (1)..(125): Ceres Seq. ID no. 12417526
PQPQPHTAEAEPVNTSNLTAHATVLQPRSPAILSFQTRLRPSRSTTPTPPHVDAVHFAGLCVRAVHLPGGSGPVLLPRALPPPERAIHRMDRSRAGGACVQRHLSHAPSPAGPTVVPKGLEDNYS

SEQ ID NO: 17404 - protein, 122 aa, Zea mays subsp. mays
  peptide (1)..(122): Ceres Seq. ID no. 12417527
ASASASHGRSRTREHLKPHGSRHRPPAPFSGDPVIPDASPPLSVHHPDAATCRRSPFRRPLRPRSSPTRRQRPRLTSPCPSTSRTRNTPHGPQPRRRCLCTTPSIPCPKSSRPNSCSKRTRR

SEQ ID NO: 17405 - DNA, 950 bp, Zea mays subsp. mays
  misc_feature (1)..(950): Ceres Seq. ID no. 14312576
  misc_feature (1)..(950): Ortholog of  Ceres SEQ ID NO 14316367 as cited in SEQ ID NO 57626
  misc_feature (1)..(950): Ortholog of  Ceres SEQ ID NO 14315039 as cited in SEQ ID NO 57668
  misc_feature (1)..(950): Ortholog of  Ceres SEQ ID NO 13664189 as cited in SEQ ID NO 66834
  misc_feature (1)..(950): Ortholog of  Ceres SEQ ID NO 13654321 as cited in SEQ ID NO 67850
aaggcccagatcaaaagaaaagagcagcggagcggagcatgctcttcctccggtgccagcctcgcgtctcgtccccgtccgcatccgcgtccgcgccgccttttcgtccccgcgtcggcgtcgcggctccactgggcgtacgcgtcaccggcggaaggcgagggcaggcggtggtcgcgatggcgtccgccgacgcgcgcttggcggggattgcctcctccatccgcgtcatccccgacttccccaagccagggatcatgttccaggacatcacgacactgctgctcgaccccaaggcgttccgtgacaccatcgacgtcttcgttgagcggtacaaggaccaagggatcaccgtagttgctggtgtggaagctagagggttcatttttggtcctcctatcgctctagccatcagtgcgaaatttgtacctttgaggaagcctaagaagttgccaggcgaggtgatctccgaagaatattctctggaatacggaactgacaagatagagatgcatgttggagctgtacaggccaacgatcgggctcttgtagtcgatgatcttattgccaccggtggaacactctgtgcagctgtcaaacttattgaacgtgttggagcaaaggttgttgagtgtgcttgcgtcattgaattggcagaactgaagggccgagacaaacttggggacaggccagtttttgttcttgtcgaagcagatgcttgagcggaacttgggacttctcttctcagtgagttagagttggtgctgttgatgctacctctctgtcaacaacaaagtttcccatgttggctatattcttgctgacacgtaataaagtttcattccaaattgtgatcccctgaatgatttgtcaatgtagacatgattgctggtccttgtatactgtggcttattattcacatcaattaaggataatcctgattggagctc

SEQ ID NO: 17406 - protein, 239 aa, Zea mays subsp. mays
  peptide (1)..(239): Ceres Seq. ID no. 14312577
GPDQKKRAAERSMLFLRCQPRVSSPSASASAPPFRPRVGVAAPLGVRVTGGRRGQAVVAMASADARLAGIASSIRVIPDFPKPGIMFQDITTLLLDPKAFRDTIDVFVERYKDQGITVVAGVEARGFIFGPPIALAISAKFVPLRKPKKLPGEVISEEYSLEYGTDKIEMHVGAVQANDRALVVDDLIATGGTLCAAVKLIERVGAKVVECACVIELAELKGRDKLGDRPVFVLVEADA

SEQ ID NO: 17407 - protein, 227 aa, Zea mays subsp. mays
  peptide (1)..(227): Ceres Seq. ID no. 14312578
MLFLRCQPRVSSPSASASAPPFRPRVGVAAPLGVRVTGGRRGQAVVAMASADARLAGIASSIRVIPDFPKPGIMFQDITTLLLDPKAFRDTIDVFVERYKDQGITVVAGVEARGFIFGPPIALAISAKFVPLRKPKKLPGEVISEEYSLEYGTDKIEMHVGAVQANDRALVVDDLIATGGTLCAAVKLIERVGAKVVECACVIELAELKGRDKLGDRPVFVLVEADA

SEQ ID NO: 17408 - protein, 180 aa, Zea mays subsp. mays
  peptide (1)..(180): Ceres Seq. ID no. 14312579
MASADARLAGIASSIRVIPDFPKPGIMFQDITTLLLDPKAFRDTIDVFVERYKDQGITVVAGVEARGFIFGPPIALAISAKFVPLRKPKKLPGEVISEEYSLEYGTDKIEMHVGAVQANDRALVVDDLIATGGTLCAAVKLIERVGAKVVECACVIELAELKGRDKLGDRPVFVLVEADA

SEQ ID NO: 17409 - DNA, 1903 bp, Zea mays subsp. mays
  misc_feature (1)..(1903): Ceres Seq. ID no. 12375174
  misc_feature (1)..(1903): Ortholog of  Ceres SEQ ID NO 14316204 as cited in SEQ ID NO 59644
aattattaaacaaaagcagttgtctcgataccaaaaccgcgtatctcaccccgcctccttttcttcgcgtcccccgcctcgatccgatcggggacgggtcgaggggcaggggaatgtcgtcgtcgtctgcgtcatcttcggcggcggcgcaccaccagcagcattaccggcggcagacaggagggagcggtctcgtgccgctcgccgcgctcatcaaggaggaggcccgcacggagcgccaatccatagccggcggcgaaagcaggatctccgcgcgcgacgatgacgcggcaggagtaggaagctccggcgtaggaggggaggcggcggaggcggcggtggagtcgcggctggagcgcccgctgctgcgctatgggtgcgccgctcagtgcaaaaagggcgaggacttctttttgctcagaacggactgtcttcgtcccgccatctccgtctcctcctcggcctccccgcaccccatcttcgccgtattcgctatacttgatggccataatggtaacgcagccgcaatatacacaagggacaatttgctcaaccatgtccttagtgctatgccacgggggctgtccagggaggagtggttgcacatgttgccccgagcactggttgcagggtttgttaagacggacaaggagttccagagcaaagggcaaacttctggcaccaccgctacatttgtgataattgatgggtggactatcactgttgcctctgttggtgattctcgctgtattttagatgctcagggtggggctgtttctttgcttactgtggatcacagactagaagaaaatgttgaggagagggagcgcgttacagcaagtggaggtgaagttggaagactcagtgttgttggtggagcagagattggtccgctacgatgctggcctggaggtctatgcttatcaagatccattggagatatcgatgttggcgaatttattgtccctgttccatatgtgaagcaagtgaagttgtcaaatgctggaggaagacttattattgcttcagatggcatttgggatgcattatcctcagaagccgctgctaagtcttgcagaggtttgcctgctgagcttgccgcaaagcaagttgttaaggaggcactcaggacaagagggctaaaggatgatacaacttgcattgttgttgacataatcccacctggtcaaacaatacggcctctgtctcctcctaaaaagacgagcaagctgaagtcttttatttttagaaagaaagcgaaggacccttctcagaagttgactaaacagcattcagctgttggtatcgttgaagagatatttgaagaaggttcagcgatgctatcagaaaggttaggtcctgatttggatggcaggagaacctcaagcctgtttacatgtgccatctgccagttagacctggagccaagtgaaggcatttcggtgcatgctggatcgatcttctcttcgacctccaggccatgggaaggcccattcctctgctcggactgccgtgagaagaaggatgccatggaaggcaaacggcccagtggcgtcaaggttctgtagtatacagcaaccgatccttgtagctgcccgaaaaatcccacccttcttatttccttttctcgtgaggaccctttcaaagttttacaatttgtttcctttaaattcggatgattttaggatgcgtcttattttgcgaggaaatagccaactatgtaagtagctgttggcaaaaggaaatgtgaagcgagcgaatagggcatcccttcatttttctttctctcttccattcggaatggatgaatagggttgccttcaatttttgttctcttccattcggaatggacagacagtaactcagctcacgagtaatgacagctaacatattctttatttgt

SEQ ID NO: 17410 - protein, 521 aa, Zea mays subsp. mays
  peptide (1)..(521): Ceres Seq. ID no. 12375175
LLNKSSCLDTKTAYLTPPPFLRVPRLDPIGDGSRGRGMSSSSASSSAAAHHQQHYRRQTGGSGLVPLAALIKEEARTERQSIAGGESRISARDDDAAGVGSSGVGGEAAEAAVESRLERPLLRYGCAAQCKKGEDFFLLRTDCLRPAISVSSSASPHPIFAVFAILDGHNGNAAAIYTRDNLLNHVLSAMPRGLSREEWLHMLPRALVAGFVKTDKEFQSKGQTSGTTATFVIIDGWTITVASVGDSRCILDAQGGAVSLLTVDHRLEENVEERERVTASGGEVGRLSVVGGAEIGPLRCWPGGLCLSRSIGDIDVGEFIVPVPYVKQVKLSNAGGRLIIASDGIWDALSSEAAAKSCRGLPAELAAKQVVKEALRTRGLKDDTTCIVVDIIPPGQTIRPLSPPKKTSKLKSFIFRKKAKDPSQKLTKQHSAVGIVEEIFEEGSAMLSERLGPDLDGRRTSSLFTCAICQLDLEPSEGISVHAGSIFSSTSRPWEGPFLCSDCREKKDAMEGKRPSGVKVL

SEQ ID NO: 17411 - protein, 484 aa, Zea mays subsp. mays
  peptide (1)..(484): Ceres Seq. ID no. 12375176
MSSSSASSSAAAHHQQHYRRQTGGSGLVPLAALIKEEARTERQSIAGGESRISARDDDAAGVGSSGVGGEAAEAAVESRLERPLLRYGCAAQCKKGEDFFLLRTDCLRPAISVSSSASPHPIFAVFAILDGHNGNAAAIYTRDNLLNHVLSAMPRGLSREEWLHMLPRALVAGFVKTDKEFQSKGQTSGTTATFVIIDGWTITVASVGDSRCILDAQGGAVSLLTVDHRLEENVEERERVTASGGEVGRLSVVGGAEIGPLRCWPGGLCLSRSIGDIDVGEFIVPVPYVKQVKLSNAGGRLIIASDGIWDALSSEAAAKSCRGLPAELAAKQVVKEALRTRGLKDDTTCIVVDIIPPGQTIRPLSPPKKTSKLKSFIFRKKAKDPSQKLTKQHSAVGIVEEIFEEGSAMLSERLGPDLDGRRTSSLFTCAICQLDLEPSEGISVHAGSIFSSTSRPWEGPFLCSDCREKKDAMEGKRPSGVKVL

SEQ ID NO: 17412 - protein, 332 aa, Zea mays subsp. mays
  peptide (1)..(332): Ceres Seq. ID no. 12375177
MPRGLSREEWLHMLPRALVAGFVKTDKEFQSKGQTSGTTATFVIIDGWTITVASVGDSRCILDAQGGAVSLLTVDHRLEENVEERERVTASGGEVGRLSVVGGAEIGPLRCWPGGLCLSRSIGDIDVGEFIVPVPYVKQVKLSNAGGRLIIASDGIWDALSSEAAAKSCRGLPAELAAKQVVKEALRTRGLKDDTTCIVVDIIPPGQTIRPLSPPKKTSKLKSFIFRKKAKDPSQKLTKQHSAVGIVEEIFEEGSAMLSERLGPDLDGRRTSSLFTCAICQLDLEPSEGISVHAGSIFSSTSRPWEGPFLCSDCREKKDAMEGKRPSGVKVL

SEQ ID NO: 17413 - DNA, 1286 bp, Zea mays subsp. mays; identical to SEQ ID NO: 16884
  misc_feature (1)..(1286): Ceres Seq. ID no. 13494497
  misc_feature (1)..(1286): Ortholog of  Ceres SEQ ID NO 13597533 as cited in SEQ ID NO 64942

SEQ ID NO: 17414 - protein, 265 aa, Zea mays subsp. mays; identical to SEQ ID NO: 16885
  peptide (1)..(265): Ceres Seq. ID no. 13494498

SEQ ID NO: 17415 - protein, 259 aa, Zea mays subsp. mays; identical to SEQ ID NO: 16886
  peptide (1)..(259): Ceres Seq. ID no. 13494499

SEQ ID NO: 17416 - protein, 234 aa, Zea mays subsp. mays; identical to SEQ ID NO: 16887
  peptide (1)..(234): Ceres Seq. ID no. 13494500

SEQ ID NO: 17417 - DNA, 2187 bp, Zea mays subsp. mays; identical to SEQ ID NO: 3955
  misc_feature (1)..(2187): Ceres Seq. ID no. 12362634
  misc_feature (1)..(2187): Ortholog of  Ceres SEQ ID NO 15169092 as cited in SEQ ID NO 60430
  misc_feature (1)..(2187): Ortholog of  Ceres SEQ ID NO 14303680 as cited in SEQ ID NO 66019
  misc_feature (1)..(2187): Ortholog of  Ceres SEQ ID NO 15224940 as cited in SEQ ID NO 0

SEQ ID NO: 17418 - protein, 533 aa, Zea mays subsp. mays; identical to SEQ ID NO: 3956
  peptide (1)..(533): Ceres Seq. ID no. 12362635

SEQ ID NO: 17419 - protein, 382 aa, Zea mays subsp. mays; identical to SEQ ID NO: 3957
  peptide (1)..(382): Ceres Seq. ID no. 12362636

SEQ ID NO: 17420 - protein, 347 aa, Zea mays subsp. mays; identical to SEQ ID NO: 3958
  peptide (1)..(347): Ceres Seq. ID no. 12362637

SEQ ID NO: 17421 - DNA, 442 bp, Zea mays subsp. mays
  misc_feature (1)..(442): Ceres Seq. ID no. 13586300
  misc_feature (1)..(442): Ortholog of  Ceres SEQ ID NO 13659033 as cited in SEQ ID NO 66372
cataacaagagctctatctatgaagttaatgggagtcccatcacaaagcacatgggtttcttgattttcaactttagtgactacaattgcacggtggaatactacagatccccttttatagtccttcaaggccgtgcgccagcaggagcccctgagattgttaggtacagtattcgagtggattcaatggattggatgtctgaccgcggcaagtggaaggatgctgatgtattgatcttcaacactgggcattggtggaacaatgagaaaacaatcagagggggtgcctactttcaagtaggagatgaggtcaaaatgggcatgaatgttgcagatgcttacagaagatcgatacagacattgtccgattggcttcgcaaagaagttaacacgagcaagactcatgtcatctaccgcacatatgcccctgtgcattncagag

SEQ ID NO: 17422 - protein, 147 aa, Zea mays subsp. mays
  peptide (1)..(147): Ceres Seq. ID no. 13586301
  misc_feature (146)..(146): Xaa is any aa, unknown or other
HNKSSIYEVNGSPITKHMGFLIFNFSDYNCTVEYYRSPFIVLQGRAPAGAPEIVRYSIRVDSMDWMSDRGKWKDADVLIFNTGHWWNNEKTIRGGAYFQVGDEVKMGMNVADAYRRSIQTLSDWLRKEVNTSKTHVIYRTYAPVHXR

SEQ ID NO: 17423 - protein, 130 aa, Zea mays subsp. mays
  peptide (1)..(130): Ceres Seq. ID no. 13586302
  misc_feature (129)..(129): Xaa is any aa, unknown or other
MGFLIFNFSDYNCTVEYYRSPFIVLQGRAPAGAPEIVRYSIRVDSMDWMSDRGKWKDADVLIFNTGHWWNNEKTIRGGAYFQVGDEVKMGMNVADAYRRSIQTLSDWLRKEVNTSKTHVIYRTYAPVHXR

SEQ ID NO: 17424 - protein, 85 aa, Zea mays subsp. mays
  peptide (1)..(85): Ceres Seq. ID no. 13586303
  misc_feature (84)..(84): Xaa is any aa, unknown or other
MDWMSDRGKWKDADVLIFNTGHWWNNEKTIRGGAYFQVGDEVKMGMNVADAYRRSIQTLSDWLRKEVNTSKTHVIYRTYAPVHXR

SEQ ID NO: 17425 - DNA, 1528 bp, Zea mays subsp. mays; identical to SEQ ID NO: 8571
  misc_feature (1)..(1528): Ceres Seq. ID no. 12408393
  misc_feature (1)..(1528): Ortholog of  Ceres SEQ ID NO 14301920 as cited in SEQ ID NO 69277

SEQ ID NO: 17426 - protein, 508 aa, Zea mays subsp. mays; identical to SEQ ID NO: 8572
  peptide (1)..(508): Ceres Seq. ID no. 12408394

SEQ ID NO: 17427 - protein, 471 aa, Zea mays subsp. mays; identical to SEQ ID NO: 8573
  peptide (1)..(471): Ceres Seq. ID no. 12408395

SEQ ID NO: 17428 - protein, 469 aa, Zea mays subsp. mays; identical to SEQ ID NO: 8574
  peptide (1)..(469): Ceres Seq. ID no. 12408396

SEQ ID NO: 17429 - DNA, 457 bp, Zea mays subsp. mays
  misc_feature (1)..(457): Ceres Seq. ID no. 1674133
  misc_feature (1)..(457): Ortholog of  Ceres SEQ ID NO 13495070 as cited in SEQ ID NO 53216
  misc_feature (1)..(457): Ortholog of  Ceres SEQ ID NO 13661333 as cited in SEQ ID NO 61620
  misc_feature (1)..(457): Ortholog of  Ceres SEQ ID NO 13596812 as cited in SEQ ID NO 62283
  misc_feature (1)..(457): Ortholog of  Ceres SEQ ID NO 13623021 as cited in SEQ ID NO 0
gtggtgttcatttgttctcactaaaattatgtgtgcagctgtagcttcgtcgcctgtatggacatgtttatttctgaaatcaagtggatattcaaatgcatcttctggcatgggagttgctcctaacattagggagacattcgttgagcttcaaatgaagaaggcattccgatatgttatcttcaaaatcgaagagaagcaaaagcaggtggttgtggagaagacaggggctactactgaaagctatgatgattttttggcctctctcccagagaatgactgccgatatgcgctgtatgattttgattttgttactggggagaatgtgcagaaaagcaagattttcttcattgcctggtccccatcgacatcccgcatacgtgctaagatgctgtactccacgtcgaaggaccgcatcaagtacgagcttgacgggttccactacgaaatccaggcg

SEQ ID NO: 17430 - protein, 152 aa, Zea mays subsp. mays
  peptide (1)..(152): Ceres Seq. ID no. 1674134
WCSFVLTKIMCAAVASSPVWTCLFLKSSGYSNASSGMGVAPNIRETFVELQMKKAFRYVIFKIEEKQKQVVVEKTGATTESYDDFLASLPENDCRYALYDFDFVTGENVQKSKIFFIAWSPSTSRIRAKMLYSTSKDRIKYELDGFHYEIQA

SEQ ID NO: 17431 - protein, 143 aa, Zea mays subsp. mays
  peptide (1)..(143): Ceres Seq. ID no. 1674135
MCAAVASSPVWTCLFLKSSGYSNASSGMGVAPNIRETFVELQMKKAFRYVIFKIEEKQKQVVVEKTGATTESYDDFLASLPENDCRYALYDFDFVTGENVQKSKIFFIAWSPSTSRIRAKMLYSTSKDRIKYELDGFHYEIQA

SEQ ID NO: 17432 - protein, 116 aa, Zea mays subsp. mays
  peptide (1)..(116): Ceres Seq. ID no. 1674136
MGVAPNIRETFVELQMKKAFRYVIFKIEEKQKQVVVEKTGATTESYDDFLASLPENDCRYALYDFDFVTGENVQKSKIFFIAWSPSTSRIRAKMLYSTSKDRIKYELDGFHYEIQA

SEQ ID NO: 17433 - DNA, 1480 bp, Zea mays subsp. mays
  misc_feature (1)..(1480): Ceres Seq. ID no. 12359859
  misc_feature (1)..(1480): Ortholog of  Ceres SEQ ID NO 13594132 as cited in SEQ ID NO 58933
cttgtggacttgtggccttgtggggcaattggctagatgggaaagaaggtggctgttgtggtgggagggagtgttgctgggctagcgtgcgctcacgccgtggctggcgcgggatgggaggtggttgtgctggagaaggcggcagcgccggcggcggggagcggcacgggcgccggactgggcctcgacgcgcagtctatggagattctctcgcgctggatcccggggtggggaatcgacgcggtcacgctgccgctcgccgtcgatctgaacgtagccacggacagcgcgacgaaggcggtgaggacgctggcgagggacgaagacttcaaattccgggcggcccactggggcgacctgcaccggcggctgcacgaggagctgccgcccgcggtgagcgtgctgtgggggcaccagttcctgtcgttcgaggcgccggacgacacacgcggggtcgtcgcgacggcccgcgtgctgcggacgggagggacggttgaggccacgggggacctgctcatcgccgcggacggctccacgtcgtctgtccgtcgcagcttcttgccagacctcaagctcaggtattccgggtactgcgcgtggcggggcgtgtttgatttcagcgggaaggagagctctgacaccatgaccagcatccgaagagcctacccggagctcggcaactgcctctacttcgaccttgcttacaagacccacgccgtgctctacgagctgcccaggagcaggctcaactggctctggtacatcaacggcccagaaccggagctcgcggggaactcggtgaccatggaggcgactgacgccatggtgggacgaatgcggaacgaggcggagcgcgtctggtgccccgagctggcgcgtctggtcagggagaccgcggcgccgttcgtaaacgtgatctacgacgcagacccgctgccgcggttgtcgtggacgggcggccgcgtggtactggtcggcgacgcggcgcacccgacgactccgcacgggctgcggagcaccaacatgtcggtcatggacgcgtgcacgctcgggcagtgcttggcgaactggaactcagagccgacgcctgcgcgcgcgctggcagagtacgaggcggtgcgcctgcccgttgtggcggaacaagtgctccacgcccgccagctcgggaggctcaagcagggcctgccagtggacggtgaggcggaggacgggtttgacgtgacgacggcaaaggccgaggtgctgcagctacggcagaggacaatgccgttcttcgatggcgcacctgccgcagttggcggtgattttcctctcgttggcagtacaagatgaatcgagacagcattacctgtatgactctgacatttaatcatggtttggcatagcttcaccaaatacaattaaaaaatatatagtttagaattacctgtatgactatgaaatttaatgatggcttggcatagcttcaccaaatacaatt

SEQ ID NO: 17434 - protein, 431 aa, Zea mays subsp. mays
  peptide (1)..(431): Ceres Seq. ID no. 12359860
MGKKVAVVVGGSVAGLACAHAVAGAGWEVVVLEKAAAPAAGSGTGAGLGLDAQSMEILSRWIPGWGIDAVTLPLAVDLNVATDSATKAVRTLARDEDFKFRAAHWGDLHRRLHEELPPAVSVLWGHQFLSFEAPDDTRGVVATARVLRTGGTVEATGDLLIAADGSTSSVRRSFLPDLKLRYSGYCAWRGVFDFSGKESSDTMTSIRRAYPELGNCLYFDLAYKTHAVLYELPRSRLNWLWYINGPEPELAGNSVTMEATDAMVGRMRNEAERVWCPELARLVRETAAPFVNVIYDADPLPRLSWTGGRVVLVGDAAHPTTPHGLRSTNMSVMDACTLGQCLANWNSEPTPARALAEYEAVRLPVVAEQVLHARQLGRLKQGLPVDGEAEDGFDVTTAKAEVLQLRQRTMPFFDGAPAAVGGDFPLVGSTR

SEQ ID NO: 17435 - protein, 377 aa, Zea mays subsp. mays
  peptide (1)..(377): Ceres Seq. ID no. 12359861
MEILSRWIPGWGIDAVTLPLAVDLNVATDSATKAVRTLARDEDFKFRAAHWGDLHRRLHEELPPAVSVLWGHQFLSFEAPDDTRGVVATARVLRTGGTVEATGDLLIAADGSTSSVRRSFLPDLKLRYSGYCAWRGVFDFSGKESSDTMTSIRRAYPELGNCLYFDLAYKTHAVLYELPRSRLNWLWYINGPEPELAGNSVTMEATDAMVGRMRNEAERVWCPELARLVRETAAPFVNVIYDADPLPRLSWTGGRVVLVGDAAHPTTPHGLRSTNMSVMDACTLGQCLANWNSEPTPARALAEYEAVRLPVVAEQVLHARQLGRLKQGLPVDGEAEDGFDVTTAKAEVLQLRQRTMPFFDGAPAAVGGDFPLVGSTR

SEQ ID NO: 17436 - protein, 229 aa, Zea mays subsp. mays
  peptide (1)..(229): Ceres Seq. ID no. 12359862
MTSIRRAYPELGNCLYFDLAYKTHAVLYELPRSRLNWLWYINGPEPELAGNSVTMEATDAMVGRMRNEAERVWCPELARLVRETAAPFVNVIYDADPLPRLSWTGGRVVLVGDAAHPTTPHGLRSTNMSVMDACTLGQCLANWNSEPTPARALAEYEAVRLPVVAEQVLHARQLGRLKQGLPVDGEAEDGFDVTTAKAEVLQLRQRTMPFFDGAPAAVGGDFPLVGSTR

SEQ ID NO: 17437 - DNA, 1285 bp, Zea mays subsp. mays
  misc_feature (1)..(1285): Ceres Seq. ID no. 12383461
  misc_feature (1)..(1285): Ortholog of  Ceres SEQ ID NO 15170595 as cited in SEQ ID NO 57510
  misc_feature (1)..(1285): Ortholog of  Ceres SEQ ID NO 13655218 as cited in SEQ ID NO 68872
atacatccctctccgtctccctaccgctcccgtcccgtccgctgctggctctgcatatcccgcgcccgactcccgttgctgcgtgcggcggcccgactagtcgcgccgcgctgcgctcggcttgattgaaccggccgggatgggggtgttggaggacctcgtggcgagagcgggcgggtgcgcggtcatcgacggcggcttcgccacgcagctggaggcgctcggcgccgacatcaacgacccgctctggagcgccgcttgcctcatcaccaggccgcacctcgtcaaggaggttcatatgcagtatcttgaagctggtgcggacgtcatcatttcatcatcttaccaggcaacaatcccgggtttcatagctagaggaatgtctgtcgctgaggcagaagatttactgcgaacaagtgtaaaactggccaatgaagctcgagatgaattttggaagtcaacactgaggaagtccaaacctatttacaaccgtgctctggttgctgcatccattggtagctacggagcctatcttgctgatggatcggagtacagtggatcatacggagctgacatcacagccgagaagctgaaggacttccacaggcgccggctgcaggttcttgcaagtgccggtcctgacctgattgcgtttgaggccattcctaaccaaatggaggcacaggcattggttgagcttctggaggaagagaaagtccagatcccttcctggatctgcttcagctccgtggacggtaagaacctgtgctctggggagagttttgcggactgccttaagatcctcaacgcgagcgagaaggtggccgttgtaggcgtgaactgcacacctcctcagttcatcgagggcatcatatgtgaatttaggaagcaaaccaagaaggcgattgcagtttacccgaacagcggcgaagtttgggacgggagagcgaagaggtggctgccggttgagtgcttgggtcacaaaagcttcgacgctctcgcgaagagatggcaggaggcgggggccagcctcatcggagggtgctgccggacaacgccttcaactattagggctgtttccaagatcctcaaaggaaggacggggcattgatttgtttattataattgagctgttgttgcattatgtcactagccagaataacattcagaatatgtatcctgttgctcttccgttcccctttctaaaataaggtatcaatataattttgcagtgtaaaacgtaatactagtttgtagcgctgacccacagtattgcttagtctcc

SEQ ID NO: 17438 - protein, 323 aa, Zea mays subsp. mays
  peptide (1)..(323): Ceres Seq. ID no. 12383462
MGVLEDLVARAGGCAVIDGGFATQLEALGADINDPLWSAACLITRPHLVKEVHMQYLEAGADVIISSSYQATIPGFIARGMSVAEAEDLLRTSVKLANEARDEFWKSTLRKSKPIYNRALVAASIGSYGAYLADGSEYSGSYGADITAEKLKDFHRRRLQVLASAGPDLIAFEAIPNQMEAQALVELLEEEKVQIPSWICFSSVDGKNLCSGESFADCLKILNASEKVAVVGVNCTPPQFIEGIICEFRKQTKKAIAVYPNSGEVWDGRAKRWLPVECLGHKSFDALAKRWQEAGASLIGGCCRTTPSTIRAVSKILKGRTGH

SEQ ID NO: 17439 - protein, 270 aa, Zea mays subsp. mays
  peptide (1)..(270): Ceres Seq. ID no. 12383463
MQYLEAGADVIISSSYQATIPGFIARGMSVAEAEDLLRTSVKLANEARDEFWKSTLRKSKPIYNRALVAASIGSYGAYLADGSEYSGSYGADITAEKLKDFHRRRLQVLASAGPDLIAFEAIPNQMEAQALVELLEEEKVQIPSWICFSSVDGKNLCSGESFADCLKILNASEKVAVVGVNCTPPQFIEGIICEFRKQTKKAIAVYPNSGEVWDGRAKRWLPVECLGHKSFDALAKRWQEAGASLIGGCCRTTPSTIRAVSKILKGRTGH

SEQ ID NO: 17440 - protein, 243 aa, Zea mays subsp. mays
  peptide (1)..(243): Ceres Seq. ID no. 12383464
MSVAEAEDLLRTSVKLANEARDEFWKSTLRKSKPIYNRALVAASIGSYGAYLADGSEYSGSYGADITAEKLKDFHRRRLQVLASAGPDLIAFEAIPNQMEAQALVELLEEEKVQIPSWICFSSVDGKNLCSGESFADCLKILNASEKVAVVGVNCTPPQFIEGIICEFRKQTKKAIAVYPNSGEVWDGRAKRWLPVECLGHKSFDALAKRWQEAGASLIGGCCRTTPSTIRAVSKILKGRTGH

SEQ ID NO: 17441 - DNA, 1658 bp, Zea mays subsp. mays
  misc_feature (1)..(1658): Ceres Seq. ID no. 13493696
  misc_feature (1)..(1658): Ortholog of  Ceres SEQ ID NO 13596816 as cited in SEQ ID NO 62287
gcacgagaccattacctagaacatcctaatcaaaaagcaaccagcaggccattctctcgccgtctcatcacaactagcgccactctagtagtaagtactaagtagtagtaggaggtggcagcagcagccaatcttgccacgatgacactctgcaccgtcttgctccagatcctccttccaacgctgctcttggtttctgccatcacaggcgcggacgctagcggcatcggcgtcaactacggcacgcggggcacgacgctcccggcgccggccgacgtggcgcggttcctggcccgggacaccatcttcgaccgcgtgaggctgttggacgccgacccggtcctgctgcgggccttcgcaggcacgggcctcgccgtggacgtgacggtgcccaacggcgtcgtcccgcgcctgttgaatctgaccttcgcgcggcgctgggtgcgcgacaacgtgacgccctacgcgggcgccaccaacatctcgcgcctcctggtcggcgacgaggtgaccaccgaggccaaccggacgctgctgctggcgctggtgccggccatgcagaacctgcacaccgcgctggtcgccgcgtccctgcacggccgggtgaaggtctccaccacgcactcgctcggggtgctcaccaccacggagcagccgtcggcggcgcggttccgcgacggctacgacgcggccatcgtgaggccgctgctcaggttcctccgcgcgaccggcgcgccgttcatggtgaacgcgtacccgttctacgcgctcgccaacgacagcagcctcgacttcgcgctgttccgggtgaacgacggcgtcatggaccagggcaccgggctggtgtacggcaacatgctggacgcgcagctcgacgccgtgcactcggccgtcaggcggatgggcttcggggacgtcgacatcgccgtgtcggagaccgggtggccatcggccggggaggactgggaggtcggcgtcggcgcggacctcgcccgggactacaacatcaacgccatccgccacctcggctccggcgtcggcacgccgctcatgcccaaccgcaccttcgaggtctccatcttctccctcttcgacgagaacctcaagccagggccggtgtcggagaggaatttcggcttgttccgcggcgacatgacgccggtctacgacgtcggcatcttcactgatccggagacccttgagccggtgagagcgaaggtgacgagccggaaatggtgcgtgccggagccggcggcggacgagatggtgctgcaggaaaacatcgacttcgcgtgcggccaaaagggcgtcgactgtaccgcgatccggccgggcggcgtctgctacgagccggacacggtgcaggcccacgcggcgtacgccatgaacctctacttccaggccaatggccagcatgcctttgactgcgattttggacagacaggcattgttaccacagctgatcccagttatggaggctgcaaattcatgtgaacaaggcataggggatgtttgttttgaggaatcactctattgaaatttagatggtacatcatgagtccatttctcaaatttgttgggatgattatattacttatattaatactaactaactatgaaaaatgagatagtgatagataaactcattttatttcatc

SEQ ID NO: 17442 - protein, 450 aa, Zea mays subsp. mays
  peptide (1)..(450): Ceres Seq. ID no. 13493697
MTLCTVLLQILLPTLLLVSAITGADASGIGVNYGTRGTTLPAPADVARFLARDTIFDRVRLLDADPVLLRAFAGTGLAVDVTVPNGVVPRLLNLTFARRWVRDNVTPYAGATNISRLLVGDEVTTEANRTLLLALVPAMQNLHTALVAASLHGRVKVSTTHSLGVLTTTEQPSAARFRDGYDAAIVRPLLRFLRATGAPFMVNAYPFYALANDSSLDFALFRVNDGVMDQGTGLVYGNMLDAQLDAVHSAVRRMGFGDVDIAVSETGWPSAGEDWEVGVGADLARDYNINAIRHLGSGVGTPLMPNRTFEVSIFSLFDENLKPGPVSERNFGLFRGDMTPVYDVGIFTDPETLEPVRAKVTSRKWCVPEPAADEMVLQENIDFACGQKGVDCTAIRPGGVCYEPDTVQAHAAYAMNLYFQANGQHAFDCDFGQTGIVTTADPSYGGCKFM

SEQ ID NO: 17443 - protein, 312 aa, Zea mays subsp. mays
  peptide (1)..(312): Ceres Seq. ID no. 13493698
MQNLHTALVAASLHGRVKVSTTHSLGVLTTTEQPSAARFRDGYDAAIVRPLLRFLRATGAPFMVNAYPFYALANDSSLDFALFRVNDGVMDQGTGLVYGNMLDAQLDAVHSAVRRMGFGDVDIAVSETGWPSAGEDWEVGVGADLARDYNINAIRHLGSGVGTPLMPNRTFEVSIFSLFDENLKPGPVSERNFGLFRGDMTPVYDVGIFTDPETLEPVRAKVTSRKWCVPEPAADEMVLQENIDFACGQKGVDCTAIRPGGVCYEPDTVQAHAAYAMNLYFQANGQHAFDCDFGQTGIVTTADPSYGGCKFM

SEQ ID NO: 17444 - protein, 250 aa, Zea mays subsp. mays
  peptide (1)..(250): Ceres Seq. ID no. 13493699
MVNAYPFYALANDSSLDFALFRVNDGVMDQGTGLVYGNMLDAQLDAVHSAVRRMGFGDVDIAVSETGWPSAGEDWEVGVGADLARDYNINAIRHLGSGVGTPLMPNRTFEVSIFSLFDENLKPGPVSERNFGLFRGDMTPVYDVGIFTDPETLEPVRAKVTSRKWCVPEPAADEMVLQENIDFACGQKGVDCTAIRPGGVCYEPDTVQAHAAYAMNLYFQANGQHAFDCDFGQTGIVTTADPSYGGCKFM

SEQ ID NO: 17445 - DNA, 1863 bp, Zea mays subsp. mays
  misc_feature (1)..(1863): Ceres Seq. ID no. 12387583
  misc_feature (1)..(1863): Ortholog of  Ceres SEQ ID NO 14309934 as cited in SEQ ID NO 20583
  misc_feature (1)..(1863): Ortholog of  Ceres SEQ ID NO 15171508 as cited in SEQ ID NO 58526
  misc_feature (1)..(1863): Ortholog of  Ceres SEQ ID NO 15168378 as cited in SEQ ID NO 59129
  misc_feature (1)..(1863): Ortholog of  Ceres SEQ ID NO 13654989 as cited in SEQ ID NO 63117
  misc_feature (1)..(1863): Ortholog of  Ceres SEQ ID NO 13655640 as cited in SEQ ID NO 63844
  misc_feature (1)..(1863): Ortholog of  Ceres SEQ ID NO 13656662 as cited in SEQ ID NO 65594
  misc_feature (1)..(1863): Ortholog of  Ceres SEQ ID NO 14303173 as cited in SEQ ID NO 66550
  misc_feature (1)..(1863): Ortholog of  Ceres SEQ ID NO 13584744 as cited in SEQ ID NO 69137
gcacgagaccattacctagaacatcctaatcgaaaaaccatttcgtttcggcttgagcagccggggagctgagcagcgcggcgcccatgtcggactccgagctgtcccagggcacgctagtgttcggcctccacctctgggagctcgtcggcatcggtgtcggtgccgcattcgtgctcctcctcgtcctcctctccctgctctgcctcctcgcctcccgccgccgccgacgccgccgtgctgcccccgtcctccacctccccgccgtcgtgcccaatgcccagcccaagcaccccgccaagccccccaaggacatccaagaggtgccctcccgcggcaccgcggcccccgccgccccggccaaggcgccgctcgcccaggtgctgcaggcgccgccgccggactccatccagatcgagacggggaaggagcaccgtatcacgttcccggagcagccgccgcccccgcaccaccagcggagcggggggccgtcgtctcggggcgccagcggggagagccgtggcggtggtggggaaccgggggtcccggaggtgtcgcacctggggtggggccactggtacacactcaaggagctggaggacgccacgtgcatgttcgccgacgagaaggtgatcggcgagggcggctacggcatagtgtaccacggcgtgctggagggcggagtgcaggtcgccgtcaaaaacttgctcaacaacagggggcaggcagaacgggaattcaaggttgaggtggaagctatcgggcgagtgcgacacaagaaccttgttcggttgttaggatactgcgctgaaggcaaccaaaggatgcttgtgtatgagtacgttaataatggaaacttggagcaatggctccatggggatgttggccctgtgagccctcttacatgggatatcagaatgaagattattctgggaacagcaaaagggttaatgtatttgcacgagggacttgagccaaaggttgttcaccgtgatgtcaagtcgagcaatattcttcttgacaagcattggaatgcaaagctttctgattttgggctagcgaaacttttgggttcagaaaggagttatgtcacaaccagggtcatggggacatttgggtatgttgcgccagagtatgcgggcactggcatgttgaatgaaactagcgatgtctatagtttcggaattcttatcatggaaataatatctggccgtgtacctgttgattacaacaggccgccaggggagattaatctagttgagtggctgaagacgatggtcagcaacagaaattctgaaggggttttggatccaaagatgaccgagaagcctacttctagggcattgaagaaggctttgctagtggctctgcggtgcgtagaccccgaagctcgcaagaggccaaagattgggcatgtcattcacatgcttgaggttgacgatttcccgtacagagatgagcgccggggtggcaaagctccagcccaagcaagatcggtggaaacgccacctgcaagcgaacctggcgatagcagcggaaacaacactccaaaggacgcgcctaatggagaacctttcaagtggagaaactaagaggactagccaccaggaaaacggtggttgcttgagtttgtgcctgataaagaagctggatatggttggttggttggttggttggttggtcgggcatgcaaactccacaagcaccagtgtcggtcgtcgtcgtgacagtatatgtacattgttgaatcgatatgttagccatagcgattttttttccagttggttttcttggggccgtatatttatgcgaaggatgattttgtgtgataaaggcgcgcgctctcgtgtgtattcctgaggc

SEQ ID NO: 17446 - protein, 501 aa, Zea mays subsp. mays
  peptide (1)..(501): Ceres Seq. ID no. 12387584
MSDSELSQGTLVFGLHLWELVGIGVGAAFVLLLVLLSLLCLLASRRRRRRRAAPVLHLPAVVPNAQPKHPAKPPKDIQEVPSRGTAAPAAPAKAPLAQVLQAPPPDSIQIETGKEHRITFPEQPPPPHHQRSGGPSSRGASGESRGGGGEPGVPEVSHLGWGHWYTLKELEDATCMFADEKVIGEGGYGIVYHGVLEGGVQVAVKNLLNNRGQAEREFKVEVEAIGRVRHKNLVRLLGYCAEGNQRMLVYEYVNNGNLEQWLHGDVGPVSPLTWDIRMKIILGTAKGLMYLHEGLEPKVVHRDVKSSNILLDKHWNAKLSDFGLAKLLGSERSYVTTRVMGTFGYVAPEYAGTGMLNETSDVYSFGILIMEIISGRVPVDYNRPPGEINLVEWLKTMVSNRNSEGVLDPKMTEKPTSRALKKALLVALRCVDPEARKRPKIGHVIHMLEVDDFPYRDERRGGKAPAQARSVETPPASEPGDSSGNNTPKDAPNGEPFKWRN

SEQ ID NO: 17447 - protein, 326 aa, Zea mays subsp. mays
  peptide (1)..(326): Ceres Seq. ID no. 12387585
MFADEKVIGEGGYGIVYHGVLEGGVQVAVKNLLNNRGQAEREFKVEVEAIGRVRHKNLVRLLGYCAEGNQRMLVYEYVNNGNLEQWLHGDVGPVSPLTWDIRMKIILGTAKGLMYLHEGLEPKVVHRDVKSSNILLDKHWNAKLSDFGLAKLLGSERSYVTTRVMGTFGYVAPEYAGTGMLNETSDVYSFGILIMEIISGRVPVDYNRPPGEINLVEWLKTMVSNRNSEGVLDPKMTEKPTSRALKKALLVALRCVDPEARKRPKIGHVIHMLEVDDFPYRDERRGGKAPAQARSVETPPASEPGDSSGNNTPKDAPNGEPFKWRN

SEQ ID NO: 17448 - protein, 255 aa, Zea mays subsp. mays
  peptide (1)..(255): Ceres Seq. ID no. 12387586
MLVYEYVNNGNLEQWLHGDVGPVSPLTWDIRMKIILGTAKGLMYLHEGLEPKVVHRDVKSSNILLDKHWNAKLSDFGLAKLLGSERSYVTTRVMGTFGYVAPEYAGTGMLNETSDVYSFGILIMEIISGRVPVDYNRPPGEINLVEWLKTMVSNRNSEGVLDPKMTEKPTSRALKKALLVALRCVDPEARKRPKIGHVIHMLEVDDFPYRDERRGGKAPAQARSVETPPASEPGDSSGNNTPKDAPNGEPFKWRN

SEQ ID NO: 17449 - DNA, 1821 bp, Zea mays subsp. mays
  misc_feature (1)..(1821): Ceres Seq. ID no. 12375293
  misc_feature (1)..(1821): Ortholog of  Ceres SEQ ID NO 14307682 as cited in SEQ ID NO 54529
attaccgcctccgcaaccagcccgccgcgcccccgagcgtttcgttccgggagcggcaagactgggacacgccagccctttatttcgagctttctgcgtgcgggaggggggttgacaggcgatggcggccgagggcgaggcggcggcgctggagttcacaccgacgtggatcgtcgcggcggtctgctctctcatcgtgctcctctcgctcgtcgccgagcgatgcctccactacctcggcaagacgctcaagaggaagaaccagaagccgctcttcgaggcgctgctcaaggtcaaagaagagttgatgcttctggggttcatctccctgctgctgacggtgttccaggggatgatccggaggacgtgcatccctgaacgctggacattccacatgctgccatgcgagaagccagatgagaaggccggtgaggccgccaccatggagcattttgtagggacgcttggcaggatcggtaggcgtctgttgcaggaaggcactgctggggctgagcaatgccagaagaagggaaaagttccacttttgtcccttgaagccatacatcagctgcacattttcatatttgttctggcaatcacacatgttattttcagcgtcacaactatgcttttaggaggtgcacagatacaccaatggaaacagtgggagaatggaattaaaaaagatgctcctggaaatgggcctaaggtaaccaatgtacatcatcatgaatttatcaagaaacgttttaagggtattggcaaagattctataatattgagttggctgcattcttttggtaagcagttttatagatcagtatctaaatcagattacaccacaatgcgtcttggttttatcatgactcactgccctggaaatccaaaatttgatttccatagatacatggtaagggttttagaggcggattttaagaaagtggtaggcataagctggtacttgtgggtcttcgtggtgatatttctgttgctgaatgttaatggctgggcacacatacttttggattgctttccttccccttattcttctgttagccattggcactaagctggagcatgtcatagctcagctagcccatgatgtagctgagaagcacacagcggtcgagggcgatgtgatcgtaaaaccatcagatgaacacttctggttcggcaagcctagggttatcctttacctgatccacttcatcctctttcagaatgcgtttgagattgcgtttttcttctggatactgagcacttatggattcgactcgtgcatcatgggacaagttcgttttattgtgccaaggcttgtcatcggggtggttattcagcttctctgcagctacagcaccttgcctctgtatgcaattgtaacccagatggggagctgctacaagaaggagatcttcaacgagcatgtgcagcagggcgtcctgggctgggctcagaaggtcaagatgaaaaagggactgaagggagctgcatctgctagcaaggacgaatcgattaccaatgccgattcggcaggaccttccgttaagattgaaatggcgaaggctggggaggatgttgagatcgttggaaacacaggttgattgggacaatagggtgcccgtgttgtaatgatgtaacaggctaatatgccatcatcttttttttgtagatactagatagcttgctgtggcaataccgcaatagcggtgaactagagaaggtttgggcccgggagcctcatctgttatcggtccagtaggaagcaaattcttatatacgggatatcgataaaaaatgaactaagttcctggattcattacc

SEQ ID NO: 17450 - protein, 315 aa, Zea mays subsp. mays
  peptide (1)..(315): Ceres Seq. ID no. 12375294
MAAEGEAAALEFTPTWIVAAVCSLIVLLSLVAERCLHYLGKTLKRKNQKPLFEALLKVKEELMLLGFISLLLTVFQGMIRRTCIPERWTFHMLPCEKPDEKAGEAATMEHFVGTLGRIGRRLLQEGTAGAEQCQKKGKVPLLSLEAIHQLHIFIFVLAITHVIFSVTTMLLGGAQIHQWKQWENGIKKDAPGNGPKVTNVHHHEFIKKRFKGIGKDSIILSWLHSFGKQFYRSVSKSDYTTMRLGFIMTHCPGNPKFDFHRYMVRVLEADFKKVVGISWYLWVFVVIFLLLNVNGWAHILLDCFPSPYSSVSHWH

SEQ ID NO: 17451 - protein, 253 aa, Zea mays subsp. mays
  peptide (1)..(253): Ceres Seq. ID no. 12375295
MLLGFISLLLTVFQGMIRRTCIPERWTFHMLPCEKPDEKAGEAATMEHFVGTLGRIGRRLLQEGTAGAEQCQKKGKVPLLSLEAIHQLHIFIFVLAITHVIFSVTTMLLGGAQIHQWKQWENGIKKDAPGNGPKVTNVHHHEFIKKRFKGIGKDSIILSWLHSFGKQFYRSVSKSDYTTMRLGFIMTHCPGNPKFDFHRYMVRVLEADFKKVVGISWYLWVFVVIFLLLNVNGWAHILLDCFPSPYSSVSHWH

SEQ ID NO: 17452 - protein, 238 aa, Zea mays subsp. mays
  peptide (1)..(238): Ceres Seq. ID no. 12375296
MIRRTCIPERWTFHMLPCEKPDEKAGEAATMEHFVGTLGRIGRRLLQEGTAGAEQCQKKGKVPLLSLEAIHQLHIFIFVLAITHVIFSVTTMLLGGAQIHQWKQWENGIKKDAPGNGPKVTNVHHHEFIKKRFKGIGKDSIILSWLHSFGKQFYRSVSKSDYTTMRLGFIMTHCPGNPKFDFHRYMVRVLEADFKKVVGISWYLWVFVVIFLLLNVNGWAHILLDCFPSPYSSVSHWH

SEQ ID NO: 17453 - DNA, 2228 bp, Zea mays subsp. mays
  misc_feature (1)..(2228): Ceres Seq. ID no. 12377954
  misc_feature (1)..(2228): Ortholog of  Ceres SEQ ID NO 15176759 as cited in SEQ ID NO 59678
  misc_feature (1)..(2228): Ortholog of  Ceres SEQ ID NO 14307904 as cited in SEQ ID NO 66440
  misc_feature (1)..(2228): Ortholog of  Ceres SEQ ID NO 13659971 as cited in SEQ ID NO 67565
  misc_feature (1)..(2228): Ortholog of  Ceres SEQ ID NO 13500385 as cited in SEQ ID NO 67583
gcacgagaccattacctagaacatcctaatcgaaaaaccttcctccgttgcctcctcttccgcggccccgtcgatgggcttggctttaccagtggcgggttcccacacgggggctagacgccgccaccgctgaccccgtctacaccgaatcccccgcgcgatttaacccctcgcctcgctcgccgcctccgcttccatacaaccgcgcactccaaacgcgcacgcgctgttcgttcctcggccgctctgtccacccccgtccttctccgccctcaacagatctccgccggccgtgcggttccttaattcgccttctccgggactgtcggatctccgcggcggctggggatgggcaactgctgcgtgacgccgaaagcagccgacgacgccggcggcggcaagaagcccaaggagccgaagcagaagaagggtaagaagccgaaccccttctcgatcgattacaaccgctcggggccaggcgagcgcgccaaagctggtggtgctgcgggatcccacggggcgggacatcgcggcgcggtacgagctcggcgcggagctcgggcgcggcgagttcggggttacctacctctgcacagaccgtgcctcaggggaggcgctggcctgcaagtctatctccaagaagaagctccgcaccgccgtcgacctcgaggacgtgcgccgggaggtggagatcatgcgccacctccccaagcaccccaacgtcgtcacgctcagggacacgtacgaggacgacaatgccgtgcacctcgtcatggagctctgcgagggcggtgagctcttcgaccgcatcgtggcgcggggacactacactgagcgtgctgccgccttggtcttacgcactatcgttgaggtcgtgcagatgtgccataagcatggagtgatgcacagggatctcaaaccagaaaatttcttgtttgcaaacaagaaagaatcagcggcacttaaggccattgattttggcctgtctgtatttttcacaccaggcgaacggttttctgagattgttggaagtccttattacatggctccagaggtgctaaagagaaactatggcccagaggttgatgtttggagtgcaggagtgattctgtacattcttctttgtggtgtccccccattctgggcagaaacggaacagggtgttgctcaggcaatcattcgatctgtcattgatttcaaaagagatccatggccaagggtgtctgataatgccaaagaccttgtcagaggaatgctgaatccggacccaaaacgacgattgacagctcaccaagtgcttggtcacccatggttgcagaacattaagaaggctccaaatgtcaatttgggtgaaactgttaaggccagactccaacaattctctgtgatgaacaagttcaagaagcatgcacttagggttatagctgagcatctttcggtagaagaggctgctgacataaaggatatgtttgagaagatggatcttaacaaggatcaaatgcttagtttcgaggagctgaagcttggtctgcataagtttggtcaccagatgcctgatgcagatgttcaaacactaatggaagcggcggatgctgatggaaatggatccttgaattatggagaatttgttacattatttgttcatctaagaaagattggaaatgatgagcatctgcataaggcatttgcatacttcgaccggaaccagagtggttatattgaaattgatgaactccgtgagtcattagctgatgaccttggacaaaaccgtgaagagattatcaatgccatcatccgtgatgtagacaccgataaggatggcaagataagctacgatgagtttgcgacgatgatgaaggccggaacagactggaggaaagcatccagacagtactcgagagagcggttcaccagtctgagccttaagctgcaaaaggatggatcgctgcagatgacgagtacacggtagcccgataacaccataggcaagttgtgaattacagatggaaaccatgtgtagatttttctggttgtttgttgacagctcttctgcttgtcctgatgttccattgctttgtattcttcgcttgcggcctgtttgaaggattaggggggattgtttatgctatgattgtatttagactgcatgatccatgcctcgctcgtttccaaagtgtactgtacaaaagaaagaggagaaagggattatgaggctctgctcatttctt

SEQ ID NO: 17454 - protein, 424 aa, Zea mays subsp. mays
  peptide (1)..(424): Ceres Seq. ID no. 12377955
MRHLPKHPNVVTLRDTYEDDNAVHLVMELCEGGELFDRIVARGHYTERAAALVLRTIVEVVQMCHKHGVMHRDLKPENFLFANKKESAALKAIDFGLSVFFTPGERFSEIVGSPYYMAPEVLKRNYGPEVDVWSAGVILYILLCGVPPFWAETEQGVAQAIIRSVIDFKRDPWPRVSDNAKDLVRGMLNPDPKRRLTAHQVLGHPWLQNIKKAPNVNLGETVKARLQQFSVMNKFKKHALRVIAEHLSVEEAADIKDMFEKMDLNKDQMLSFEELKLGLHKFGHQMPDADVQTLMEAADADGNGSLNYGEFVTLFVHLRKIGNDEHLHKAFAYFDRNQSGYIEIDELRESLADDLGQNREEIINAIIRDVDTDKDGKISYDEFATMMKAGTDWRKASRQYSRERFTSLSLKLQKDGSLQMTSTR

SEQ ID NO: 17455 - protein, 398 aa, Zea mays subsp. mays
  peptide (1)..(398): Ceres Seq. ID no. 12377956
MELCEGGELFDRIVARGHYTERAAALVLRTIVEVVQMCHKHGVMHRDLKPENFLFANKKESAALKAIDFGLSVFFTPGERFSEIVGSPYYMAPEVLKRNYGPEVDVWSAGVILYILLCGVPPFWAETEQGVAQAIIRSVIDFKRDPWPRVSDNAKDLVRGMLNPDPKRRLTAHQVLGHPWLQNIKKAPNVNLGETVKARLQQFSVMNKFKKHALRVIAEHLSVEEAADIKDMFEKMDLNKDQMLSFEELKLGLHKFGHQMPDADVQTLMEAADADGNGSLNYGEFVTLFVHLRKIGNDEHLHKAFAYFDRNQSGYIEIDELRESLADDLGQNREEIINAIIRDVDTDKDGKISYDEFATMMKAGTDWRKASRQYSRERFTSLSLKLQKDGSLQMTSTR

SEQ ID NO: 17456 - protein, 362 aa, Zea mays subsp. mays
  peptide (1)..(362): Ceres Seq. ID no. 12377957
MCHKHGVMHRDLKPENFLFANKKESAALKAIDFGLSVFFTPGERFSEIVGSPYYMAPEVLKRNYGPEVDVWSAGVILYILLCGVPPFWAETEQGVAQAIIRSVIDFKRDPWPRVSDNAKDLVRGMLNPDPKRRLTAHQVLGHPWLQNIKKAPNVNLGETVKARLQQFSVMNKFKKHALRVIAEHLSVEEAADIKDMFEKMDLNKDQMLSFEELKLGLHKFGHQMPDADVQTLMEAADADGNGSLNYGEFVTLFVHLRKIGNDEHLHKAFAYFDRNQSGYIEIDELRESLADDLGQNREEIINAIIRDVDTDKDGKISYDEFATMMKAGTDWRKASRQYSRERFTSLSLKLQKDGSLQMTSTR

SEQ ID NO: 17457 - DNA, 2039 bp, Zea mays subsp. mays
  misc_feature (1)..(2039): Ceres Seq. ID no. 12375245
  misc_feature (1)..(2039): Ortholog of  Ceres SEQ ID NO 15169264 as cited in SEQ ID NO 55026
  misc_feature (1)..(2039): Ortholog of  Ceres SEQ ID NO 15224709 as cited in SEQ ID NO 68627
gcacgagaccattacctagaacatcctaatcgaaaaaaaaataggaaacgagcaaaggtctggcgagctacctaccaataaactaccatctccacaaacaggctagcacgtagctatatgccagaactgacctagtagaggatcgatcgcagatggtgtttcctgccatcctccccaaggtggccgcacgatggctcttcacgttctaccgcgccgccagaaagctcaggcgccacgccttccagctctactaccgcaacaccgccgccaagccgtcgtccgccgtctcgcagcagcaggccggggccgccgccactgtcactgccgccgccgccttcaagaccggcgccgccatccctgacgccggcggccggaccgttgtgtgcgacatgcacggcgccctgctgcgctccaccgcgctcttcccctacttcatgctcgtggcctgcgagggcggcagcctcgtccgcgccatgctgctgctctgcgccttccccctcgtctgggcgctcggggagcgccgcggcgccggcgtccgggtgatggcgttcgtcaccttcgcggggctcaggcccagggacgtggacctcgtggcccgcgccgtcctgcccaagcactacatggagcagctcagcgcgctggcgtacggcagcctctggctcccggccaggaggaaggtggcggtgaccagcgcgccgcgggtcatgtccgagtggttcctcaaggagtacatggccgccgacgcggtggtcgggctcgagctgcagcacgtcaacgtcggccgccgccggtacttcactgggttgctgctgtcgtccggtcacgcgacgggaacggagctgaggcagaaggcgatcacggaggcgttgttaggcgccgaggacgaccccattgccgtcgtgggcatcatcagcgactccagcccgctcgacgacgagctcttcgtcccctactgcaaggaactttacgtcgtgagcagagagagcgcaaagaacgacaagctctcgcgggagaaatacccaaagccgctcatcttccacgacgggcgcctcgccttcctccccacccccgccgccatgctcgccttcttcctcttccttccgctcggcgtcgtcctctccgtcatccgcattaacatcggtatcgttctcccttacaagatcaacttcgcgacagccgcgatcttcggcgtccgcttccgcgcctccggcctccgcgccccgccggcagacggcgagcggcggaggggcgtcctctacgtgtgcacgcaccggacgcttgtcgaccccatcatgctcaccacggcgctgcagaagcccgtgccggccttgacgtacagcctcagccgcctgtccgagctgatcgcgcccatcaagacggtgcggctgacgcgcgaccgcgcgcgggacgccgagaccatgtccaggctgctggcgcagggcgacctcgcggtctgccccgagggaaccacctgccgcgagccttacctcctgccttcagcccgctgttcgcggagctcgcggacgacatggagcccgtggcgctggacgctcaggtgacgacgctctacggcaccacggcgagcggacacaagtggctcgaccctgtggcgttcttcgccaacccggtgccctcgtaccgggtggagtttctgggtgccgtcccgcgggagtggacgcgcgccgggggcaggacaggcgtcgaggtggctaactgggtgcagcggcggctgggccaggctctggacttcgagtgcaccgggctgactcgccgcgacaagtacatgatgctcgccggtaacgatggcgtggtcgccaagtagagagagcgcccggcgcgcgctgcaacagctgggtgtgtttttattatgcatacatgctgagtaaattattgtcgaaagctagttactgtaatttgcatggcagtaatggatcttttggttccgctgtgtagagaaattttgattagctgcaaaactaatcaaatactagatgcttggatttaaattcaaatcaaaatagtatatatatattttgtct

SEQ ID NO: 17458 - protein, 468 aa, Zea mays subsp. mays
  peptide (1)..(468): Ceres Seq. ID no. 12375246
MVFPAILPKVAARWLFTFYRAARKLRRHAFQLYYRNTAAKPSSAVSQQQAGAAATVTAAAAFKTGAAIPDAGGRTVVCDMHGALLRSTALFPYFMLVACEGGSLVRAMLLLCAFPLVWALGERRGAGVRVMAFVTFAGLRPRDVDLVARAVLPKHYMEQLSALAYGSLWLPARRKVAVTSAPRVMSEWFLKEYMAADAVVGLELQHVNVGRRRYFTGLLLSSGHATGTELRQKAITEALLGAEDDPIAVVGIISDSSPLDDELFVPYCKELYVVSRESAKNDKLSREKYPKPLIFHDGRLAFLPTPAAMLAFFLFLPLGVVLSVIRINIGIVLPYKINFATAAIFGVRFRASGLRAPPADGERRRGVLYVCTHRTLVDPIMLTTALQKPVPALTYSLSRLSELIAPIKTVRLTRDRARDAETMSRLLAQGDLAVCPEGTTCREPYLLPSARCSRSSRTTWSPWRWTLR

SEQ ID NO: 17459 - protein, 389 aa, Zea mays subsp. mays
  peptide (1)..(389): Ceres Seq. ID no. 12375247
MHGALLRSTALFPYFMLVACEGGSLVRAMLLLCAFPLVWALGERRGAGVRVMAFVTFAGLRPRDVDLVARAVLPKHYMEQLSALAYGSLWLPARRKVAVTSAPRVMSEWFLKEYMAADAVVGLELQHVNVGRRRYFTGLLLSSGHATGTELRQKAITEALLGAEDDPIAVVGIISDSSPLDDELFVPYCKELYVVSRESAKNDKLSREKYPKPLIFHDGRLAFLPTPAAMLAFFLFLPLGVVLSVIRINIGIVLPYKINFATAAIFGVRFRASGLRAPPADGERRRGVLYVCTHRTLVDPIMLTTALQKPVPALTYSLSRLSELIAPIKTVRLTRDRARDAETMSRLLAQGDLAVCPEGTTCREPYLLPSARCSRSSRTTWSPWRWTLR

SEQ ID NO: 17460 - protein, 374 aa, Zea mays subsp. mays
  peptide (1)..(374): Ceres Seq. ID no. 12375248
MLVACEGGSLVRAMLLLCAFPLVWALGERRGAGVRVMAFVTFAGLRPRDVDLVARAVLPKHYMEQLSALAYGSLWLPARRKVAVTSAPRVMSEWFLKEYMAADAVVGLELQHVNVGRRRYFTGLLLSSGHATGTELRQKAITEALLGAEDDPIAVVGIISDSSPLDDELFVPYCKELYVVSRESAKNDKLSREKYPKPLIFHDGRLAFLPTPAAMLAFFLFLPLGVVLSVIRINIGIVLPYKINFATAAIFGVRFRASGLRAPPADGERRRGVLYVCTHRTLVDPIMLTTALQKPVPALTYSLSRLSELIAPIKTVRLTRDRARDAETMSRLLAQGDLAVCPEGTTCREPYLLPSARCSRSSRTTWSPWRWTLR

SEQ ID NO: 17461 - DNA, 2124 bp, Zea mays subsp. mays
  misc_feature (1)..(2124): Ceres Seq. ID no. 12417416
  misc_feature (1)..(2124): Ortholog of  Ceres SEQ ID NO 13657677 as cited in SEQ ID NO 66119
  misc_feature (1)..(2124): Ortholog of  Ceres SEQ ID NO 14301550 as cited in SEQ ID NO 66519
atccaacgacccacactgagacgtcccctccccgctccgtcctctctcctctgccgccgagacgacgcgatggcggggtccgccgccttgccgccgctcgccgccttcgcgtcgctccttaccgcgcggcgcttcgccgccgccaggtccaagctccggtccctgctcacgccgcgcctactggcggtgccgttcgcggacctcgccgcctcgtcgctcccgcgcggcgcgccgccgcacgccgtggcggcgttccacgacatgctcttccgcgcgtacgcggacgcgggcgcggcgtgccgcgcggccgaggcgctcgacgccgccgtgtcccgcctcggcagcctcgacccgcgctcgctcacgttctcgctgctctcgctccgccgcgccgggcgcctcgcggacgccgcgggcctcctggagcgggcgctcggctcgtgcccgggctccgtctcgccgttcgccgcgtccgtcgtcgtcgacgggctctgcaagtcggggcgcgtggacgacgcgcgccggctgctcgacgatatgcctcgccacggcgtgagtctgaatgcgctgtgctacaactcgctgcttgactgttacgtgcgacaaaaggatgacgggcgggtccaggagattctagagatcatggagaacgaaggcatcgaggcgacggtcgggacgtatacgatccttgtggatagtttgtcgaccgccagggacatcagcaaggtcgaggctctgtttaatgagatgaaggcgaataatgttgtgggggatgtgtacctgtacaccgctgtcatcaacgcgtattgccgagcagggaacatgcggagggccgccaaggttttggatgaatgcgttggcaatggcgttgagccaaacgagcgtacatatggtgtattgatcaaagggttctgcaagattgggcagatggaggctgcagagatgttgctggcagacatgcaagggcaaggtgtagggcttaaccaaatcattttcaataccatgattgatggctattgtcgcaaagggatggtggacgatgctcttaaaataaaggcggccatggagaaaattggcgtcgaactgaacatctacacatacaacacactggcctgtggactgtgcagggtgaatagattggatgaggcaaagactctattgcacatcatgatcgagatgggtgtcgtgccaaattacgtcacttacactacactgatcagcatacactgcaaggatggcgacatggtggaggctagaaggctgttccgagaaatggcagagaaaggggcgacgcccagtgttgtgacctacagtgttatgattcatgggtacgccaagaaggggaggatccgtgaggctgagaggttcagaaagcagatggagaagaaagggtttgttccagatgtatacacctatgcatcgctagttcatgggcactgtgtcaatgggaaggtggatgtggcgctgaagctattcgaagagatgaagcagaggggaacggaacctaatgtcgtggcctatacggctctgatatcaggtctggcgaaggaagggagatcagaggcggcgttccagctgtatgatgatatgctgaaagctggattgatcccagatgactccctatattctgcccttgtaggaagccttcacacagataaccggaaagatgttaaggtttcttaggcagcttcgcttttaagggaaagcaacctaagtttttgtaagttaccctgtagcaactgaagaggtcggaagtccagaattaactccataatgttattcagtttacaaggtgggatggagtactagactgttgcatttcagttaaatgacataaggagatctcagctagctgtgatgaagcagcaaagttgcagaaatgattacatgctgacgtgcaatattacatggccacctccagattccaattcctcattgggtaacaaattttatttttgttttaagcatgtttagaacactggaacaagaggaggctgtgcagattttatttcaagattaagtttgtaatagtagtattagtagtcatggaattgttacaaaacaagcagttcttgtacattactcttgaaattgctcactgttatagagatatttgcacttggc

SEQ ID NO: 17462 - protein, 560 aa, Zea mays subsp. mays
  peptide (1)..(560): Ceres Seq. ID no. 12417417
IQRPTLRRPLPAPSSLLCRRDDAMAGSAALPPLAAFASLLTARRFAAARSKLRSLLTPRLLAVPFADLAASSLPRGAPPHAVAAFHDMLFRAYADAGAACRAAEALDAAVSRLGSLDPRSLTFSLLSLRRAGRLADAAGLLERALGSCPGSVSPFAASVVVDGLCKSGRVDDARRLLDDMPRHGVSLNALCYNSLLDCYVRQKDDGRVQEILEIMENEGIEATVGTYTILVDSLSTARDISKVEALFNEMKANNVVGDVYLYTAVINAYCRAGNMRRAAKVLDECVGNGVEPNERTYGVLIKGFCKIGQMEAAEMLLADMQGQGVGLNQIIFNTMIDGYCRKGMVDDALKIKAAMEKIGVELNIYTYNTLACGLCRVNRLDEAKTLLHIMIEMGVVPNYVTYTTLISIHCKDGDMVEARRLFREMAEKGATPSVVTYSVMIHGYAKKGRIREAERFRKQMEKKGFVPDVYTYASLVHGHCVNGKVDVALKLFEEMKQRGTEPNVVAYTALISGLAKEGRSEAAFQLYDDMLKAGLIPDDSLYSALVGSLHTDNRKDVKVS

SEQ ID NO: 17463 - protein, 537 aa, Zea mays subsp. mays
  peptide (1)..(537): Ceres Seq. ID no. 12417418
MAGSAALPPLAAFASLLTARRFAAARSKLRSLLTPRLLAVPFADLAASSLPRGAPPHAVAAFHDMLFRAYADAGAACRAAEALDAAVSRLGSLDPRSLTFSLLSLRRAGRLADAAGLLERALGSCPGSVSPFAASVVVDGLCKSGRVDDARRLLDDMPRHGVSLNALCYNSLLDCYVRQKDDGRVQEILEIMENEGIEATVGTYTILVDSLSTARDISKVEALFNEMKANNVVGDVYLYTAVINAYCRAGNMRRAAKVLDECVGNGVEPNERTYGVLIKGFCKIGQMEAAEMLLADMQGQGVGLNQIIFNTMIDGYCRKGMVDDALKIKAAMEKIGVELNIYTYNTLACGLCRVNRLDEAKTLLHIMIEMGVVPNYVTYTTLISIHCKDGDMVEARRLFREMAEKGATPSVVTYSVMIHGYAKKGRIREAERFRKQMEKKGFVPDVYTYASLVHGHCVNGKVDVALKLFEEMKQRGTEPNVVAYTALISGLAKEGRSEAAFQLYDDMLKAGLIPDDSLYSALVGSLHTDNRKDVKVS

SEQ ID NO: 17464 - protein, 473 aa, Zea mays subsp. mays
  peptide (1)..(473): Ceres Seq. ID no. 12417419
MLFRAYADAGAACRAAEALDAAVSRLGSLDPRSLTFSLLSLRRAGRLADAAGLLERALGSCPGSVSPFAASVVVDGLCKSGRVDDARRLLDDMPRHGVSLNALCYNSLLDCYVRQKDDGRVQEILEIMENEGIEATVGTYTILVDSLSTARDISKVEALFNEMKANNVVGDVYLYTAVINAYCRAGNMRRAAKVLDECVGNGVEPNERTYGVLIKGFCKIGQMEAAEMLLADMQGQGVGLNQIIFNTMIDGYCRKGMVDDALKIKAAMEKIGVELNIYTYNTLACGLCRVNRLDEAKTLLHIMIEMGVVPNYVTYTTLISIHCKDGDMVEARRLFREMAEKGATPSVVTYSVMIHGYAKKGRIREAERFRKQMEKKGFVPDVYTYASLVHGHCVNGKVDVALKLFEEMKQRGTEPNVVAYTALISGLAKEGRSEAAFQLYDDMLKAGLIPDDSLYSALVGSLHTDNRKDVKVS

SEQ ID NO: 17465 - DNA, 2085 bp, Zea mays subsp. mays
  misc_feature (1)..(2085): Ceres Seq. ID no. 12382290
  misc_feature (1)..(2085): Ortholog of  Ceres SEQ ID NO 14313636 as cited in SEQ ID NO 64205
gcacgagaccattacctagaacatcctaatcgaaatatcctccctccatcagttctcgtcctgttctttgctacgtacggctctgtgcctagctagcaatagcatagcaatgagggcgcttggaacggttgcttgggcatggctgctgctcctgcagcagctcgccggggcctctcatgtcgtctacgagaaccttgaggtggaggcgacgacagccgccgtgcggccctccattgtcgaccccctgctgaggaccgggtaccatttccagcctcgcaagaactggatcaatgatcccaacgctccactgtactacaaggggtggtaccatctcttctaccaatacaacccgaagggcgcggtgtggggcaacatcgtgtggggccactcggtgtcgcgagacctgatcaactgggtggccctgcaaccggcgatcgagccgagcatcccgtccgacaggtacgggtgctggtctgggtcggcgacgacgctggccgacggcacgccggcgatcatgtacacgggcgtgaaccggccggacgtgaactaccaggtgcagaacgtggcgtacccgcggaacaggtcggacccgctgctgcgggagtgggtgaagccgtcgcacaaccccatcatcgtgcccgggggcggcatcaacgcgacgcagttccgggacccgaccacggcctggcgcggcgcgggagacggccgctggcgcctgctcatcggcagcgtcaccgaggcgcgccacggcgtggcgtacgtgtaccggagccgcgacttcaggcgctggacgcgggcgcggcggccgctccactcggcggccacggggatgtgggagtgccccgacttctacccggtcggcgcgcccggccggcgcgcgggcgtcgagacggagacgtcggcggcgtccgacggcgacggcggctctcctcgtcgtcgtgagcagtccaagtacgtgctgaagaacagcctcgacctgcggcggtacgactactacaccgtcggcacgtacgaccgggcggccgagcggtacgtgccggacgaccccgcgggagacgagcgccacctgcggtacgactacggcaacttctacgcgtccaagacgttcttcgaccccgtgaagcggcggcgggtgctctggggctgggccaacgagtccgacaccgccgcngacgacgtggccaaagggtgggctgggatccaggcgattcctangacggtgtggctagaccccagcgggaagcagctgctgcagtggccaatcgaggaggtggaggctctgagaggcaggtcggtcgctctcaagaacagggtgatcaagccaggacagcacgtcgaggtcaccgggatacaaacggcacaggccgacgtggaggtgagcttcgaggtgtcgagcctggcgggcgccgaggcgctgctggacccggcgctggccagcgacgcgcagcggctgtgcggcgccaggggcgcggccgtggagggcggcgtgggcccgttcgggctgtgggtgctcgcctccggcgaccgcgaggagaggaccgccgtgttcttcagggtgtttcgcggcggcggcggccacgacgacaagcccgtggtgctcatgtgcaccgaccccaccaagtcatctctggacgcgaacctgtaccagccgacgttcgcaggttttgtcgacacagacatttcgaacgggaagatatctctcagaactctgatcgaccggtcggtggtggagagctttggaggcgggggcaggacctgcatcctgtcgagggtgtacccgtcgctcgccatcggcagcaaggctcgcctctacgtgttcaacaacgggagggcggacgtcagggtgtcccgtctcaccgcgtgggagatgaagaagccactcatgaacggcgcttgaaatgtttttattgcgtgatatggaatggtgctcgcctttgtacaatatggtatggctagatacatatatatgagagcttccacgctcggtcgtcgtgtggaaaaaacctatgatgagtgtgtacgatcttagggatgttcgattcagatgccactaggggcaataactatattctaattcatgatttc

SEQ ID NO: 17466 - protein, 595 aa, Zea mays subsp. mays
  peptide (1)..(595): Ceres Seq. ID no. 12382291
  misc_feature (354)..(354): Xaa is any aa, unknown or other
  misc_feature (369)..(369): Xaa is any aa, unknown or other
MRALGTVAWAWLLLLQQLAGASHVVYENLEVEATTAAVRPSIVDPLLRTGYHFQPRKNWINDPNAPLYYKGWYHLFYQYNPKGAVWGNIVWGHSVSRDLINWVALQPAIEPSIPSDRYGCWSGSATTLADGTPAIMYTGVNRPDVNYQVQNVAYPRNRSDPLLREWVKPSHNPIIVPGGGINATQFRDPTTAWRGAGDGRWRLLIGSVTEARHGVAYVYRSRDFRRWTRARRPLHSAATGMWECPDFYPVGAPGRRAGVETETSAASDGDGGSPRRREQSKYVLKNSLDLRRYDYYTVGTYDRAAERYVPDDPAGDERHLRYDYGNFYASKTFFDPVKRRRVLWGWANESDTAXDDVAKGWAGIQAIPXTVWLDPSGKQLLQWPIEEVEALRGRSVALKNRVIKPGQHVEVTGIQTAQADVEVSFEVSSLAGAEALLDPALASDAQRLCGARGAAVEGGVGPFGLWVLASGDREERTAVFFRVFRGGGGHDDKPVVLMCTDPTKSSLDANLYQPTFAGFVDTDISNGKISLRTLIDRSVVESFGGGGRTCILSRVYPSLAIGSKARLYVFNNGRADVRVSRLTAWEMKKPLMNGA

SEQ ID NO: 17467 - protein, 460 aa, Zea mays subsp. mays
  peptide (1)..(460): Ceres Seq. ID no. 12382292
  misc_feature (219)..(219): Xaa is any aa, unknown or other
  misc_feature (234)..(234): Xaa is any aa, unknown or other
MYTGVNRPDVNYQVQNVAYPRNRSDPLLREWVKPSHNPIIVPGGGINATQFRDPTTAWRGAGDGRWRLLIGSVTEARHGVAYVYRSRDFRRWTRARRPLHSAATGMWECPDFYPVGAPGRRAGVETETSAASDGDGGSPRRREQSKYVLKNSLDLRRYDYYTVGTYDRAAERYVPDDPAGDERHLRYDYGNFYASKTFFDPVKRRRVLWGWANESDTAXDDVAKGWAGIQAIPXTVWLDPSGKQLLQWPIEEVEALRGRSVALKNRVIKPGQHVEVTGIQTAQADVEVSFEVSSLAGAEALLDPALASDAQRLCGARGAAVEGGVGPFGLWVLASGDREERTAVFFRVFRGGGGHDDKPVVLMCTDPTKSSLDANLYQPTFAGFVDTDISNGKISLRTLIDRSVVESFGGGGRTCILSRVYPSLAIGSKARLYVFNNGRADVRVSRLTAWEMKKPLMNGA

SEQ ID NO: 17468 - protein, 355 aa, Zea mays subsp. mays
  peptide (1)..(355): Ceres Seq. ID no. 12382293
  misc_feature (114)..(114): Xaa is any aa, unknown or other
  misc_feature (129)..(129): Xaa is any aa, unknown or other
MWECPDFYPVGAPGRRAGVETETSAASDGDGGSPRRREQSKYVLKNSLDLRRYDYYTVGTYDRAAERYVPDDPAGDERHLRYDYGNFYASKTFFDPVKRRRVLWGWANESDTAXDDVAKGWAGIQAIPXTVWLDPSGKQLLQWPIEEVEALRGRSVALKNRVIKPGQHVEVTGIQTAQADVEVSFEVSSLAGAEALLDPALASDAQRLCGARGAAVEGGVGPFGLWVLASGDREERTAVFFRVFRGGGGHDDKPVVLMCTDPTKSSLDANLYQPTFAGFVDTDISNGKISLRTLIDRSVVESFGGGGRTCILSRVYPSLAIGSKARLYVFNNGRADVRVSRLTAWEMKKPLMNGA

SEQ ID NO: 17469 - DNA, 2498 bp, Zea mays subsp. mays
  misc_feature (1)..(2498): Ceres Seq. ID no. 12360983
  misc_feature (1)..(2498): Ortholog of  Ceres SEQ ID NO 13623250 as cited in SEQ ID NO 0
gcacgagaccattacctagaacatcctaatcgaaaaaaactgccttttcttccggcttccaacttccaagtggcgactgctgccgactgccgggtgcgagaagagggagagatcagagtatcagacaagctgttgtccgaatccactccggcgaggacgagtgctgaggtcgaaatggggagaggagcggatgaggtggtgaaggtcgtggattcggaggacggcgagggggaggaggaagaggcagaggccgcggcggcggaggggtcgagcaaggagacgccgatgctgccaaggatgccggtgcgcgtgctactcgccgagggcgacgactccacgcgccacgtcatctccgcgctgctacgcaagtgcggctaccgagttgctgcagcctctgatggtgtgaaggcgtgggacatattaaaagaaaaatctttcaacatagaccttgttttaactgaagttgaactgcctttgatgtctgggttcctcttgttatccacgatcatggagcatgatgcatccaagaacatccctgttataatgatgtcttcacacgactctgtaagcatggttttcaaatgcatgctaaagggtgcagcagatttccttgttaagccgctaagaaagaacgaattaaggaacttgtggcagcacgtttggagaaaacaactggcaaacggtgggcccgatgtgcagcacatacaagaagagaatcttgcagaaagaatggaacagaagactggcgtgacaaaagctgataatttgaacagcgatggtccccgtaaaaatagagaatgcagtgaacaagaaagtgatgctcaaagttcttgcacaaggtcagagttggaggctgaaagtaagcaaactaacaacattttggagtatatgcaatcaactgaaaggcatttgtctattcgtagccacaaggatttagagctaaatggagagaccaaaacacgaactaagggtaataacttgattccaacaagagaagacgatttatcgccaaagaaaagaacatgtttgaatgacaataattctgagagaacttccagagatatggagctagtccacattatggacaatcagcagaagcatgacacacagagggatgtggatactatgagaacaacatccaggggaaatgatgagaactccatcccagcacaccagttggaactttctcttagaagaactgactatggaaaattagagaaccacgagaaaaatgatagaagaacactgaaccattcaacttcatctgcattttacttgtataattgcaggactgcgtccagcttagtaaatgctggtgatggtcaattatgcagcacctcagaaacactagtggatgttgaaaatagaaatggagatttggcagctctgtctgaagacacgactgaaacaaatcgtcctcctatcagagttgtaccatttcctgtccctgttcaatgcttcacatttgatgggcagccgttctggaatggtacaccggtggcatctccattctacccacagtcagctccccccatttggaatatcaaaacaccaacgtggcaagaatcaactccacaagcaacttcactgccgcaaaaatcgcaacagaatgaaccaattgaaatggatgctaaaccagttgaaaatgcagaggaacaatttgtcgtaggtcctcccagtgccagtgggaagcagctgcatgttgaaattcccaaagatgatctacggcatatttctcctgtgaccggtgaaagtggaatcagtacggtgctagacagcaccagaaatactctgagcagcagtggctgtgatagcacttccaaccagatcaccgcctctactgaaccatcatccaatgtatacaggggcgttcctgaaaccgcaagagccgaaggtttacgacacctgagccagcgtgaggctgcactgaacaagttccggctaaagaggaaggacaggtgctttgagaagaaggttcggtaccagagccggaaattactcgcagagcagcgtccacgggtcaagggccagtttgtccgtcaagatcatagcatccaaggaagctagggtccagttactgagctggaactctttcccattatctaaaaaaaaagtcactgtaagtgactccactgctgggtatcctgatgtcaggttttttcgaagagttagaagcaatcagaccgaagttacggtttgctgtgtatgtttgttaaagcttgtaatatatgtatgtataggctgactctgttctttccttaggttaggcacaggacctggcacgttctagacggtttgtcggtagacgttagaaaatacaggcatacttgtgtcctttagtagcacgtgtgctttaagccttgtattatgtaactagccaagttgtttttgatgtttcggattagatgtacactgtggatgtatggcgtgaaggatgtccaccaaagtatgctcgtttctgtgcagcttgttgcaatgaacattgttggcctggtttt

SEQ ID NO: 17470 - protein, 688 aa, Zea mays subsp. mays
  peptide (1)..(688): Ceres Seq. ID no. 12360984
ARDHYLEHPNRKKLPFLPASNFQVATAADCRVREEGEIRVSDKLLSESTPARTSAEVEMGRGADEVVKVVDSEDGEGEEEEAEAAAAEGSSKETPMLPRMPVRVLLAEGDDSTRHVISALLRKCGYRVAAASDGVKAWDILKEKSFNIDLVLTEVELPLMSGFLLLSTIMEHDASKNIPVIMMSSHDSVSMVFKCMLKGAADFLVKPLRKNELRNLWQHVWRKQLANGGPDVQHIQEENLAERMEQKTGVTKADNLNSDGPRKNRECSEQESDAQSSCTRSELEAESKQTNNILEYMQSTERHLSIRSHKDLELNGETKTRTKGNNLIPTREDDLSPKKRTCLNDNNSERTSRDMELVHIMDNQQKHDTQRDVDTMRTTSRGNDENSIPAHQLELSLRRTDYGKLENHEKNDRRTLNHSTSSAFYLYNCRTASSLVNAGDGQLCSTSETLVDVENRNGDLAALSEDTTETNRPPIRVVPFPVPVQCFTFDGQPFWNGTPVASPFYPQSAPPIWNIKTPTWQESTPQATSLPQKSQQNEPIEMDAKPVENAEEQFVVGPPSASGKQLHVEIPKDDLRHISPVTGESGISTVLDSTRNTLSSSGCDSTSNQITASTEPSSNVYRGVPETARAEGLRHLSQREAALNKFRLKRKDRCFEKKVRYQSRKLLAEQRPRVKGQFVRQDHSIQGS

SEQ ID NO: 17471 - protein, 630 aa, Zea mays subsp. mays
  peptide (1)..(630): Ceres Seq. ID no. 12360985
MGRGADEVVKVVDSEDGEGEEEEAEAAAAEGSSKETPMLPRMPVRVLLAEGDDSTRHVISALLRKCGYRVAAASDGVKAWDILKEKSFNIDLVLTEVELPLMSGFLLLSTIMEHDASKNIPVIMMSSHDSVSMVFKCMLKGAADFLVKPLRKNELRNLWQHVWRKQLANGGPDVQHIQEENLAERMEQKTGVTKADNLNSDGPRKNRECSEQESDAQSSCTRSELEAESKQTNNILEYMQSTERHLSIRSHKDLELNGETKTRTKGNNLIPTREDDLSPKKRTCLNDNNSERTSRDMELVHIMDNQQKHDTQRDVDTMRTTSRGNDENSIPAHQLELSLRRTDYGKLENHEKNDRRTLNHSTSSAFYLYNCRTASSLVNAGDGQLCSTSETLVDVENRNGDLAALSEDTTETNRPPIRVVPFPVPVQCFTFDGQPFWNGTPVASPFYPQSAPPIWNIKTPTWQESTPQATSLPQKSQQNEPIEMDAKPVENAEEQFVVGPPSASGKQLHVEIPKDDLRHISPVTGESGISTVLDSTRNTLSSSGCDSTSNQITASTEPSSNVYRGVPETARAEGLRHLSQREAALNKFRLKRKDRCFEKKVRYQSRKLLAEQRPRVKGQFVRQDHSIQGS

SEQ ID NO: 17472 - protein, 593 aa, Zea mays subsp. mays
  peptide (1)..(593): Ceres Seq. ID no. 12360986
MLPRMPVRVLLAEGDDSTRHVISALLRKCGYRVAAASDGVKAWDILKEKSFNIDLVLTEVELPLMSGFLLLSTIMEHDASKNIPVIMMSSHDSVSMVFKCMLKGAADFLVKPLRKNELRNLWQHVWRKQLANGGPDVQHIQEENLAERMEQKTGVTKADNLNSDGPRKNRECSEQESDAQSSCTRSELEAESKQTNNILEYMQSTERHLSIRSHKDLELNGETKTRTKGNNLIPTREDDLSPKKRTCLNDNNSERTSRDMELVHIMDNQQKHDTQRDVDTMRTTSRGNDENSIPAHQLELSLRRTDYGKLENHEKNDRRTLNHSTSSAFYLYNCRTASSLVNAGDGQLCSTSETLVDVENRNGDLAALSEDTTETNRPPIRVVPFPVPVQCFTFDGQPFWNGTPVASPFYPQSAPPIWNIKTPTWQESTPQATSLPQKSQQNEPIEMDAKPVENAEEQFVVGPPSASGKQLHVEIPKDDLRHISPVTGESGISTVLDSTRNTLSSSGCDSTSNQITASTEPSSNVYRGVPETARAEGLRHLSQREAALNKFRLKRKDRCFEKKVRYQSRKLLAEQRPRVKGQFVRQDHSIQGS

SEQ ID NO: 17473 - DNA, 2046 bp, Zea mays subsp. mays
  misc_feature (1)..(2046): Ceres Seq. ID no. 12362604
  misc_feature (1)..(2046): Ortholog of  Ceres SEQ ID NO 13594345 as cited in SEQ ID NO 58043
  misc_feature (1)..(2046): Ortholog of  Ceres SEQ ID NO 12614112 as cited in SEQ ID NO 60891
  misc_feature (1)..(2046): Ortholog of  Ceres SEQ ID NO 13597574 as cited in SEQ ID NO 64677
  misc_feature (1)..(2046): Ortholog of  Ceres SEQ ID NO 13597843 as cited in SEQ ID NO 64850
  misc_feature (1)..(2046): Ortholog of  Ceres SEQ ID NO 13662880 as cited in SEQ ID NO 65422
  misc_feature (1)..(2046): Ortholog of  Ceres SEQ ID NO 14302071 as cited in SEQ ID NO 66585
  misc_feature (1)..(2046): Ortholog of  Ceres SEQ ID NO 14316013 as cited in SEQ ID NO 67181
  misc_feature (1)..(2046): Ortholog of  Ceres SEQ ID NO 12779098 as cited in SEQ ID NO 67698
  misc_feature (1)..(2046): Ortholog of  Ceres SEQ ID NO 13591190 as cited in SEQ ID NO 68044
  misc_feature (1)..(2046): Ortholog of  Ceres SEQ ID NO 13596089 as cited in SEQ ID NO 68373
gcacgagaccattacctagaacatcctaatcgaaaaatctttttcaatcctcaggcaggcgcagcgcaggcagcatccacagcctgaatccaccacaccagcaccacccagcaccgatggccggcgacgacggacgtgctccctccggcctccgcgtcgtgatgttccccttcccgttctggagccacattaaccagatgctccagctcgggaagctcctccgtgcgcggggcctgggcgtcaccatgctccacaccgacttcaacgcgcccgaccccgcactccacccggacatcaccttcgtgtccatccgcgagtccctccccgccgaggtcgtcgccaaccccgacatggtagagcagatgatgcagctcaacgccgtctgcgaggcgccgttccaggcggccctcgccggggagctgctggcgcgcggtacaacaaccggtggcccgcgcgaggtcgcctgcgtggtggtcgacgggcagtggtacaagatgctgggcgcggccacgcgtgtcgctgtccccgcgctcgtgctgcgcgccgacggcgccgccaccttactcagcatgctcgccaccccgcgcctccgcgccgacggttacctccccatcaaaggcactcgatccaccaccctcttctcctccccttctccgcgtgacgatcttgtgccaccggcacggcaccgaccggttactcgttttttcttgtcttgcatgcagaagagcggctggacgaggtggtgccgggcctggagcccctgcgcgtgcgggacctgatccgcgtggacggcagcgacgacgagacggtgctccgtttcatcacccgcaacgccgaggccgtgcgggcctcgtcgtcgggcgtggtgctgaacacgttcgagggcatcgagggcgcggcgctggccaagatccggcgcgagctgtccggccgcccggtcttcgccgtggggccgctgcacctggcgtcgccggaccccgcggcggcggcggccgcggggtaccaggacgcgccggaccccacctgcttggcgtggctggacgcgcgcccgccgcgctccgttctgtacgtcagcatgggaagcgtggcgcgcgtcgaccgcgccgtgttcgaggagacggcgtgggcgctggccggcagcggcgtgccgttcctgtgggtcctccgccgcggctccgtccgcggcgcggatgaggaggtgccgccggtcccggaggagctccgcgagacggtgaggcacaggggcaagatcgtggcgtgggcaccgcagagggaggtcctggcgcacccggcggtgggtgggttctggacgcactgcgggtggaaatccatggtggaggccatatccgaaggggtgcccatgctcgtgcagccgtgcttcgccgagcagatagtgaacgcgaggtatgtgacgcaccagtggggcatcgggtacgaggtcgggaagccgcttgagaggacagccatggcgaaggcggctagaaagctgatggccggcgagctggggccacaggggccaagggagagggctcggcttcttaaggcgcaggcgaagcagtgcgttgcagaaagaggaggaattagtttggctctcgacggtctggtggactacatttgctcgctgtgatgtttgatcagctttcaggtttcagcatgacgatggcgctctgaataatgaactgcatgttatatgtccgatgcaataaggaatagaatgtggacagcattttggtttacttaattctctggcaaatatatcgttggagtttatgagctaaggtctatttattagtatcacattgataattgataatggaagagaaacaacttaaatagcttctttattgtcactcttcgctacttctttttgtgtgagttctactcgcctataaattagtggaacatcctcctcttaaacacaagaaaaaaatcaatctactatattttagtgagagagctatcttagggaggctccagcatgccatgtcagcgtctagtttcagcaaacccggtttttgatgattttgcacgagtcggatagttcgg

SEQ ID NO: 17474 - protein, 220 aa, Zea mays subsp. mays
  peptide (1)..(220): Ceres Seq. ID no. 12362605
MAGDDGRAPSGLRVVMFPFPFWSHINQMLQLGKLLRARGLGVTMLHTDFNAPDPALHPDITFVSIRESLPAEVVANPDMVEQMMQLNAVCEAPFQAALAGELLARGTTTGGPREVACVVVDGQWYKMLGAATRVAVPALVLRADGAATLLSMLATPRLRADGYLPIKGTRSTTLFSSPSPRDDLVPPARHRPVTRFFLSCMQKSGWTRWCRAWSPCACGT

SEQ ID NO: 17475 - protein, 205 aa, Zea mays subsp. mays
  peptide (1)..(205): Ceres Seq. ID no. 12362606
MFPFPFWSHINQMLQLGKLLRARGLGVTMLHTDFNAPDPALHPDITFVSIRESLPAEVVANPDMVEQMMQLNAVCEAPFQAALAGELLARGTTTGGPREVACVVVDGQWYKMLGAATRVAVPALVLRADGAATLLSMLATPRLRADGYLPIKGTRSTTLFSSPSPRDDLVPPARHRPVTRFFLSCMQKSGWTRWCRAWSPCACGT

SEQ ID NO: 17476 - protein, 193 aa, Zea mays subsp. mays
  peptide (1)..(193): Ceres Seq. ID no. 12362607
MLQLGKLLRARGLGVTMLHTDFNAPDPALHPDITFVSIRESLPAEVVANPDMVEQMMQLNAVCEAPFQAALAGELLARGTTTGGPREVACVVVDGQWYKMLGAATRVAVPALVLRADGAATLLSMLATPRLRADGYLPIKGTRSTTLFSSPSPRDDLVPPARHRPVTRFFLSCMQKSGWTRWCRAWSPCACGT

SEQ ID NO: 17477 - DNA, 1053 bp, Zea mays subsp. mays
  misc_feature (1)..(1053): Ceres Seq. ID no. 12417420
  misc_feature (1)..(1053): Ortholog of  Ceres SEQ ID NO 13624427 as cited in SEQ ID NO 0
  misc_feature (1)..(1053): Ortholog of  Ceres SEQ ID NO 14305939 as cited in SEQ ID NO 0
agcaccagcaggagagtcccggagctggaagaagaagatacagagcgcatgctcctgtgaacatacaccactgaactcatagaaagcagcacacagtctgcataggtgcattgttgttccggcctctcctagaggaaaggaaggtcaggactcaggaggatgcctcgagccccgaccatgaccgctttccttgtcgccgtgcttgccgccctcgttctcacgtccgagggccgcgtttctcggaaggacctgtgcatcgacctcggcggtggcagcggggcaggcatcgggatcggtgctgggattagcattggcataggcggtggtggtggtgccggtggctctggctctggctcggcgtctggctccggctccggctccggctcggcctcaggttccgggtccagtgcgggctctggtgcaggatcgtatgctggatctggcgccggcgccggctctggctctggctctggtgcgggttcaggagctgggtccggagcgggttcgggttcagggtacgggcaagggcaagggtctggatatggcgaagggcatgggtcgggccagggacagggttctgggtctggctcgggatccggtcaggnaagtggatccggtcgaggatctggctacggcgaaggctccggttccggctctggccaaggatcaggatccggctacggcgaaggctccggttccggctctggccaaggatcaggatccggctacggtgaaggttacggctccggtcatggccaaggatctggatacggtgagggttcaggaagaggatacggagaaggttcaggctcaggctacggcgagggacacggctacggctacggctctggttctgggcatgtggcaaataaacatgactgaacaatgttctctgagctctgatgttctcttctctttctgtgtatccatccatatacataaataagtacacgttaccaactgtggacaaagaactgtactctctctctctcctcaaagcatttcctatatagctgttcaagatactgtttttcattatagactacacttttt

SEQ ID NO: 17478 - protein, 240 aa, Zea mays subsp. mays
  peptide (1)..(240): Ceres Seq. ID no. 12417421
  misc_feature (149)..(149): Xaa is any aa, unknown or other
MPRAPTMTAFLVAVLAALVLTSEGRVSRKDLCIDLGGGSGAGIGIGAGISIGIGGGGGAGGSGSGSASGSGSGSGSASGSGSSAGSGAGSYAGSGAGAGSGSGSGAGSGAGSGAGSGSGYGQGQGSGYGEGHGSGQGQGSGSGSGSGQXSGSGRGSGYGEGSGSGSGQGSGSGYGEGSGSGSGQGSGSGYGEGYGSGHGQGSGYGEGSGRGYGEGSGSGYGEGHGYGYGSGSGHVANKHD

SEQ ID NO: 17479 - protein, 234 aa, Zea mays subsp. mays
  peptide (1)..(234): Ceres Seq. ID no. 12417422
  misc_feature (143)..(143): Xaa is any aa, unknown or other
MTAFLVAVLAALVLTSEGRVSRKDLCIDLGGGSGAGIGIGAGISIGIGGGGGAGGSGSGSASGSGSGSGSASGSGSSAGSGAGSYAGSGAGAGSGSGSGAGSGAGSGAGSGSGYGQGQGSGYGEGHGSGQGQGSGSGSGSGQXSGSGRGSGYGEGSGSGSGQGSGSGYGEGSGSGSGQGSGSGYGEGYGSGHGQGSGYGEGSGRGYGEGSGSGYGEGHGYGYGSGSGHVANKHD

SEQ ID NO: 17480 - protein, 171 aa, Zea mays subsp. mays
  peptide (1)..(171): Ceres Seq. ID no. 12417423
  misc_feature (59)..(59): Xaa is any aa, unknown or other
MLDLAPAPALALALVRVQELGPERVRVQGTGKGKGLDMAKGMGRARDRVLGLARDPVRXVDPVEDLATAKAPVPALAKDQDPATAKAPVPALAKDQDPATVKVTAPVMAKDLDTVRVQEEDTEKVQAQATARDTATATALVLGMWQINMTEQCSLSSDVLFSFCVSIHIHK

SEQ ID NO: 17481 - DNA, 2759 bp, Zea mays subsp. mays
  misc_feature (1)..(2759): Ceres Seq. ID no. 12376316
  misc_feature (1)..(2759): Ortholog of  Ceres SEQ ID NO 13600595 as cited in SEQ ID NO 629
  misc_feature (1)..(2759): Ortholog of  Ceres SEQ ID NO 13593379 as cited in SEQ ID NO 20573
gcacgagaccattacctagaacatcctaatcgaaaaatcttattttctctcgcgttccactcctctctgttggctagctaccaccaccgtttccacgatgacggcgctgcagttcctgttgctcgcgctcgtcgccgtcactcaggtcgcgagcgccaccacggtcacctacaacgaccgtgcactcgtcatcgatggtcagcgccgtattattctatcagggtctattcattaccccaggagcacgccacagatgtggcctgatctcatcaacaaagctaaagaaggcggcctcaacaccatcgaaacatacgtcttctggaatggccacgagccacgccgccgtcagtataatttcgagggaagctacgacatcatcaggttcttcaaggagatccagaacgctggaatgcatgctattcttcgcattggtccctacatctgtggggaatggaattacgggggccttcctgcatggctgcgcgacattcctggaatgcagttcaggttgcacaatgccccctttgagcgcgagatggagaccttcaccaccctcatcgtcaataagatgaaggacgtcaacatgttcgcaggacagggaggcccaatcatccttgctcagatcgagaacgagtatggaaacatcatgggacaactcaagaacaaccagtctgcctcgcaatacatccactggtgcgcggacatggcgaataagcaagaggtcggtgtcccgtggatcatgtgccagcaggataacgatgtgccacacaacgtcatcaacacctgcaatggtttctattgccacgattggttcccgaataggaccggcattcccaagatatggacagaaaactggactggctggttcaaagcctgggataagccggatttccatagatccgctgaggacattgctttcgcggttgccatgttcttccagaagcgtggatcggtccataactactacatgtaccatggaggaaccaatttcggacgcacttctggtggcccgtacatcacaaccagctatgattacgatgcacctttggatgagtatggtaacattaggcagcccaaatacgggcacctgaaagatctccacgacctgatcaggtccatggagaaaatccttgtccatgggaagtacaatgacacaagttatggcaagaatgtcactgtaaccaagtacatgtatggtggttcttcagtttgcttcatcaacaaccagttcgtcgacagggatatgaaggtgaccctcggcggccgaaactcacctcgttccggcatggtccgtcagcatccttgcccaactgcaagactgttgcctacaacactgcaaagatcaagacgcaaacatcggtaatggtgaagaaggccaactcggtggagaaggaaccggagaccatgcgatggtcgtggatgcccgagaacctcaagcccttcatgacagaccaccgtggcagcttcagacagtcacaactcttggagcagatcgcaacatccactgatcagagcgactacttgtggtataggacaagccttgagcataagggagagggaagttacacgctgtacgtgaacacaagtggccatgagatgtacgcttttgtaaacggaaggcttgttgggcaaaaccactcggccgatggagcgttcgtcttccagctccagtctccggtgaagctccactccggaaagaactacgtttctctcctcagcggcacagtcggactcaagaactatggaccttcgtttgagcttgtgccagcgggcatcgccggtgggccggttaagcttgtcgggacaaacggcaccgccgttgatcttaccaaaagctcttggtcttacaagtctgggttggccggtgagctcaggcaaatccacctcgacaagcccggctacaagtggcagagccacaacggtaccatccccgtcaaccggcccttcacgtggtacaagaccacctttgaagctcccgccggcgaggaggccgtcgtggtggacctgctgggcctgaacaagggcgtggcgtgggtgaacggcaacagccttggacgctactggccgtcctacaccgcggcggagatgcccggttgccacgtctgcgactaccggggaaagttcatagcggagggcgatggcatccgctgcctcacgggttgcggcgagccagcgcagcgcttctaccacgtgccgcgctccttcctccgcgccggcgagcccaacacgctcatcctcttcgaggaggccggcggcgacccgacacgcgccgcgttccacaccgtcgccgtgggccccgtgtgcgtggcggccgtcgagctcggcgacgacgtcacgctgtcatgcggcggccacggccgcgtcgtcgccagcgtcgacgtggccagcttcggcgtcgccaggggcagctgcggcgcctacaagggaggctgcgagtccaaggccgcgctcaaggcgttcacggacgcgtgcgtcggcagggagtcgtgcacggtcaagtacacggccgcgtttgccggcgcagggtgccaatccggcgcgctcaccgttcaggccacctgctcatagcgacccaggctagatcaaggagagttttatcttagctagatcaaggagagttttatcttagctagatcaggatagttttatcttagctagatcagatgatgcatggtttggtttggacacttaatgtagtcctcacatttcgttcctcaagattagttgaataaaaaaacctaagtacccttatgttttcc

SEQ ID NO: 17482 - protein, 421 aa, Zea mays subsp. mays
  peptide (1)..(421): Ceres Seq. ID no. 12376317
MTALQFLLLALVAVTQVASATTVTYNDRALVIDGQRRIILSGSIHYPRSTPQMWPDLINKAKEGGLNTIETYVFWNGHEPRRRQYNFEGSYDIIRFFKEIQNAGMHAILRIGPYICGEWNYGGLPAWLRDIPGMQFRLHNAPFEREMETFTTLIVNKMKDVNMFAGQGGPIILAQIENEYGNIMGQLKNNQSASQYIHWCADMANKQEVGVPWIMCQQDNDVPHNVINTCNGFYCHDWFPNRTGIPKIWTENWTGWFKAWDKPDFHRSAEDIAFAVAMFFQKRGSVHNYYMYHGGTNFGRTSGGPYITTSYDYDAPLDEYGNIRQPKYGHLKDLHDLIRSMEKILVHGKYNDTSYGKNVTVTKYMYGGSSVCFINNQFVDRDMKVTLGGRNSPRSGMVRQHPCPTARLLPTTLQRSRRKHR

SEQ ID NO: 17483 - protein, 401 aa, Zea mays subsp. mays
  peptide (1)..(401): Ceres Seq. ID no. 12376318
MVKKANSVEKEPETMRWSWMPENLKPFMTDHRGSFRQSQLLEQIATSTDQSDYLWYRTSLEHKGEGSYTLYVNTSGHEMYAFVNGRLVGQNHSADGAFVFQLQSPVKLHSGKNYVSLLSGTVGLKNYGPSFELVPAGIAGGPVKLVGTNGTAVDLTKSSWSYKSGLAGELRQIHLDKPGYKWQSHNGTIPVNRPFTWYKTTFEAPAGEEAVVVDLLGLNKGVAWVNGNSLGRYWPSYTAAEMPGCHVCDYRGKFIAEGDGIRCLTGCGEPAQRFYHVPRSFLRAGEPNTLILFEEAGGDPTRAAFHTVAVGPVCVAAVELGDDVTLSCGGHGRVVASVDVASFGVARGSCGAYKGGCESKAALKAFTDACVGRESCTVKYTAAFAGAGCQSGALTVQATCS

SEQ ID NO: 17484 - protein, 387 aa, Zea mays subsp. mays
  peptide (1)..(387): Ceres Seq. ID no. 12376319
MRWSWMPENLKPFMTDHRGSFRQSQLLEQIATSTDQSDYLWYRTSLEHKGEGSYTLYVNTSGHEMYAFVNGRLVGQNHSADGAFVFQLQSPVKLHSGKNYVSLLSGTVGLKNYGPSFELVPAGIAGGPVKLVGTNGTAVDLTKSSWSYKSGLAGELRQIHLDKPGYKWQSHNGTIPVNRPFTWYKTTFEAPAGEEAVVVDLLGLNKGVAWVNGNSLGRYWPSYTAAEMPGCHVCDYRGKFIAEGDGIRCLTGCGEPAQRFYHVPRSFLRAGEPNTLILFEEAGGDPTRAAFHTVAVGPVCVAAVELGDDVTLSCGGHGRVVASVDVASFGVARGSCGAYKGGCESKAALKAFTDACVGRESCTVKYTAAFAGAGCQSGALTVQATCS

SEQ ID NO: 17485 - DNA, 1742 bp, Zea mays subsp. mays
  misc_feature (1)..(1742): Ceres Seq. ID no. 12358954
  misc_feature (1)..(1742): Ortholog of  Ceres SEQ ID NO 14313373 as cited in SEQ ID NO 67312
ctcctccattccccactgcatgcgcgctctgtcactgtcagtctcactctcgctcgctaccttggcgacgactggttgaccgccgctgccgctctagagcaggtgcccactgcccaggtcttcttctggtccttcgccggcgacaagcacaaccagggtgattcaagtactctgctttcaccaatatgtctgacggtcaggaaactgacaagaacattgagatttggaagatcaagaagttgatcaaggcattggaatctgctagaggcaatggcaccagcatgatctctctgattatgccaccacgtgaccaaatttcccgtgtgaccaagatgttgggtgatgaatatggtactgcttcaaatattaagagtagagtcaaccggcaatctgttttagcagccatcacctcagctcagcagaggctgaagctgtataacaaggttcccccaaatggacttgttctctacactggaacaattgttactgaagatggcaaggaaaagaaagtcactattgattttgagcccttcaagcctatcaatgcatccctgtacctttgtgacaataagttccacactgaagctttgaatgaactcttggaatctgatgacaagtttggtttcattgttatggatggtaatggaactctttttggtacactgagtggcaatactcgtgaagtgcttcacaaattcactgttgatctcccaaagaagcatggaagaggaggtcaatctgcccttcgctttgctcggcttcgaatggaaaaacgtcataattatgtccgaaagacagctgagcttgctacacaattttttatcaatccagctaccagtcagcctaatgttgctggacttatattggctggttctgctgattttaagacagaactgagccaatctgacatgtttgatcaacgtctccaggccaaaatacttaatgttgttgatgtttcatatggcggggagaacggttttaaccaagctattgagttgtcagctgaaattctagcaaatgtgaagttcatacaagagaaaaagctgattggaaagtattttgaagaaattagtcaagatacgggtaagtatgtgtttggtgttgatgacacactgaaagcccttgaaatgggcgctgtggaaacactgatagtgtgggaaaaccttgatgtcaacagatatgtgcttaagaatactgcaactggagaaactgttatcaaacatctgaataaagagcaagaagctgaccagagtcatttccgtgatccatctaccaatgctgagctggaggttcaggagaaaacttcgctcttggaatggtttgccaatgagtacaaaaaatttgggtgcacacttgagtttgttaccaacaaatctcaagaagggtctcagttttgcagaggatttggtggcattggtggcatgttgcgctatcaactggacatccgttctttcgacgagctttctgatgacgaaggtgtctatgaagattctgattaagcaaacgtcattcatatggctgtgctggaccctggattgatgcaattgctcgttttgttcttctattttttgcttgattagtcggtttttgaggagattaccacttgagacacttgctttgtttccttgccgcagcttacaattgcaatgtcaaccacatcattagaatctggttgatacctcatgtactgctgttatgttgacatcggctctgtccaatatttatcaagatttggtgtagcg

SEQ ID NO: 17486 - protein, 437 aa, Zea mays subsp. mays
  peptide (1)..(437): Ceres Seq. ID no. 12358955
MSDGQETDKNIEIWKIKKLIKALESARGNGTSMISLIMPPRDQISRVTKMLGDEYGTASNIKSRVNRQSVLAAITSAQQRLKLYNKVPPNGLVLYTGTIVTEDGKEKKVTIDFEPFKPINASLYLCDNKFHTEALNELLESDDKFGFIVMDGNGTLFGTLSGNTREVLHKFTVDLPKKHGRGGQSALRFARLRMEKRHNYVRKTAELATQFFINPATSQPNVAGLILAGSADFKTELSQSDMFDQRLQAKILNVVDVSYGGENGFNQAIELSAEILANVKFIQEKKLIGKYFEEISQDTGKYVFGVDDTLKALEMGAVETLIVWENLDVNRYVLKNTATGETVIKHLNKEQEADQSHFRDPSTNAELEVQEKTSLLEWFANEYKKFGCTLEFVTNKSQEGSQFCRGFGGIGGMLRYQLDIRSFDELSDDEGVYEDSD

SEQ ID NO: 17487 - protein, 405 aa, Zea mays subsp. mays
  peptide (1)..(405): Ceres Seq. ID no. 12358956
MISLIMPPRDQISRVTKMLGDEYGTASNIKSRVNRQSVLAAITSAQQRLKLYNKVPPNGLVLYTGTIVTEDGKEKKVTIDFEPFKPINASLYLCDNKFHTEALNELLESDDKFGFIVMDGNGTLFGTLSGNTREVLHKFTVDLPKKHGRGGQSALRFARLRMEKRHNYVRKTAELATQFFINPATSQPNVAGLILAGSADFKTELSQSDMFDQRLQAKILNVVDVSYGGENGFNQAIELSAEILANVKFIQEKKLIGKYFEEISQDTGKYVFGVDDTLKALEMGAVETLIVWENLDVNRYVLKNTATGETVIKHLNKEQEADQSHFRDPSTNAELEVQEKTSLLEWFANEYKKFGCTLEFVTNKSQEGSQFCRGFGGIGGMLRYQLDIRSFDELSDDEGVYEDSD

SEQ ID NO: 17488 - protein, 400 aa, Zea mays subsp. mays
  peptide (1)..(400): Ceres Seq. ID no. 12358957
MPPRDQISRVTKMLGDEYGTASNIKSRVNRQSVLAAITSAQQRLKLYNKVPPNGLVLYTGTIVTEDGKEKKVTIDFEPFKPINASLYLCDNKFHTEALNELLESDDKFGFIVMDGNGTLFGTLSGNTREVLHKFTVDLPKKHGRGGQSALRFARLRMEKRHNYVRKTAELATQFFINPATSQPNVAGLILAGSADFKTELSQSDMFDQRLQAKILNVVDVSYGGENGFNQAIELSAEILANVKFIQEKKLIGKYFEEISQDTGKYVFGVDDTLKALEMGAVETLIVWENLDVNRYVLKNTATGETVIKHLNKEQEADQSHFRDPSTNAELEVQEKTSLLEWFANEYKKFGCTLEFVTNKSQEGSQFCRGFGGIGGMLRYQLDIRSFDELSDDEGVYEDSD

SEQ ID NO: 17489 - DNA, 1392 bp, Zea mays subsp. mays; identical to SEQ ID NO: 15767
  misc_feature (1)..(1392): Ceres Seq. ID no. 12381052
  misc_feature (1)..(1392): Ortholog of  Ceres SEQ ID NO 12609146 as cited in SEQ ID NO 52118
  misc_feature (1)..(1392): Ortholog of  Ceres SEQ ID NO 12587035 as cited in SEQ ID NO 63605
  misc_feature (1)..(1392): Ortholog of  Ceres SEQ ID NO 14302836 as cited in SEQ ID NO 65013

SEQ ID NO: 17490 - protein, 401 aa, Zea mays subsp. mays; identical to SEQ ID NO: 15768
  peptide (1)..(401): Ceres Seq. ID no. 12381053

SEQ ID NO: 17491 - protein, 375 aa, Zea mays subsp. mays; identical to SEQ ID NO: 15769
  peptide (1)..(375): Ceres Seq. ID no. 12381054

SEQ ID NO: 17492 - protein, 286 aa, Zea mays subsp. mays; identical to SEQ ID NO: 15770
  peptide (1)..(286): Ceres Seq. ID no. 12381055

SEQ ID NO: 17493 - DNA, 1486 bp, Zea mays subsp. mays
  misc_feature (1)..(1486): Ceres Seq. ID no. 12366543
  misc_feature (1)..(1486): Ortholog of  Ceres SEQ ID NO 15168476 as cited in SEQ ID NO 60262
aataataaaaagattctcgattcgatttactcgccaattttcagtgagcggcggcgatcggcttcggatcggcgcagcgcggcggagcggagatggttgccgtggcggtggatggcctgatccgcggtgcggacgccgtgccggcggcggagagggaagcggtgagggcggcagctgcggaggcggcggccaagggcggtgagggggaatcggggaaggaggaggtgagggagtatgagagcgacatgaggaagctggaggagctgctttctaagctgaacccctcggcggaggagttcgtgccgcagtcccgccgccgcgtggacggcggcgctccccgcctttcggccgacgcgcccgtgttcgtgtcgccggcgatcgactactacgcgcgccaccaccagctcccgccgccgccgcttctgcagcagcagcagccgatgcacgtgctgcagtttgtgggtggcgtcggcggggttggcatgggtggcggcggggggatggactccagcagcgacggatccgccaatggtcagccgaatcgacggagaaggaacggtttcatccaggggaggagaaggatgatgggtgcccggcctcgtcgagctgacagggaggatagtgtcggcggacagtctatgtctctgacgttgatcagcatgtaactgaacagaaacttgctgaagttttttcaacctgtggacaggtggtagattgccgtatctgtggtgatcctaactcagtgcttcgttttgcttttatcgagtttgctgatgacgttgctgcacaagcagcactagcacttggtggaaccgtgcttggcttttatcctgtcaaggttctgccatcaaagacagcaattttacctgtgaaccctaaatttcttcctcacactgatgatgagaaagaaatggtatccaggactgtgtattgtactaacattgacaagaagatcgcagaagatgaagtgaagcaattctttgagggaacatgtggtgaagtttctcgtctgaggctacttggtgattatgtgcactccacatgcatcgcttttgttgagtttgtccaagcagatagtgctattctcgctctgaactgcagtggcattgttcttggaacgcttcctgttagggtgagcccatcaaagacaccagtccgctcgcgatcgccccgtgtgacgtcatactgaattcggctcatctgaagccgtcgtccagggcagcaaatttctgggcaacaaagccctagtcgtgtggccttagagactgccgcatcgcggataagtaattgtcgttgagcagagttctcgttggttaaagtccagtctagtaggaggcgcagagacccgtctgtatggtcgctgggagatctatcttgacctcctttttctgttctttttggtcttagttatcgtggttggattctatagcagccttgacaggcattcgaacaacaatgtttatggttatcctatccgctttggact

SEQ ID NO: 17494 - protein, 190 aa, Zea mays subsp. mays
  peptide (1)..(190): Ceres Seq. ID no. 12366544
MVAVAVDGLIRGADAVPAAEREAVRAAAAEAAAKGGEGESGKEEVREYESDMRKLEELLSKLNPSAEEFVPQSRRRVDGGAPRLSADAPVFVSPAIDYYARHHQLPPPPLLQQQQPMHVLQFVGGVGGVGMGGGGGMDSSSDGSANGQPNRRRRNGFIQGRRRMMGARPRRADREDSVGGQSMSLTLISM

SEQ ID NO: 17495 - protein, 139 aa, Zea mays subsp. mays
  peptide (1)..(139): Ceres Seq. ID no. 12366545
MRKLEELLSKLNPSAEEFVPQSRRRVDGGAPRLSADAPVFVSPAIDYYARHHQLPPPPLLQQQQPMHVLQFVGGVGGVGMGGGGGMDSSSDGSANGQPNRRRRNGFIQGRRRMMGARPRRADREDSVGGQSMSLTLISM

SEQ ID NO: 17496 - DNA, 2138 bp, Zea mays subsp. mays
  misc_feature (1)..(2138): Ceres Seq. ID no. 12369733
  misc_feature (1)..(2138): Ortholog of  Ceres SEQ ID NO 13638855 as cited in SEQ ID NO 52073
  misc_feature (1)..(2138): Ortholog of  Ceres SEQ ID NO 15179503 as cited in SEQ ID NO 0
gcacgagaccattacctagaacatcctaatcgaaaaaagacgcatcgcttccttgtccatcctacctccccttccccccgcccaaatcccgtgacggtcgccgcccccgccgtgctctcgcccgcgcgggagacgacgcagcacccccccgcgtaggatccgcggcggtcggcaggatggtggtggccacggaggaaatggtggtctactgctttgacaccctcgtcgcctatttcaccggcgagcggccgccgcctcccgccttcgaggatggaaaccagtaagcctccccgcagcgatcgaaaccgggccgcgttgcccccatatcgaggaggtggttttggatccatttcgatatagggttaggccaattcgtgttagatttgggcaaaaggcggcgccttggtagttttggtttcggctcggctcctgttgcgactgattcgcgatccgatctgattgactgtttgttggtcctggcgattgcggaatcgtgtggtcttagttttcgttgcaaggcagaggcgaagtgaagtattcacacttcaatggccacgtacctcgcctttcggcagttgccagcttcctacctctagcgattgtctgacggagaggacaaggaatctcactgctacacatctgagattatgatttaagtaggacagtcagtttaatcctaaggcattcagattctttgggaagttgggaggttaaacaggatgagctttcgtgttctgactgtgacgcactgatgtttcttattcatactccaggattcagacttttaattgagatcctttcaaccgtgtagtccacattaatttgtatggcttgtaaggcatcattgttctagcatacatgtttttaactcattgggtcaatttttttgtaactttggcccattgtttgtgacctggaagaaggctgccaatggttcagaaccacgcctacggggatgcataggaactctggagtcccgtcagattgtcagcggctttagggactacgccctaactaggtgactattgtttcagtattgaaattatgtctgatccaatgctgaaatatctggtcggtactcaaaacgttgatgggcttatgctgtaataagtagaaaagcaatcgtgcactttgtattggataatgtttagatatacggtaatcttgatatcctcttgcagtgcgctgagggaccgacgctttcccccaatacaatcaaaggaactcccaaccttggagtgcacggtatctatactcactgattatgaaattgcagaggactacctcgactgggaggttggaaagcatggtttaattattgaatttacagctccagactccaacacaaaacacagtgcgacctatttgcctgaagttgcgggccatgaaggtgaaaatttcctttttcatcgatgcgatgtacacttatcgtttctacagagttctttagtttctagaattattgcaggggataataagaagaaatgagttaagaaaatatgtaatttcatctttctaaatcatcatggaccaaatgcattataatgagcaataacggtaaaataaagagtcaactgatcagtacattccaaatctgtattgaatagtttgtaacttaggcttaatcttttggcaggttggacacatgtagaaactattgattcactcgtgaggaaggcaggttaccagagaatcatcactgagtccttgaggaagaaaatcaaagtcactcgctaccagagcaccctgtacacgatgcactatggtgaatatgttgcgtacctcaagaagaacagaggtgcagccccgtcaattagtggggctcctcctgtagttaatggcttcaagccaagccattgatttatcagtataaaaaaaagctcaaagaacatattactataatttatctgcgagcaatttggggggtgtagtgtaaccaccccccacagttcattgatctagcatcattcccttcgaaggaaaaggccaaataggggcgtcatgacaagcgcccagaataataatgccttcctggatggatcatggatgatgcttatgtatcttgaaaacacatgtgcttcaagaagttcaaattgtgtggtgaagttaattgattcgagttggccattcctagttcc

SEQ ID NO: 17497 - protein, 114 aa, Zea mays subsp. mays
  peptide (1)..(114): Ceres Seq. ID no. 12369734
MFRYTVILISSCSALRDRRFPPIQSKELPTLECTVSILTDYEIAEDYLDWEVGKHGLIIEFTAPDSNTKHSATYLPEVAGHEGENFLFHRCDVHLSFLQSSLVSRIIAGDNKKK

SEQ ID NO: 17498 - DNA, 981 bp, Zea mays subsp. mays
  misc_feature (1)..(981): Ceres Seq. ID no. 12375363
  misc_feature (1)..(981): Ortholog of  Ceres SEQ ID NO 15168440 as cited in SEQ ID NO 57887
  misc_feature (1)..(981): Ortholog of  Ceres SEQ ID NO 13622703 as cited in SEQ ID NO 0
aaaagaaaaaaaattaacggctcgtcggacctccacgaaaaccaagtccagcagacggacgcgaactgagaaaaatctcacgtgacgacgacggacgcggcggcgatggcgtgccgcgcacttgccctccgcttcctgctcctcccggacccgctacaccgcctcccggccacgccgccatctgttgggagggcatccggctcccgcggtggtcgccgtccgcacctccgctgcagctccggcggcgggggtggggagcccgggcagccgccgcaagaagctgtgctcgaggccatatccaagatagcaaggtctaaaggaagggttgcactcacaacaaatgtggtcatgggtggtactgtgatggacgatgcaagtgatgaatggcttgctctggatcagaaggtaaattcctaccccacagatagaggttttacagcaattggcattggaggtgatgattttgtccagtcgatggtagttgctgttgaatctgttcttcaagaatccattcccaagggccgagtatctcagaaactatcttcaggaggaaaatatgtttctgtaaaaattgggccaattcgtgttgtttcaagtgagcaggtccaagctgtatatcgtgccatgagaagagataacagaatgaaatacttcttatgaagtgcaattgcatgtcctgcacgttccctggtccattccatcatgtaaacaaaaggagtccaacagtacattttcgccacattttgctggactggactggactggacccccgatgaattgcaaaaggaaaatgggaagacttttatgtgccattcatgccctgatggaagcttctcaaataaccctacaggcaatttggtgggatcggttatgttatgtagtgcttgtgtagtacagtgggcgtatatagctactatatatgctaaagttgtattttagtgtctcatattagatgcattttaatattttataaaccatatg

SEQ ID NO: 17499 - protein, 184 aa, Zea mays subsp. mays
  peptide (1)..(184): Ceres Seq. ID no. 12375364
MACRALALRFLLLPDPLHRLPATPPSVGRASGSRGGRRPHLRCSSGGGGGEPGQPPQEAVLEAISKIARSKGRVALTTNVVMGGTVMDDASDEWLALDQKVNSYPTDRGFTAIGIGGDDFVQSMVVAVESVLQESIPKGRVSQKLSSGGKYVSVKIGPIRVVSSEQVQAVYRAMRRDNRMKYFL

SEQ ID NO: 17500 - protein, 103 aa, Zea mays subsp. mays
  peptide (1)..(103): Ceres Seq. ID no. 12375365
MGGTVMDDASDEWLALDQKVNSYPTDRGFTAIGIGGDDFVQSMVVAVESVLQESIPKGRVSQKLSSGGKYVSVKIGPIRVVSSEQVQAVYRAMRRDNRMKYFL

SEQ ID NO: 17501 - protein, 98 aa, Zea mays subsp. mays
  peptide (1)..(98): Ceres Seq. ID no. 12375366
MDDASDEWLALDQKVNSYPTDRGFTAIGIGGDDFVQSMVVAVESVLQESIPKGRVSQKLSSGGKYVSVKIGPIRVVSSEQVQAVYRAMRRDNRMKYFL

SEQ ID NO: 17502 - DNA, 357 bp, Zea mays subsp. mays
  misc_feature (1)..(357): Ceres Seq. ID no. 1981229
  misc_feature (1)..(357): Ortholog of  Ceres SEQ ID NO 13591224 as cited in SEQ ID NO 64140
aaacctaaacctttcacccgccgccgccgccaccaccagcattgccacttctcaccgcttgcaaccgatgatgccgttctggaagaaaatgacatggttaaaattgatatgggctgtcatattgatggctttattgctgtggtggcacatacacatgtaattacaaatgggcctgtcacaggaagggctggtgatgtgcttgctgctgccaacacagcagcagaagtcgcaatgcggcttgtgagacctgggaagaaaaataaggatgttactgaagcaattcagaaagttgctgctgcttatgattgcaaattgtggaaggtgttcttagccatcaactgaaacaatttgtgattg

SEQ ID NO: 17503 - protein, 113 aa, Zea mays subsp. mays
  peptide (1)..(113): Ceres Seq. ID no. 1981230
KPKPFTRRRRHHQHCHFSPLATDDAVLEENDMVKIDMGCHIDGFIAVVAHTHVITNGPVTGRAGDVLAAANTAAEVAMRLVRPGKKNKDVTEAIQKVAAAYDCKLWKVFLAIN

SEQ ID NO: 17504 - protein, 82 aa, Zea mays subsp. mays
  peptide (1)..(82): Ceres Seq. ID no. 1981231
MVKIDMGCHIDGFIAVVAHTHVITNGPVTGRAGDVLAAANTAAEVAMRLVRPGKKNKDVTEAIQKVAAAYDCKLWKVFLAIN

SEQ ID NO: 17505 - protein, 77 aa, Zea mays subsp. mays
  peptide (1)..(77): Ceres Seq. ID no. 1981232
MGCHIDGFIAVVAHTHVITNGPVTGRAGDVLAAANTAAEVAMRLVRPGKKNKDVTEAIQKVAAAYDCKLWKVFLAIN

SEQ ID NO: 17506 - DNA, 1865 bp, Zea mays subsp. mays
  misc_feature (1)..(1865): Ceres Seq. ID no. 13493199
  misc_feature (1)..(1865): Ortholog of  Ceres SEQ ID NO 15172325 as cited in SEQ ID NO 54668
  misc_feature (1)..(1865): Ortholog of  Ceres SEQ ID NO 13594345 as cited in SEQ ID NO 58043
  misc_feature (1)..(1865): Ortholog of  Ceres SEQ ID NO 12614112 as cited in SEQ ID NO 60891
  misc_feature (1)..(1865): Ortholog of  Ceres SEQ ID NO 14302832 as cited in SEQ ID NO 64926
  misc_feature (1)..(1865): Ortholog of  Ceres SEQ ID NO 12617417 as cited in SEQ ID NO 65089
  misc_feature (1)..(1865): Ortholog of  Ceres SEQ ID NO 13662880 as cited in SEQ ID NO 65422
  misc_feature (1)..(1865): Ortholog of  Ceres SEQ ID NO 13596180 as cited in SEQ ID NO 67941
  misc_feature (1)..(1865): Ortholog of  Ceres SEQ ID NO 13596089 as cited in SEQ ID NO 68373
taatcgaaaaacacacgcgggcgcgctagctagtgagagtcggagatgtcgtcgccgcggccacacttcctcgtgctcaccttccctttccagggccacatcgccccggctctccgcctcgccaggcagctgctcgcggcggcgcccgacgcgctcgtgaccttctccaccaccgaggtcgcgcacaggcgcatgttcccggcaaagcccaacgacggcgccaaggactccgacgaagacggccgcctcgagttcctcccgttctccgacggcacggaggccgggtacgtccggagcgccgacctgggctcgttcaacgcctacatgacgtctttccacgccgcgggggcgcgcagcgccgcggagatcgtggacgcgctcgcggcgcggggccgccccgtgtcccgcgtcgtgtacacgctgctcctcccgtgggcggccgacgtcgcgcgggaccgcgggatcccgtccgcgctctactggatccagccggtctccgtgttcgccatctaccaccactacttccacggccacgccggcgtcgtcgccgaccaccttcacgacccgtcgttcgtcgtggagatgccgggcctggcgccacagccggtcggcgacctgccgtccttcctcaccgactccaccgacccttccaatatgttccacagcgtcttcaccacgatccgagacctgatcgaaacgcttgacaaggaaagccccaggtccactgtcctcgtcaacacgtgccgagagctcgaggtgggcgcgctcgccgccgtgggggcgcaccacgacgtgctccccgtcggcccggtgctcccatccggcggcgacgccggcatcttcaagcaggacgacgacgccaagtacatggagtggctcgacgccaaaccggcgaattccgtggtgtacgtctccttcggcagtctgaccacggtggcgagagaacatctcgaggagctgctccggggccttgaggagagcggcaggccgtacctctgcgtcatccggaaggacaacaaggctgcactcgcggatgccgagacgaaggtagacgaggagctcaagaacggcatcgtagtggagtggtgcgaccaggtgcgggtgctgtcgcacgcggcggtcgggtgcttcgtgacgcactgtggctggaactcggtgctggagagcctggcggcgggggtgcccatggtgtgcgtgccccggatgtcggaccagcgcaccaacgctcaacttgtcgtgcgcgagtggcgcgtcggcgtgcgcgcgcaggtggacgatggtggcgtgctgcgagcggcggaggtgcggcggtgcatcgacgaggcgatggggaatttggaggccgccgcggaggtgcgacgcatggcggcggagtggaagcaggtagtgacaaaggccatgggaaaaggagggtcgtcggatcgtaatctcatgacgttcgtggatggcgcgaggaacgccgtttgaagattggcatgtgtttctttctttcttcacgttcggttacaccaatccagaaaaagattagcttgttcggttacattaatccaaaagagaattgggggagaattggttacatcaatcaaccaatcctattatgaattggtgtaaccgaacaaaccataagtggtcaaaggcggatggcttccggccattgacgtacggggccagacaaccgctggctccacgcgttattgactggtccacaactacttttctagaagttacggtataggatccagttgtgttaactgtggacattatgttgtcagtagctgttaagcttttcaacgtctgcttgactggacgactgctcccgataaactaggttatcttatattcatacagaactaaatcttagacct

SEQ ID NO: 17507 - protein, 473 aa, Zea mays subsp. mays
  peptide (1)..(473): Ceres Seq. ID no. 13493200
MSSPRPHFLVLTFPFQGHIAPALRLARQLLAAAPDALVTFSTTEVAHRRMFPAKPNDGAKDSDEDGRLEFLPFSDGTEAGYVRSADLGSFNAYMTSFHAAGARSAAEIVDALAARGRPVSRVVYTLLLPWAADVARDRGIPSALYWIQPVSVFAIYHHYFHGHAGVVADHLHDPSFVVEMPGLAPQPVGDLPSFLTDSTDPSNMFHSVFTTIRDLIETLDKESPRSTVLVNTCRELEVGALAAVGAHHDVLPVGPVLPSGGDAGIFKQDDDAKYMEWLDAKPANSVVYVSFGSLTTVAREHLEELLRGLEESGRPYLCVIRKDNKAALADAETKVDEELKNGIVVEWCDQVRVLSHAAVGCFVTHCGWNSVLESLAAGVPMVCVPRMSDQRTNAQLVVREWRVGVRAQVDDGGVLRAAEVRRCIDEAMGNLEAAAEVRRMAAEWKQVVTKAMGKGGSSDRNLMTFVDGARNAV

SEQ ID NO: 17508 - protein, 424 aa, Zea mays subsp. mays
  peptide (1)..(424): Ceres Seq. ID no. 13493201
MFPAKPNDGAKDSDEDGRLEFLPFSDGTEAGYVRSADLGSFNAYMTSFHAAGARSAAEIVDALAARGRPVSRVVYTLLLPWAADVARDRGIPSALYWIQPVSVFAIYHHYFHGHAGVVADHLHDPSFVVEMPGLAPQPVGDLPSFLTDSTDPSNMFHSVFTTIRDLIETLDKESPRSTVLVNTCRELEVGALAAVGAHHDVLPVGPVLPSGGDAGIFKQDDDAKYMEWLDAKPANSVVYVSFGSLTTVAREHLEELLRGLEESGRPYLCVIRKDNKAALADAETKVDEELKNGIVVEWCDQVRVLSHAAVGCFVTHCGWNSVLESLAAGVPMVCVPRMSDQRTNAQLVVREWRVGVRAQVDDGGVLRAAEVRRCIDEAMGNLEAAAEVRRMAAEWKQVVTKAMGKGGSSDRNLMTFVDGARNAV

SEQ ID NO: 17509 - protein, 380 aa, Zea mays subsp. mays
  peptide (1)..(380): Ceres Seq. ID no. 13493202
MTSFHAAGARSAAEIVDALAARGRPVSRVVYTLLLPWAADVARDRGIPSALYWIQPVSVFAIYHHYFHGHAGVVADHLHDPSFVVEMPGLAPQPVGDLPSFLTDSTDPSNMFHSVFTTIRDLIETLDKESPRSTVLVNTCRELEVGALAAVGAHHDVLPVGPVLPSGGDAGIFKQDDDAKYMEWLDAKPANSVVYVSFGSLTTVAREHLEELLRGLEESGRPYLCVIRKDNKAALADAETKVDEELKNGIVVEWCDQVRVLSHAAVGCFVTHCGWNSVLESLAAGVPMVCVPRMSDQRTNAQLVVREWRVGVRAQVDDGGVLRAAEVRRCIDEAMGNLEAAAEVRRMAAEWKQVVTKAMGKGGSSDRNLMTFVDGARNAV

SEQ ID NO: 17510 - DNA, 2759 bp, Zea mays subsp. mays
  misc_feature (1)..(2759): Ceres Seq. ID no. 12362557
  misc_feature (1)..(2759): Ortholog of  Ceres SEQ ID NO 15226209 as cited in SEQ ID NO 0
gcacgaaccattacctagaacatcctaatcgaaaagtcctctcccccacaggatctagggtttgctcgctcggccttcgtccttcttgggccgagccctaattcttctgcaccgccacccagcaggcttcggtttggttcgcatccgctgcgcccgcttcgtccccgtacgtattcttggattccattggcttctatcttcagcatggatgagccaaacaacaattttaatgcaacggtgcatgccaatgagatgtttgatagcaatggtgtgatccatgaagatgagatggcccatgacgatgagatgatccatggccatgcgatgttccttggcgatgagatgattcgtgggaccgagatggttgaaggaagtgagatgatccatggtcatgatatggttcaggttaatgatctcatccacggcaatgagatggttccagttcacgacatggtcaacggtgacaagatagcccatggtaatgaattggttaatgctcagatgaccccacgaatatcaagacgtcggaagaagaagtcgctagtttgggagcacttcactatagaactcatgccagggggaagttcaagagcatgctgcaagttatgcaagcaaacctttgcgtatagttctggctcaaaaattgcaggcactagccatctcaagcggcacatcacactaggctcctgtcctgttatgaaagaccaagacaggaagctagcattgccacttgcagggggccatgtcactgataatgatggcgagggtactgcagaacgtcctactaagaggcgttacagatacactggttatgcaaatgctacttttgatccacagcggagcacctcttatctgacaaagatgataattttgcatgactacccacttcacattgctcaacagtcatcctttattaattttattgagagtctgcagcctcgtttcagagttgtagatgtggagacaatggaaggagaggtgtatgctgttttccagaaagcaaaagaaaacctgttgcaagcattcagcactatgccaggaaggatcagcctcactataggactctggacaaccagtcagactcttggctatgtttctcttgctgggcagtttattgactccgattggaaagtgcaccgaagaatgctcaacttcatgatggtgtcttctccccattcagagaatgcacttagtgaagctattagctcaagcctttctgagtggaatatgaaggacaagctgttcactatcacattggataatgattgctcttcccatgatatttacagtgcaaatcttagggatcacctctccaataagaacaacgtcatgcttaagggacagctctttgttgtgaggtgctatgcacatatcctgaatgtagttgctcaagatgtaattgcttcgattcatggtgtgatttacagcatccgtgagagtatcaagttcataaaagcttctccaagtcgtgaggagaagtttgctgagattgctctgcagctggagattcccagtaccaagactctttgtttagatgttacaacccagtggaacacaacttatctgatgctactggctgccttggactataagcaggcttttgctacactggagacatgtgatgataattacaatgaatctccttcagcagaggactggaagaaagttgaggctagctgtaattacctgaaactgctatatgactctgcacatagtgtgatggcttcagcgaaccctactgcaaacatctttttccatgaagcttggaaaattcagcttgaactagccaatggcacagaacatggaagtccctttttcagctgtattgccaaggatatgcatgagagatttgacaaatactggaaagattgcagcctggtgttagccattgctgttgttatggatccacgtttcaagatgaagcttgtcgagttcagttactctaaaatttatggtgctgaggctgcaaaatatgttaaggttgtcaatgactctctgcatgagctgtataaggagtatgtggcacagacactccccttggctcctgcctatgttgaagctaataacgtggctgccaacacgaatgttaaccagggaaatcctcctccaactagtgatggtcttcttgactttgatatgtacctttctgagattcaaagtagccagcctgcaaaatgtgaactggagcagtatctggaggaatctctcactccacgcatccaggagtttgatattcttaactggtggaagcttaatacactcaagtttccaaccctgtcgaagatggcccgtgatatcttggcaatcccaatgtcgatggttagcagtggcagctccatattctctgctggaactgggaaccgcatgcttgatgattacagaagctctctccggccggagactgtggaggcacttgtatgcgcaaaagactggctccagtattcaccggccgcaactgaggcgccaggttctgagatgatgaaggcagaagcattgtagattgccgatactgcttccctgttgaagcacaaataaggttgcagtatctttgagcatagttaacagtaggtatattttagacagcagttgcagacatatatttcttctggcatttatctcatagtggtctaatttgtcatgtcgaacaaagtttaactcattgtagtgtgtgctgagtttatctgtggtctgacccggcacacatggtgtgggtgcaaactgcaaactgcgggattttttagggattcaggttgttgagc

SEQ ID NO: 17511 - protein, 764 aa, Zea mays subsp. mays
  peptide (1)..(764): Ceres Seq. ID no. 12362558
MDEPNNNFNATVHANEMFDSNGVIHEDEMAHDDEMIHGHAMFLGDEMIRGTEMVEGSEMIHGHDMVQVNDLIHGNEMVPVHDMVNGDKIAHGNELVNAQMTPRISRRRKKKSLVWEHFTIELMPGGSSRACCKLCKQTFAYSSGSKIAGTSHLKRHITLGSCPVMKDQDRKLALPLAGGHVTDNDGEGTAERPTKRRYRYTGYANATFDPQRSTSYLTKMIILHDYPLHIAQQSSFINFIESLQPRFRVVDVETMEGEVYAVFQKAKENLLQAFSTMPGRISLTIGLWTTSQTLGYVSLAGQFIDSDWKVHRRMLNFMMVSSPHSENALSEAISSSLSEWNMKDKLFTITLDNDCSSHDIYSANLRDHLSNKNNVMLKGQLFVVRCYAHILNVVAQDVIASIHGVIYSIRESIKFIKASPSREEKFAEIALQLEIPSTKTLCLDVTTQWNTTYLMLLAALDYKQAFATLETCDDNYNESPSAEDWKKVEASCNYLKLLYDSAHSVMASANPTANIFFHEAWKIQLELANGTEHGSPFFSCIAKDMHERFDKYWKDCSLVLAIAVVMDPRFKMKLVEFSYSKIYGAEAAKYVKVVNDSLHELYKEYVAQTLPLAPAYVEANNVAANTNVNQGNPPPTSDGLLDFDMYLSEIQSSQPAKCELEQYLEESLTPRIQEFDILNWWKLNTLKFPTLSKMARDILAIPMSMVSSGSSIFSAGTGNRMLDDYRSSLRPETVEALVCAKDWLQYSPAATEAPGSEMMKAEAL

SEQ ID NO: 17512 - protein, 748 aa, Zea mays subsp. mays
  peptide (1)..(748): Ceres Seq. ID no. 12362559
MFDSNGVIHEDEMAHDDEMIHGHAMFLGDEMIRGTEMVEGSEMIHGHDMVQVNDLIHGNEMVPVHDMVNGDKIAHGNELVNAQMTPRISRRRKKKSLVWEHFTIELMPGGSSRACCKLCKQTFAYSSGSKIAGTSHLKRHITLGSCPVMKDQDRKLALPLAGGHVTDNDGEGTAERPTKRRYRYTGYANATFDPQRSTSYLTKMIILHDYPLHIAQQSSFINFIESLQPRFRVVDVETMEGEVYAVFQKAKENLLQAFSTMPGRISLTIGLWTTSQTLGYVSLAGQFIDSDWKVHRRMLNFMMVSSPHSENALSEAISSSLSEWNMKDKLFTITLDNDCSSHDIYSANLRDHLSNKNNVMLKGQLFVVRCYAHILNVVAQDVIASIHGVIYSIRESIKFIKASPSREEKFAEIALQLEIPSTKTLCLDVTTQWNTTYLMLLAALDYKQAFATLETCDDNYNESPSAEDWKKVEASCNYLKLLYDSAHSVMASANPTANIFFHEAWKIQLELANGTEHGSPFFSCIAKDMHERFDKYWKDCSLVLAIAVVMDPRFKMKLVEFSYSKIYGAEAAKYVKVVNDSLHELYKEYVAQTLPLAPAYVEANNVAANTNVNQGNPPPTSDGLLDFDMYLSEIQSSQPAKCELEQYLEESLTPRIQEFDILNWWKLNTLKFPTLSKMARDILAIPMSMVSSGSSIFSAGTGNRMLDDYRSSLRPETVEALVCAKDWLQYSPAATEAPGSEMMKAEAL

SEQ ID NO: 17513 - protein, 736 aa, Zea mays subsp. mays
  peptide (1)..(736): Ceres Seq. ID no. 12362560
MAHDDEMIHGHAMFLGDEMIRGTEMVEGSEMIHGHDMVQVNDLIHGNEMVPVHDMVNGDKIAHGNELVNAQMTPRISRRRKKKSLVWEHFTIELMPGGSSRACCKLCKQTFAYSSGSKIAGTSHLKRHITLGSCPVMKDQDRKLALPLAGGHVTDNDGEGTAERPTKRRYRYTGYANATFDPQRSTSYLTKMIILHDYPLHIAQQSSFINFIESLQPRFRVVDVETMEGEVYAVFQKAKENLLQAFSTMPGRISLTIGLWTTSQTLGYVSLAGQFIDSDWKVHRRMLNFMMVSSPHSENALSEAISSSLSEWNMKDKLFTITLDNDCSSHDIYSANLRDHLSNKNNVMLKGQLFVVRCYAHILNVVAQDVIASIHGVIYSIRESIKFIKASPSREEKFAEIALQLEIPSTKTLCLDVTTQWNTTYLMLLAALDYKQAFATLETCDDNYNESPSAEDWKKVEASCNYLKLLYDSAHSVMASANPTANIFFHEAWKIQLELANGTEHGSPFFSCIAKDMHERFDKYWKDCSLVLAIAVVMDPRFKMKLVEFSYSKIYGAEAAKYVKVVNDSLHELYKEYVAQTLPLAPAYVEANNVAANTNVNQGNPPPTSDGLLDFDMYLSEIQSSQPAKCELEQYLEESLTPRIQEFDILNWWKLNTLKFPTLSKMARDILAIPMSMVSSGSSIFSAGTGNRMLDDYRSSLRPETVEALVCAKDWLQYSPAATEAPGSEMMKAEAL

SEQ ID NO: 17514 - DNA, 1748 bp, Zea mays subsp. mays
  misc_feature (1)..(1748): Ceres Seq. ID no. 12391465
  misc_feature (1)..(1748): Ortholog of  Ceres SEQ ID NO 13655375 as cited in SEQ ID NO 63347
gactagaagaaagctgaaattacctcatgatcagctctggtggaaatacgccaccttgattgcccactctccgcccgtcgtcgccacaactcgcccgcggtacaacggcccggctaaaacgaggcagggcgcgcacttaaaatagcccggcacggcgcgtacccaccaccacccgcccgccccgcgccgcgcaggcaccacccgctctcctgcggcctcctcctgtttgtgttttcaccgtggtgccgccgccgctgtcccctctctccagctgcggcgaccgcgaccgacaggcggtagagggcaaaggctagcgagatgacgaagctgccgtggtggcgcgccgacgcgtcggagctggtggccgtgacggcgatgggagtgtgggaggccgtgctcgccggcggcggcaggagattcatcaagcggaaggacagcgacgccggcgagaccggttcgcatccccaccaccctgtgttgatcctgaacatttttttcaaaaaaaaggatctttccgccggctctgttggggttgatggcgaaagaagagctcttcctttggctttgcgcggtcgggcactggaggagttgcgaagctccttgtacaatgaaatgcatagcgcagaaggtgctaagcgccagcagcagcgattctgtggaccaagtgttgcattgacattcaattttgctgttgctgttgggattatcatggcaaacaaaatggtgatggggagtgttggatttaaatttccaattgcactctcattaattcattatgcagttgcatttgttctaatggccacccttaagacattatccttgttaccagttgccccaccatcgaaatccactcctttctcatctatatttgctttgggtgctgtaatgtccctgtccactgggctagccaacgtgagtttgaaacataacagtgtaggtttctatcaaatggctaagattgctgtaaccccaacaattgtcgtagcagaattcatgcttttccagaagaaagtttcctctaaaaaggctgtcacactggcagttgtgtcatttggagtcgctgtagcgactgttaccgatctggagttcaacttttttggtgcttgtgttgcattagcatggattgttcctagtgccgtgaacaaaatcctttggtcaagtttgcaacagagtggaaactggaccgcccttgcgctgatgtggaagacaactccgattacgatatttttcttgttgacattgatgcctttgctggacccccctggcctcttgttgttcaattggaacttcagaaacagctgcgctgttatcatctctgcattgttcggtttccttcttcagtggtctggtgctttggcactcggcgcgacgtcagctttgtctcatgttgtgctgggccaattcaaaacgatcgtcatcatgctctccggctacctgatcttcggctccgaccctgggatcaccagcgtctgcggtgccgtgctcgcactcggcggcatgtccttctacacctacctgggtctgaagaaagaccccgcgaccagcggcaagaaagcaccatcgagacagaactccttcatggagagacctaaggtcgctgctgacgacagtgacgacgcggattcagagcaagatgatactgtataggttggggaaactgtcgtctaggccacttaatgcaaagatcaatccgagctcagttaattttcggttggttgtaatctgtcggtgaccgagtccatttttgt

SEQ ID NO: 17515 - protein, 442 aa, Zea mays subsp. mays
  peptide (1)..(442): Ceres Seq. ID no. 12391466
MTKLPWWRADASELVAVTAMGVWEAVLAGGGRRFIKRKDSDAGETGSHPHHPVLILNIFFKKKDLSAGSVGVDGERRALPLALRGRALEELRSSLYNEMHSAEGAKRQQQRFCGPSVALTFNFAVAVGIIMANKMVMGSVGFKFPIALSLIHYAVAFVLMATLKTLSLLPVAPPSKSTPFSSIFALGAVMSLSTGLANVSLKHNSVGFYQMAKIAVTPTIVVAEFMLFQKKVSSKKAVTLAVVSFGVAVATVTDLEFNFFGACVALAWIVPSAVNKILWSSLQQSGNWTALALMWKTTPITIFFLLTLMPLLDPPGLLLFNWNFRNSCAVIISALFGFLLQWSGALALGATSALSHVVLGQFKTIVIMLSGYLIFGSDPGITSVCGAVLALGGMSFYTYLGLKKDPATSGKKAPSRQNSFMERPKVAADDSDDADSEQDDTV

SEQ ID NO: 17516 - protein, 423 aa, Zea mays subsp. mays
  peptide (1)..(423): Ceres Seq. ID no. 12391467
MGVWEAVLAGGGRRFIKRKDSDAGETGSHPHHPVLILNIFFKKKDLSAGSVGVDGERRALPLALRGRALEELRSSLYNEMHSAEGAKRQQQRFCGPSVALTFNFAVAVGIIMANKMVMGSVGFKFPIALSLIHYAVAFVLMATLKTLSLLPVAPPSKSTPFSSIFALGAVMSLSTGLANVSLKHNSVGFYQMAKIAVTPTIVVAEFMLFQKKVSSKKAVTLAVVSFGVAVATVTDLEFNFFGACVALAWIVPSAVNKILWSSLQQSGNWTALALMWKTTPITIFFLLTLMPLLDPPGLLLFNWNFRNSCAVIISALFGFLLQWSGALALGATSALSHVVLGQFKTIVIMLSGYLIFGSDPGITSVCGAVLALGGMSFYTYLGLKKDPATSGKKAPSRQNSFMERPKVAADDSDDADSEQDDTV

SEQ ID NO: 17517 - protein, 344 aa, Zea mays subsp. mays
  peptide (1)..(344): Ceres Seq. ID no. 12391468
MHSAEGAKRQQQRFCGPSVALTFNFAVAVGIIMANKMVMGSVGFKFPIALSLIHYAVAFVLMATLKTLSLLPVAPPSKSTPFSSIFALGAVMSLSTGLANVSLKHNSVGFYQMAKIAVTPTIVVAEFMLFQKKVSSKKAVTLAVVSFGVAVATVTDLEFNFFGACVALAWIVPSAVNKILWSSLQQSGNWTALALMWKTTPITIFFLLTLMPLLDPPGLLLFNWNFRNSCAVIISALFGFLLQWSGALALGATSALSHVVLGQFKTIVIMLSGYLIFGSDPGITSVCGAVLALGGMSFYTYLGLKKDPATSGKKAPSRQNSFMERPKVAADDSDDADSEQDDTV

SEQ ID NO: 17518 - DNA, 847 bp, Zea mays subsp. mays
  misc_feature (1)..(847): Ceres Seq. ID no. 12390186
  misc_feature (1)..(847): Ortholog of  Ceres SEQ ID NO 12473977 as cited in SEQ ID NO 133
  misc_feature (1)..(847): Ortholog of  Ceres SEQ ID NO 15225932 as cited in SEQ ID NO 60016
  misc_feature (1)..(847): Ortholog of  Ceres SEQ ID NO 12585294 as cited in SEQ ID NO 63023
gcacgagaccattacctagaacatcctaatcgaaaaagtggcgcttggggctgttcgttgtggtggtgcggcaggaagagacgatggcgcgaggtggcgcgtgggccgcggtggcggcggcggccgtgtggtggatggcggcgggggccggggcggtatggctggagattgcgccgtcagggactaagtgtgtgtcggaggagatccaatccaacgttgttgtcatcggcgactactccgtcctctatgatcaccaccacgcccagcctaccatctccgtcaaggttacgtccccttttggagacattgttcataagaaagagaaggtttcgatggggcaatttgcatttaccacagcagaagcagggaactaccttgcctgcttctcaattgatggtgaggacagagggttagtggtgaagctaaaccttgactggaaaattgggctggctagtagagactgggattctgttgccaaaaaggaaaagatcgagggagttgaactggagttgctcaagctcgaagttgctgtccaatcaatccatgacaacctgctgctactaaaatccaaagaagctaacatgagggacgtcagtgagcagacgaattctagggtcacgtggctgagcatgctgtctcttgttgtttgcattgcagtctctgttttacagctgtggcatctacaacagtacttccgaaagatgaagctcatctgacctgatgtctgaaatatagtgctctgcaataagcttatcttcatctttttttttttttgcatatgagatctggtagttccaccgtcgagcctagcaattgtaaataaaatggtataacaaactgaaatccc

SEQ ID NO: 17519 - protein, 210 aa, Zea mays subsp. mays
  peptide (1)..(210): Ceres Seq. ID no. 12390187
MARGGAWAAVAAAAVWWMAAGAGAVWLEIAPSGTKCVSEEIQSNVVVIGDYSVLYDHHHAQPTISVKVTSPFGDIVHKKEKVSMGQFAFTTAEAGNYLACFSIDGEDRGLVVKLNLDWKIGLASRDWDSVAKKEKIEGVELELLKLEVAVQSIHDNLLLLKSKEANMRDVSEQTNSRVTWLSMLSLVVCIAVSVLQLWHLQQYFRKMKLI

SEQ ID NO: 17520 - protein, 193 aa, Zea mays subsp. mays
  peptide (1)..(193): Ceres Seq. ID no. 12390188
MAAGAGAVWLEIAPSGTKCVSEEIQSNVVVIGDYSVLYDHHHAQPTISVKVTSPFGDIVHKKEKVSMGQFAFTTAEAGNYLACFSIDGEDRGLVVKLNLDWKIGLASRDWDSVAKKEKIEGVELELLKLEVAVQSIHDNLLLLKSKEANMRDVSEQTNSRVTWLSMLSLVVCIAVSVLQLWHLQQYFRKMKLI

SEQ ID NO: 17521 - protein, 137 aa, Zea mays subsp. mays
  peptide (1)..(137): Ceres Seq. ID no. 12390189
ARDHYLEHPNRKSGAWGCSLWWCGRKRRWREVARGPRWRRRPCGGWRRGPGRYGWRLRRQGLSVCRRRSNPTLLSSATTPSSMITTTPSLPSPSRLRPLLETLFIRKRRFRWGNLHLPQQKQGTTLPASQLMVRTEG

SEQ ID NO: 17522 - DNA, 2068 bp, Zea mays subsp. mays
  misc_feature (1)..(2068): Ceres Seq. ID no. 12362514
  misc_feature (1)..(2068): Ortholog of  Ceres SEQ ID NO 15169199 as cited in SEQ ID NO 55297
  misc_feature (1)..(2068): Ortholog of  Ceres SEQ ID NO 15175690 as cited in SEQ ID NO 55466
  misc_feature (1)..(2068): Ortholog of  Ceres SEQ ID NO 15171197 as cited in SEQ ID NO 56892
  misc_feature (1)..(2068): Ortholog of  Ceres SEQ ID NO 14306381 as cited in SEQ ID NO 58812
gcacgagaccattacctagaacatcctaatcgaaaaattcccttccttccttgctcctcccctgcctcgcctctctctctcccctctcctcgcctccagctcctgctcggcccgctcgcgtcgagctgcgcgcgcgcctgcggtggccgtgaaggacagcccgagggacgcgccgggtgcactgatctgggggccgcgtgtccccggtggtggggcgaggcggcgccggcttccaggaatgggcaacttgtagcgtcggtttcttttgcatatgcactttctattgttgttgtcatttcaaaggaggccatagtctcctggattttgtatgccttgttatctggaattggtgaccatagatgtcattccgtagcatagtccgtgatgttagggatggctttggcagcttgtcgaggagaagctttgaggtgaccctcgcaagcatttatggccttactgggcatcacaaagggaagacccagagctcatcacatgttctcgacgactcaccttccataattcgtgaaagtcgatgggcgaatctacctcctgaactcatccgtgatatcatacggagactggaggctgatgagagcacctggccagcgcggaagcacgtcgtttgcttcgcagctgtttgtaggacatggagagaaatgtgtaaagagattgtgttgagcccagagttctgtggcaagctcaccttccctgtgtctctaaaacagcctggtcctcgagatggaaatacaatggtccagtgttttataaagaggaataagtcaaaatccacttaccatctctacctgtgccttagcaatgttgttacttcagaaagtgggaaattcctcttatcagctaaacgacaccgcaaaaccacatgcaccgagtacactatatcaatggattctggcaacatctcaagatcaaaaagaacctacattggaaaaataaggtctaacttcctaggcacaagatttttaatttatgatacacaagccccctataatggggctgtagttcctcctgccggaaggaccagcaggaggttcaactccacaaaagtctctccaaagctgccttcagtcagttacaacatcgcacaggtatcgtatgagctaaatgtccttggcacaagaggtcctaggcggatgcgttgcatcatgcactccatacctgcatcatcagtggagccaggtggcacagtgcctggacagccagagcagattgtacctcgagccctggaggattcattccgcagcacggcttccttctcgcagtcgttccgtagcactgcctcattctccaagtccatcatggactcgtccatggatttcaatagcgctcgcttctctgacatagctggcagcagcgctcgcttcacgggcgttcctggtagcagtgctcgctttgcgggcgttcctggcagcagcgctcgcttctcgggcattgctggcgccagattggacaacgacgaggagagtgaaaccaaggagaggccactggtgcttcgtaataagccgcctaggtggcacgaacagctgcagtgttggtgcctcaacttccggggccgtgtgacaattgcctcggtgaagaacttccagctgatcgccgcggctaccccgccacccgcaggtgcgccaaccccctcgcagcntgctccgtcagatcctgacaaggtgattctccagtttggcaaagtggcaagggatatgttcacgatggactatcgctaccctctctcggctttccaggcctttgccatttgtctgagtagctttgatacaaaattagcctgtgaataaatggagaagaacaaaggtaaaggagaacagcaggttgcttgcattaggccatcagtgtacctctttccatctggctctcgtgttgccttggttgtatttgtgcttaatgtagccatgaagttggtggccatatatggacgcatgtgttgttgttggccctctcccttagaagtgattaaaagttgcatttggaccacatgttacccgatctgtaatatacttgcagtggcattgcatgccgcgtgataacaaagttcccgttcgtg

SEQ ID NO: 17523 - protein, 480 aa, Zea mays subsp. mays
  peptide (1)..(480): Ceres Seq. ID no. 12362515
  misc_feature (432)..(432): Xaa is any aa, unknown or other
MSFRSIVRDVRDGFGSLSRRSFEVTLASIYGLTGHHKGKTQSSSHVLDDSPSIIRESRWANLPPELIRDIIRRLEADESTWPARKHVVCFAAVCRTWREMCKEIVLSPEFCGKLTFPVSLKQPGPRDGNTMVQCFIKRNKSKSTYHLYLCLSNVVTSESGKFLLSAKRHRKTTCTEYTISMDSGNISRSKRTYIGKIRSNFLGTRFLIYDTQAPYNGAVVPPAGRTSRRFNSTKVSPKLPSVSYNIAQVSYELNVLGTRGPRRMRCIMHSIPASSVEPGGTVPGQPEQIVPRALEDSFRSTASFSQSFRSTASFSKSIMDSSMDFNSARFSDIAGSSARFTGVPGSSARFAGVPGSSARFSGIAGARLDNDEESETKERPLVLRNKPPRWHEQLQCWCLNFRGRVTIASVKNFQLIAAATPPPAGAPTPSQXAPSDPDKVILQFGKVARDMFTMDYRYPLSAFQAFAICLSSFDTKLACE

SEQ ID NO: 17524 - protein, 381 aa, Zea mays subsp. mays
  peptide (1)..(381): Ceres Seq. ID no. 12362516
  misc_feature (333)..(333): Xaa is any aa, unknown or other
MCKEIVLSPEFCGKLTFPVSLKQPGPRDGNTMVQCFIKRNKSKSTYHLYLCLSNVVTSESGKFLLSAKRHRKTTCTEYTISMDSGNISRSKRTYIGKIRSNFLGTRFLIYDTQAPYNGAVVPPAGRTSRRFNSTKVSPKLPSVSYNIAQVSYELNVLGTRGPRRMRCIMHSIPASSVEPGGTVPGQPEQIVPRALEDSFRSTASFSQSFRSTASFSKSIMDSSMDFNSARFSDIAGSSARFTGVPGSSARFAGVPGSSARFSGIAGARLDNDEESETKERPLVLRNKPPRWHEQLQCWCLNFRGRVTIASVKNFQLIAAATPPPAGAPTPSQXAPSDPDKVILQFGKVARDMFTMDYRYPLSAFQAFAICLSSFDTKLACE

SEQ ID NO: 17525 - protein, 350 aa, Zea mays subsp. mays
  peptide (1)..(350): Ceres Seq. ID no. 12362517
  misc_feature (302)..(302): Xaa is any aa, unknown or other
MVQCFIKRNKSKSTYHLYLCLSNVVTSESGKFLLSAKRHRKTTCTEYTISMDSGNISRSKRTYIGKIRSNFLGTRFLIYDTQAPYNGAVVPPAGRTSRRFNSTKVSPKLPSVSYNIAQVSYELNVLGTRGPRRMRCIMHSIPASSVEPGGTVPGQPEQIVPRALEDSFRSTASFSQSFRSTASFSKSIMDSSMDFNSARFSDIAGSSARFTGVPGSSARFAGVPGSSARFSGIAGARLDNDEESETKERPLVLRNKPPRWHEQLQCWCLNFRGRVTIASVKNFQLIAAATPPPAGAPTPSQXAPSDPDKVILQFGKVARDMFTMDYRYPLSAFQAFAICLSSFDTKLACE

SEQ ID NO: 17526 - DNA, 1478 bp, Zea mays subsp. mays
  misc_feature (1)..(1478): Ceres Seq. ID no. 12366212
  misc_feature (1)..(1478): Ortholog of  Ceres SEQ ID NO 14313666 as cited in SEQ ID NO 54618
  misc_feature (1)..(1478): Ortholog of  Ceres SEQ ID NO 13595351 as cited in SEQ ID NO 55934
  misc_feature (1)..(1478): Ortholog of  Ceres SEQ ID NO 13595513 as cited in SEQ ID NO 56663
  misc_feature (1)..(1478): Ortholog of  Ceres SEQ ID NO 13639645 as cited in SEQ ID NO 57488
cgcgcctccccccaactcgtccagagttagttgtagctatagacctggttgttgtagcgcacgcagtagccataggaaatgcggctgcttgctgccaagatgagtggcggcgccaaggcctacgccgccgtcgtcctgatcaggatcatgtactccggcatgcacgtcatgagcaaggtggccctggatcagggcatgaacccgctggtgttcctgttctaccggcataccactgccgcgctcgttctcatccctgtcacctttgttgtcgagaggcggaaagctaagccggttacgttcaagattggatggaagatgttcatacatgccctctatggggtgacagcatgcggtgacttgtttaaccttggactcaactacacttctgctacgtcatcttcagcgttgtacaacgttcaaccggtggtcacattcatcctagccgtcatatttgggatggagactctgaaactgactcggttccatggcaaagtgaaattcgcgggcatcctgttctgcgtcgccggcgtcaccatcctggccttctacgaggggccgatgttcaggtccttcaaccaccaccatctgtttcagaacggcggcggcggcggcggtagctctgcagcaggagcaggagacacgcactccaagaagcagtgggtgctggggatcttcctcatgacactatccaacgttctagcaggcctgtggacagtgctccaggggcccctgatagaggacacgtcgaagctgatgaacacgacgctgcagatctcgtgggcgtcgctccaggccttcctggtggccgttgcggtggagagggacttctccaagtggaggctgggctggaacgtcggcctcgccgccataatctacagcggcgtgatcgtgacggcgctttcctactacatgcaaatgtggacgatcgccaagaggggcccggtgttcctggccatgtccatgccgctcaccttcgtcttcaccatcgtcatatcctccttcgtcataggggacgcagtcagcctaggaagcatctttgccggggcgttgctggttggaggcctgtacaatgtgttctgggggcaagagcatcgaggagcgagacgacgacgacctgatgaacaagatcagcggcccgggaaaagccgggcagcaggacaaggcggcggacaataatccggcgtcgtcccaagtgccggatgacggtgcggaggcaaaggtgtaatacagcctctctcatcagtcagccagacacgggaacgatcgatctgcgtcaaaagctaggcggccagcaggccaaagccaagccactggttaatttatttcaggggtgctgggaaacaaaacaacgaagaacgaagcaggaattagcacacgtattgtgatttgtgaatgtgacgtgatcgatatgcaggtctactcaccggccggccggactcgtgtggcacacgcacgctgtaaatttggtctcggatttt

SEQ ID NO: 17527 - protein, 365 aa, Zea mays subsp. mays
  peptide (1)..(365): Ceres Seq. ID no. 12366213
MRLLAAKMSGGAKAYAAVVLIRIMYSGMHVMSKVALDQGMNPLVFLFYRHTTAALVLIPVTFVVERRKAKPVTFKIGWKMFIHALYGVTACGDLFNLGLNYTSATSSSALYNVQPVVTFILAVIFGMETLKLTRFHGKVKFAGILFCVAGVTILAFYEGPMFRSFNHHHLFQNGGGGGGSSAAGAGDTHSKKQWVLGIFLMTLSNVLAGLWTVLQGPLIEDTSKLMNTTLQISWASLQAFLVAVAVERDFSKWRLGWNVGLAAIIYSGVIVTALSYYMQMWTIAKRGPVFLAMSMPLTFVFTIVISSFVIGDAVSLGSIFAGALLVGGLYNVFWGQEHRGARRRRPDEQDQRPGKSRAAGQGGGQ

SEQ ID NO: 17528 - protein, 358 aa, Zea mays subsp. mays
  peptide (1)..(358): Ceres Seq. ID no. 12366214
MSGGAKAYAAVVLIRIMYSGMHVMSKVALDQGMNPLVFLFYRHTTAALVLIPVTFVVERRKAKPVTFKIGWKMFIHALYGVTACGDLFNLGLNYTSATSSSALYNVQPVVTFILAVIFGMETLKLTRFHGKVKFAGILFCVAGVTILAFYEGPMFRSFNHHHLFQNGGGGGGSSAAGAGDTHSKKQWVLGIFLMTLSNVLAGLWTVLQGPLIEDTSKLMNTTLQISWASLQAFLVAVAVERDFSKWRLGWNVGLAAIIYSGVIVTALSYYMQMWTIAKRGPVFLAMSMPLTFVFTIVISSFVIGDAVSLGSIFAGALLVGGLYNVFWGQEHRGARRRRPDEQDQRPGKSRAAGQGGGQ

SEQ ID NO: 17529 - protein, 342 aa, Zea mays subsp. mays
  peptide (1)..(342): Ceres Seq. ID no. 12366215
MYSGMHVMSKVALDQGMNPLVFLFYRHTTAALVLIPVTFVVERRKAKPVTFKIGWKMFIHALYGVTACGDLFNLGLNYTSATSSSALYNVQPVVTFILAVIFGMETLKLTRFHGKVKFAGILFCVAGVTILAFYEGPMFRSFNHHHLFQNGGGGGGSSAAGAGDTHSKKQWVLGIFLMTLSNVLAGLWTVLQGPLIEDTSKLMNTTLQISWASLQAFLVAVAVERDFSKWRLGWNVGLAAIIYSGVIVTALSYYMQMWTIAKRGPVFLAMSMPLTFVFTIVISSFVIGDAVSLGSIFAGALLVGGLYNVFWGQEHRGARRRRPDEQDQRPGKSRAAGQGGGQ

SEQ ID NO: 17530 - DNA, 761 bp, Zea mays subsp. mays
  misc_feature (1)..(761): Ceres Seq. ID no. 12633730
  misc_feature (1)..(761): Ortholog of  Ceres SEQ ID NO 15177722 as cited in SEQ ID NO 0
gacattcaagggccacgatgtttctcatatgtaataatgcagcacaaggcattctatcttcattcttcttcaagtatgcagacacaattttgaagaagtattcgtcaactgttgccacgatatttactggcctagcttctgctgcatttttggggcataccttgaccattaattttctcctgggcatatcagtggtgtttatttcaatgcaccagttcttctctccacttgctaaagtcaaagatgacaaaccagctgacttaatagagttggaagacacacaaaatcaccggtcatccgaatcttcttttgtaaatatgactgctggtgctgctgttgatgcgagccatcggattggaactgatgagaggcaacccctgttgcctacatgaactagtttcttgaggtagggatagatgactctttttttgcggtgtgagcagcaggtttggtgtagcattgtaagttgaataaactattgtacactgtaaaggcaaaggaaagaaagaactaccaacatcttctccattttctttcatttttgggacgaggccggccggtggcctgccatctgtggccgtgggagtgacagagcagcaaacattttgataggcgtataattcaatagggattttccagatacggcacttgtaacagaattttcttggaggtgtatatgaacaacggcgatgtgacaatcttttctgtacggaacatttatactattgagtgattgatttactattactatgttgttactc

SEQ ID NO: 17531 - protein, 129 aa, Zea mays subsp. mays
  peptide (1)..(129): Ceres Seq. ID no. 12633731
HSRATMFLICNNAAQGILSSFFFKYADTILKKYSSTVATIFTGLASAAFLGHTLTINFLLGISVVFISMHQFFSPLAKVKDDKPADLIELEDTQNHRSSESSFVNMTAGAAVDASHRIGTDERQPLLPT

SEQ ID NO: 17532 - protein, 124 aa, Zea mays subsp. mays
  peptide (1)..(124): Ceres Seq. ID no. 12633732
MFLICNNAAQGILSSFFFKYADTILKKYSSTVATIFTGLASAAFLGHTLTINFLLGISVVFISMHQFFSPLAKVKDDKPADLIELEDTQNHRSSESSFVNMTAGAAVDASHRIGTDERQPLLPT

SEQ ID NO: 17533 - DNA, 1944 bp, Zea mays subsp. mays
  misc_feature (1)..(1944): Ceres Seq. ID no. 12375162
  misc_feature (1)..(1944): Ortholog of  Ceres SEQ ID NO 15170647 as cited in SEQ ID NO 67122
atatccattcccgctcgtccccctcaacaaccctcctcacggcgcactcgtgttcgtgtcatcccgcccgcaggccgcagtccatggccaccgccagcctcgcgctctcgctgcgcctcgcgccgtcctcgcgcccgctgagcctccgccgccggggggccaccggcgtcacctgccgcgccaccaccgccacgttccaccagctcgacgccgtcgcggtgagggaggaggagtccaggttccggacggcggcggcggagggccgcaacctgctgccgctcacgaggtgcatcttctccgatcacctcacgccagtgctcgcgtaccgctgcctcgtcaaggaggacgaacgcgaggcgcccagctttctattcgagtctgtcgagcaggggtccgagggcaccaatgtggggaggtacagcgtggtcggggcgcagccttctatggaggtcgtggccaaggctaaccatgtgacggtcatggaccatgagatgaagtcgaggagggagcacttcgtgcctgatcccatgaggatccccaggacaatcatggagcagtggaacccgcagattgctgacagcctccctgatgcattttgtggaggatgggttggattcttctcatatgatacagtgcgttatgttgaaacaaagaagcttcctttcagtaaggcaccacatgacgataggaaccttcctgacattcatttaggcctctatagtgacgtcattgtgtttgatcatgttgaaaagaaaacacatgttattcattgggtgaggacagactgctatcgttctgttgatgaagcatatgaagatggaagaaatcggcttgaagctttgttatcaagattacattgcctcaatgtcccaacactttcttctggttctataaaactcaatgttgaaaactttggcccagtatgcaaaaatcaacgatgtcaagcgaagaatataaaaatatcgttgtccaagctaaagaacacatcttggccggtgacattttccaagttgttttaagccagcgttttgagagacggacattcgccgacccctttgaaatctatcgtgcattgcgcatcgtaaatcctagtccatatatggcctatctacaggcacgaggttgtattctcgtggcatcgagtcctgaaattcttacccgggtacaaaagaggacaataatcaatcgtccgcttgctggaaccataagaagaggcaaaacaaaagcagaagacaaaactttagaacaattgcttttgagtgatgaaaagcagtgtgctgaacatattatgctagtagatcttggccgaaatgatgttgggaaggtgtccaaaccaggttcagtaaaggtagagaaattgatgaatatcgaacgatattctcatgtcatgcacatcagctcaacagtaactggagagctacgcgatgatcttacgtgttgggatgcgctacgagccgcattgccagttggaaccgttagtggcgctccaaaggtgagagcaatggagttgattgatcagctagaagtgagtatgcgtgggccgtatagtggtggttttggagggatttccttccgcggcgacatggacattgcactcgctcttcgcactattgtcttccccaccgcatctaggtttgataccatgtactcgtacacagacagtaagtcccggcaggagtgggtggctcacctccaggccggagctggcatagttgctgatagcaaaccggatgacgagcaccaagagtgtataaacaaggctgcaggtgttgctcgtgccattgaccttgctgaatcgacatttcttgaagagtagtctagtctaatgaaggaaatgtatgtttaagttctctgtataattatggattgtcctagaaaacaggctttcttaggccgaataaaaactcaactgtaataaagttaataaatggacaactttagctc

SEQ ID NO: 17534 - protein, 338 aa, Zea mays subsp. mays
  peptide (1)..(338): Ceres Seq. ID no. 12375163
IHSRSSPSTTLLTAHSCSCHPARRPQSMATASLALSLRLAPSSRPLSLRRRGATGVTCRATTATFHQLDAVAVREEESRFRTAAAEGRNLLPLTRCIFSDHLTPVLAYRCLVKEDEREAPSFLFESVEQGSEGTNVGRYSVVGAQPSMEVVAKANHVTVMDHEMKSRREHFVPDPMRIPRTIMEQWNPQIADSLPDAFCGGWVGFFSYDTVRYVETKKLPFSKAPHDDRNLPDIHLGLYSDVIVFDHVEKKTHVIHWVRTDCYRSVDEAYEDGRNRLEALLSRLHCLNVPTLSSGSIKLNVENFGPVCKNQRCQAKNIKISLSKLKNTSWPVTFSKLF

SEQ ID NO: 17535 - protein, 311 aa, Zea mays subsp. mays
  peptide (1)..(311): Ceres Seq. ID no. 12375164
MATASLALSLRLAPSSRPLSLRRRGATGVTCRATTATFHQLDAVAVREEESRFRTAAAEGRNLLPLTRCIFSDHLTPVLAYRCLVKEDEREAPSFLFESVEQGSEGTNVGRYSVVGAQPSMEVVAKANHVTVMDHEMKSRREHFVPDPMRIPRTIMEQWNPQIADSLPDAFCGGWVGFFSYDTVRYVETKKLPFSKAPHDDRNLPDIHLGLYSDVIVFDHVEKKTHVIHWVRTDCYRSVDEAYEDGRNRLEALLSRLHCLNVPTLSSGSIKLNVENFGPVCKNQRCQAKNIKISLSKLKNTSWPVTFSKLF

SEQ ID NO: 17536 - protein, 297 aa, Zea mays subsp. mays
  peptide (1)..(297): Ceres Seq. ID no. 12375165
MQKSTMSSEEYKNIVVQAKEHILAGDIFQVVLSQRFERRTFADPFEIYRALRIVNPSPYMAYLQARGCILVASSPEILTRVQKRTIINRPLAGTIRRGKTKAEDKTLEQLLLSDEKQCAEHIMLVDLGRNDVGKVSKPGSVKVEKLMNIERYSHVMHISSTVTGELRDDLTCWDALRAALPVGTVSGAPKVRAMELIDQLEVSMRGPYSGGFGGISFRGDMDIALALRTIVFPTASRFDTMYSYTDSKSRQEWVAHLQAGAGIVADSKPDDEHQECINKAAGVARAIDLAESTFLEE

SEQ ID NO: 17537 - DNA, 1209 bp, Zea mays subsp. mays
  misc_feature (1)..(1209): Ceres Seq. ID no. 12417301
  misc_feature (1)..(1209): Ortholog of  Ceres SEQ ID NO 13648017 as cited in SEQ ID NO 20335
agatcatcgtgcttccactctcgcctttccatctgcgagtccccttcccggctccaatctcacatcaactcgggtctttccctgagagatcgtcgttttccctgtttctttcctcccccagcccggttccgattccgacaaagatccgttcttcctagtaagacaaggaaagaaagaaaccaagaaccaacctttggcacatggcggagccggccaagaacgaggcccacgtcgtggagatcccggtcgctgtcgacggcggcgaagcctccggaggcgaggaggcctttcttgacaaggcggcggcggcgggcgagggtcacccgctcggggagatcgcggctagcgagggacacctgctgctgctgaagctgtggcagcgggaggaggaccgcctgggccgccgcgcgtgcgcgctggaggcgcgcatggacgcggcgcgccgggacgccttctacctctgcgcggccttcctcgcctttcacggcctttccctcgcgctcctcttcgccgcgtccgtggtcgccgcggccgccacctccccctccgccgcgtgcaggaggtggtgggcgccgtcgtctctgtccctggcggcgtccctcgcgctcgccgcggccgtgcagctccgggtgggcgcctactggcgcgccgcggcgcggctgcgccgggaccgcggcgacgcgcgcgcactcgcgcgggccgtgcaggagctgcgcttgaagggcgccgcgttcgacctgtccaaggagccgcagtacggggtgacgagggccaagtgcgccagcgtggagggcgcgggcctgtgggcgccgctccggtggttccggcagaacgtcgtcacagcctgcctgctcgccgtcgccgccgcggccttgccctccggcaagttcatcctctgcgcatagnatgcatggatgcggggtcgccagcttctttaaggctcgttcggttcctccggaatgagcgcctggaataattcacggttggatctttataagctggaatgactctggtgctcaatcctgatgaaccgaacagaccgctgatcttcagaaccaaaaatggggactgctcgccgcacagggaacagagacaccacttgtgctccctaggcaagatccccatgaaatggcagaaatgcgcattctttcttgtaattttttctagctggaccttcagttgacattctataatggaaatgctttaggc

SEQ ID NO: 17538 - protein, 234 aa, Zea mays subsp. mays
  peptide (1)..(234): Ceres Seq. ID no. 12417302
MAEPAKNEAHVVEIPVAVDGGEASGGEEAFLDKAAAAGEGHPLGEIAASEGHLLLLKLWQREEDRLGRRACALEARMDAARRDAFYLCAAFLAFHGLSLALLFAASVVAAAATSPSAACRRWWAPSSLSLAASLALAAAVQLRVGAYWRAAARLRRDRGDARALARAVQELRLKGAAFDLSKEPQYGVTRAKCASVEGAGLWAPLRWFRQNVVTACLLAVAAAALPSGKFILCA

SEQ ID NO: 17539 - protein, 158 aa, Zea mays subsp. mays
  peptide (1)..(158): Ceres Seq. ID no. 12417303
MDAARRDAFYLCAAFLAFHGLSLALLFAASVVAAAATSPSAACRRWWAPSSLSLAASLALAAAVQLRVGAYWRAAARLRRDRGDARALARAVQELRLKGAAFDLSKEPQYGVTRAKCASVEGAGLWAPLRWFRQNVVTACLLAVAAAALPSGKFILCA

SEQ ID NO: 17540 - protein, 122 aa, Zea mays subsp. mays
  peptide (1)..(122): Ceres Seq. ID no. 12417304
RSSCFHSRLSICESPSRLQSHINSGLSLRDRRFPCFFPPPARFRFRQRSVLPSKTRKERNQEPTFGTWRSRPRTRPTSWRSRSLSTAAKPPEARRPFLTRRRRRARVTRSGRSRLARDTCCC

SEQ ID NO: 17541 - DNA, 835 bp, Zea mays subsp. mays
  misc_feature (1)..(835): Ceres Seq. ID no. 12455206
  misc_feature (1)..(835): Ortholog of  Ceres SEQ ID NO 13582184 as cited in SEQ ID NO 56002
gcacgagaccattacctagaacatcctaatcgaaaactttcggaggaggcggaccaggtaagcagcagcaggaaccctagcaccgccgcatccgcagccatgggtatcgacctcgttgccggtgggaggaacaagaagaccaagcgcacagcgccgaagtccgacgatgtttatctcaagctccttgtcaagctctaccgtttcttggtcaggaggaccaagagcaacttcaatgctgtcattctcaagaggctcttcatgagcaaaaccaatcgcccaccaatctccatgcgccgccttgtcaagttcatggaaggaaaggaccttaccctagctgccgagctcgtgagcgagctgtggaatgctgggataaaggcagagttcaagctcactaccagggtggcgaaccacatcaagtatgccttgcaatcaagcattccgtggatggtgctagtcggcgagtctgagctgcagaaaggaactgtaaagttgaaggacgttgaagccaaccaggaagaagaggttgataggaaggattttgttcgagagttgaagaagagattgagtaaatcctaagaggaaaattttaggcgttgatatcatcttttgacacccatttgacgcaaactcaattagggggagaatgacattacatcattataatttaaactgacgtgaatgtttcagtccggttggcatagggccacttgttatgttcataaggtcattcgaatcccctgagtcccaatgcattatgctgatgaatcaggctgcagacatattgtgaattatattctttttgtactaccttgaggaatgaaaagtttttgtcctc

SEQ ID NO: 17542 - protein, 191 aa, Zea mays subsp. mays
  peptide (1)..(191): Ceres Seq. ID no. 12455207
ARDHYLEHPNRKLSEEADQVSSSRNPSTAASAAMGIDLVAGGRNKKTKRTAPKSDDVYLKLLVKLYRFLVRRTKSNFNAVILKRLFMSKTNRPPISMRRLVKFMEGKDLTLAAELVSELWNAGIKAEFKLTTRVANHIKYALQSSIPWMVLVGESELQKGTVKLKDVEANQEEEVDRKDFVRELKKRLSKS

SEQ ID NO: 17543 - protein, 158 aa, Zea mays subsp. mays
  peptide (1)..(158): Ceres Seq. ID no. 12455208
MGIDLVAGGRNKKTKRTAPKSDDVYLKLLVKLYRFLVRRTKSNFNAVILKRLFMSKTNRPPISMRRLVKFMEGKDLTLAAELVSELWNAGIKAEFKLTTRVANHIKYALQSSIPWMVLVGESELQKGTVKLKDVEANQEEEVDRKDFVRELKKRLSKS

SEQ ID NO: 17544 - protein, 105 aa, Zea mays subsp. mays
  peptide (1)..(105): Ceres Seq. ID no. 12455209
MSKTNRPPISMRRLVKFMEGKDLTLAAELVSELWNAGIKAEFKLTTRVANHIKYALQSSIPWMVLVGESELQKGTVKLKDVEANQEEEVDRKDFVRELKKRLSKS

SEQ ID NO: 17545 - DNA, 2740 bp, Zea mays subsp. mays
  misc_feature (1)..(2740): Ceres Seq. ID no. 12417747
  misc_feature (1)..(2740): Ortholog of  Ceres SEQ ID NO 15176095 as cited in SEQ ID NO 59699
  misc_feature (1)..(2740): Ortholog of  Ceres SEQ ID NO 13596935 as cited in SEQ ID NO 63031
  misc_feature (1)..(2740): Ortholog of  Ceres SEQ ID NO 13656138 as cited in SEQ ID NO 65492
  misc_feature (1)..(2740): Ortholog of  Ceres SEQ ID NO 15169466 as cited in SEQ ID NO 66135
  misc_feature (1)..(2740): Ortholog of  Ceres SEQ ID NO 13657610 as cited in SEQ ID NO 66165
gcacgagaccattacctagaacatcctaatcgaaaaagccccatcatactcattcatattataaggcgcgaatctatccatctatctaatctacttacgcacgaacatgcgtaacatcggcatgctgcgggcgctggtcctggcgctcgcggtggccgccgccgccgccgccgagaagaggaggacgtacatcgtccacatggccaagtcggcgatgccggccgagtacgcggaccacgccgagtggtacggcgcatcgctgcgctccgtgtccgcctcagcctccgccgccaagatgctctacgcgtacgacaccgtcctgcacggtttctccgcgcgcctcacgccgcangaggccagcgacctggcgtccgccgagggggtgctcgccgtcaacccggaggcgcggtacgagctgcacaccacgcggacgcccgagttcctgggcatcgccggccagggcctgtccccgcagtccggcacggcgggcgacgtcgtcgtcggcgtgctcgacacgggcgtctggcccgagagcaagagctacgacgacnccggcctcgccgaggtgcccgcgtggtggaagggccagtgcnaggcgggacccggcttcgacgcctccaccgcctgcaaccgcaagctcgtcggcgccaggttcttcaacaagggctacgaggccgccatgggccccatggacaccgaccgggagtcccggtccccgctcgacgacgacggccacggcacgcacaccagctccacggccgccggcgccgccgtgccgggtgccagcctcttcggcttcgccgcgggcacggcgcgcggcatggcgccccgggcgcgcgtcgccgcctacaaggtgtgctggctcggcggctgcttcagctccgacatcctcgcgggcatggacgccgccgtcgccgacggctgcggcgtgctctcgctctcgctgggcggcggcgccgccgactactcgcgcgacagcgtcgccatcggcgccttcgccgccacggagcagaacgtcctcgtctcctgctcggccgggaacgccggccccgggagctccacgctgtccaacgtggcgccgtggatcaccaccgtgggcgccggcacgctcgaccgcgacttcccggcctacgtcgtgctcggcgacgggaagaactacacgggcgtctcgctctacgccgggaagccgctgcccagcgccccgatccccatcgtgtacgcggccaacgcctccaactccaccgcggggaacctgtgcatgcccggaaccctcgtgccggagaaggtggccggcaagatcgtcgtgtgcgaccgcggcgtcagcgcgcgcgtccagaagggcctcgtcgtgcgcgacgcgggcggcgccggcatggtgctgtccaacacggccgccaacggccaggagctcgtcgccgacgcgcacctcctgcccgccgccggcgtcggcgagagggaaggcncggcgatcaagtcgtacgtggcctccgccacgaaccccacgacgacggtcgtggtcgccgggacggaggtgggcgtgcgcccctcgccggtggtggcggcgttctcgtcgcgcgggcccaacatggtgacgccggagatcctgaagccggacatgatcgcgccgggggtgaacatcctggcgtcgtggacgggcaaggccgggccgacgggcctcgccgccgacacccgccgcgtgggcttcaacatcatctccggcacgtccatgtcgtgcccgcacgtgagcgggctggcggcgctgctccggagcgcgcacccggagtggagccccgccgccgtgcgctcggcgctcatgaccacagcctacgccagctactccggcgggtcgtcgctgctggacgcggcgacgggcgggatggccacgccgttnnantacggcgcggggcacgtggaccccgcgcgggcgctggacccggggctcgtctacgacctgggcacccgcgactacgtggacttcttgtgcgcgctcaagtacagctccaccatgatcgccgccgtggcgcggagccgggagtacgcgtgcgccgagaacaagacctactccgtgggcgccctcaactacccgtccttctcggtggcctactcgacggccaacggcgacggcggcggggactcggcnnccgtgacacacacgcggacgctgaccaacgtgggcggggcgggcacgtacaaggcgtccacgtcgctcgccgctgccaagggcgtggccgtggacgtggagccggcggagctggagttcacgtcggtgggggagaagaagagctacacggtgaggttcacgtccaagtcgcagccgtcgggcaccgccggtttcgggcggctcgtgtggtcggacgggaagcacagcgtggccagcccgatagcgttcacgtggacctgaacctgatggacggatggattataccatacgacagtggtttttggcgcctcagcctcaaagaaaggcccataatccatcatccatgtgacggcctcgttccctacactacgcagtcaaaagggccgaagtgtagggtgggaaggtttggagggggtacggtgcaaattggaggtttcttctgtgttgctattattactactaataaggtcattaatcctatcagcgtccgtaggttgtgatttttggatggaaatgggatcggggtggacggttggatggagattgatggtgcttggttgattggaatggaattattagagaggagaaggtttttagctt

SEQ ID NO: 17546 - protein, 764 aa, Zea mays subsp. mays
  peptide (1)..(764): Ceres Seq. ID no. 12417748
  misc_feature (82)..(82): Xaa is any aa, unknown or other
  misc_feature (149)..(149): Xaa is any aa, unknown or other
  misc_feature (163)..(163): Xaa is any aa, unknown or other
  misc_feature (453)..(453): Xaa is any aa, unknown or other
  misc_feature (595)..(595): Xaa is any aa, unknown or other
  misc_feature (596)..(596): Xaa is any aa, unknown or other
  misc_feature (678)..(678): Xaa is any aa, unknown or other
  misc_feature (679)..(679): Xaa is any aa, unknown or other
MRNIGMLRALVLALAVAAAAAAEKRRTYIVHMAKSAMPAEYADHAEWYGASLRSVSASASAAKMLYAYDTVLHGFSARLTPXEASDLASAEGVLAVNPEARYELHTTRTPEFLGIAGQGLSPQSGTAGDVVVGVLDTGVWPESKSYDDXGLAEVPAWWKGQCXAGPGFDASTACNRKLVGARFFNKGYEAAMGPMDTDRESRSPLDDDGHGTHTSSTAAGAAVPGASLFGFAAGTARGMAPRARVAAYKVCWLGGCFSSDILAGMDAAVADGCGVLSLSLGGGAADYSRDSVAIGAFAATEQNVLVSCSAGNAGPGSSTLSNVAPWITTVGAGTLDRDFPAYVVLGDGKNYTGVSLYAGKPLPSAPIPIVYAANASNSTAGNLCMPGTLVPEKVAGKIVVCDRGVSARVQKGLVVRDAGGAGMVLSNTAANGQELVADAHLLPAAGVGEREGXAIKSYVASATNPTTTVVVAGTEVGVRPSPVVAAFSSRGPNMVTPEILKPDMIAPGVNILASWTGKAGPTGLAADTRRVGFNIISGTSMSCPHVSGLAALLRSAHPEWSPAAVRSALMTTAYASYSGGSSLLDAATGGMATPXXYGAGHVDPARALDPGLVYDLGTRDYVDFLCALKYSSTMIAAVARSREYACAENKTYSVGALNYPSFSVAYSTANGDGGGDSXXVTHTRTLTNVGGAGTYKASTSLAAAKGVAVDVEPAELEFTSVGEKKSYTVRFTSKSQPSGTAGFGRLVWSDGKHSVASPIAFTWT

SEQ ID NO: 17547 - protein, 759 aa, Zea mays subsp. mays
  peptide (1)..(759): Ceres Seq. ID no. 12417749
  misc_feature (77)..(77): Xaa is any aa, unknown or other
  misc_feature (144)..(144): Xaa is any aa, unknown or other
  misc_feature (158)..(158): Xaa is any aa, unknown or other
  misc_feature (448)..(448): Xaa is any aa, unknown or other
  misc_feature (590)..(590): Xaa is any aa, unknown or other
  misc_feature (591)..(591): Xaa is any aa, unknown or other
  misc_feature (673)..(673): Xaa is any aa, unknown or other
  misc_feature (674)..(674): Xaa is any aa, unknown or other
MLRALVLALAVAAAAAAEKRRTYIVHMAKSAMPAEYADHAEWYGASLRSVSASASAAKMLYAYDTVLHGFSARLTPXEASDLASAEGVLAVNPEARYELHTTRTPEFLGIAGQGLSPQSGTAGDVVVGVLDTGVWPESKSYDDXGLAEVPAWWKGQCXAGPGFDASTACNRKLVGARFFNKGYEAAMGPMDTDRESRSPLDDDGHGTHTSSTAAGAAVPGASLFGFAAGTARGMAPRARVAAYKVCWLGGCFSSDILAGMDAAVADGCGVLSLSLGGGAADYSRDSVAIGAFAATEQNVLVSCSAGNAGPGSSTLSNVAPWITTVGAGTLDRDFPAYVVLGDGKNYTGVSLYAGKPLPSAPIPIVYAANASNSTAGNLCMPGTLVPEKVAGKIVVCDRGVSARVQKGLVVRDAGGAGMVLSNTAANGQELVADAHLLPAAGVGEREGXAIKSYVASATNPTTTVVVAGTEVGVRPSPVVAAFSSRGPNMVTPEILKPDMIAPGVNILASWTGKAGPTGLAADTRRVGFNIISGTSMSCPHVSGLAALLRSAHPEWSPAAVRSALMTTAYASYSGGSSLLDAATGGMATPXXYGAGHVDPARALDPGLVYDLGTRDYVDFLCALKYSSTMIAAVARSREYACAENKTYSVGALNYPSFSVAYSTANGDGGGDSXXVTHTRTLTNVGGAGTYKASTSLAAAKGVAVDVEPAELEFTSVGEKKSYTVRFTSKSQPSGTAGFGRLVWSDGKHSVASPIAFTWT

SEQ ID NO: 17548 - protein, 733 aa, Zea mays subsp. mays
  peptide (1)..(733): Ceres Seq. ID no. 12417750
  misc_feature (51)..(51): Xaa is any aa, unknown or other
  misc_feature (118)..(118): Xaa is any aa, unknown or other
  misc_feature (132)..(132): Xaa is any aa, unknown or other
  misc_feature (422)..(422): Xaa is any aa, unknown or other
  misc_feature (564)..(564): Xaa is any aa, unknown or other
  misc_feature (565)..(565): Xaa is any aa, unknown or other
  misc_feature (647)..(647): Xaa is any aa, unknown or other
  misc_feature (648)..(648): Xaa is any aa, unknown or other
MAKSAMPAEYADHAEWYGASLRSVSASASAAKMLYAYDTVLHGFSARLTPXEASDLASAEGVLAVNPEARYELHTTRTPEFLGIAGQGLSPQSGTAGDVVVGVLDTGVWPESKSYDDXGLAEVPAWWKGQCXAGPGFDASTACNRKLVGARFFNKGYEAAMGPMDTDRESRSPLDDDGHGTHTSSTAAGAAVPGASLFGFAAGTARGMAPRARVAAYKVCWLGGCFSSDILAGMDAAVADGCGVLSLSLGGGAADYSRDSVAIGAFAATEQNVLVSCSAGNAGPGSSTLSNVAPWITTVGAGTLDRDFPAYVVLGDGKNYTGVSLYAGKPLPSAPIPIVYAANASNSTAGNLCMPGTLVPEKVAGKIVVCDRGVSARVQKGLVVRDAGGAGMVLSNTAANGQELVADAHLLPAAGVGEREGXAIKSYVASATNPTTTVVVAGTEVGVRPSPVVAAFSSRGPNMVTPEILKPDMIAPGVNILASWTGKAGPTGLAADTRRVGFNIISGTSMSCPHVSGLAALLRSAHPEWSPAAVRSALMTTAYASYSGGSSLLDAATGGMATPXXYGAGHVDPARALDPGLVYDLGTRDYVDFLCALKYSSTMIAAVARSREYACAENKTYSVGALNYPSFSVAYSTANGDGGGDSXXVTHTRTLTNVGGAGTYKASTSLAAAKGVAVDVEPAELEFTSVGEKKSYTVRFTSKSQPSGTAGFGRLVWSDGKHSVASPIAFTWT

SEQ ID NO: 17549 - DNA, 1378 bp, Zea mays subsp. mays
  misc_feature (1)..(1378): Ceres Seq. ID no. 13493680
  misc_feature (1)..(1378): Ortholog of  Ceres SEQ ID NO 12562983 as cited in SEQ ID NO 53309
  misc_feature (1)..(1378): Ortholog of  Ceres SEQ ID NO 14309224 as cited in SEQ ID NO 0
gcacgagaccattacctagaaacatcctaatcgaaaaatgacaacttttcctttattcttggtgctcagattgcatcctttaatcatcaccattcaccatagacaagttaacaagtcaagctgatcgagacgctcgcaccagaggcttcttccaaagcaggggagaagaggagagaagagcgagcgagctatggggttcggcatggctgtccctcctcgacggtttcttccggcgcgcgctcacgtccgccggcctccgcgcaggctccgccgccgtggacgccgacaccaccatccacttctgggcgcacccctccctcctccaggcccaggcccagccctcctccgcggctccgcggccggtggtggtgctgatccacgggttcgggccggacccgacgtggcagtgggcggcgcaggcgggcccgctgtcgcgccacttcgacctgctggtgccggcagctgctcttcttcggcgcgtccgccacgcgcgcccccgngcggtccgacgcgttccaggccgccgcgctcgccgcgctgctcgcgggcggcggccacgtcccgggcctcggcggccggaccgtgcacctcgtgggcgccaactacggcggcctggtggcgtaccacctcgcccgggagctggagcagcgaggcgtccgcgtcgggaaggtggcgctgtgcgacgcggacgcgtgctggggcggcgaggacggccgcgcgctggcggcccggagcggcgcggcggacgtggtggacctgctggcgcctggcgacaccgccgcggtgcggcggaggtggatgatgagcgcctaccgccccttcaaacacatccccaagtgcttcctccgcgacctctttcagaaacacttcgcggacaacagggaggagaaggtggcgctagtcaaagggatcactgccaaagaaggcttcgagctgactcctctacctcaggaggtgctcatcatctggggtgagttcgaccagatctacccggtcgagaaagcacacaagatgggagagaagctcggggagaaggcgacggtgaaggtgatcccgggcacgggacacctgccgcagcaacaggacatcaagctcttcaaccgcgtcctcctcgacttcctgctgcagcctgctgctgcttccacctccaatggcagcgctgccgccaagtagctcgggttcttttcttggttctccacttgtattgtctcccgcgtggcacgagcttgctgttgtgttattgtgtatataaaattctctgcagctgggttttattccgcctcttcgttttctatccagctggtttggaaatagaggcaatgcacattgttgtgtttagcaagatgtgaaataaatgacgaggcattgttttttcttc

SEQ ID NO: 17550 - protein, 203 aa, Zea mays subsp. mays
  peptide (1)..(203): Ceres Seq. ID no. 13493681
  misc_feature (104)..(104): Xaa is any aa, unknown or other
MGFGMAVPPRRFLPARAHVRRPPRRLRRRGRRHHHPLLGAPLPPPGPGPALLRGSAAGGGADPRVRAGPDVAVGGAGGPAVAPLRPAGAGSCSSSARPPRAPPXGPTRSRPPRSPRCSRAAATSRASAAGPCTSWAPTTAAWWRTTSPGSWSSEASASGRWRCATRTRAGAARTAARWRPGAARRTWWTCWRLATPPRCGGGG

SEQ ID NO: 17551 - protein, 199 aa, Zea mays subsp. mays
  peptide (1)..(199): Ceres Seq. ID no. 13493682
  misc_feature (100)..(100): Xaa is any aa, unknown or other
MAVPPRRFLPARAHVRRPPRRLRRRGRRHHHPLLGAPLPPPGPGPALLRGSAAGGGADPRVRAGPDVAVGGAGGPAVAPLRPAGAGSCSSSARPPRAPPXGPTRSRPPRSPRCSRAAATSRASAAGPCTSWAPTTAAWWRTTSPGSWSSEASASGRWRCATRTRAGAARTAARWRPGAARRTWWTCWRLATPPRCGGGG

SEQ ID NO: 17552 - protein, 124 aa, Zea mays subsp. mays
  peptide (1)..(124): Ceres Seq. ID no. 13493683
MMSAYRPFKHIPKCFLRDLFQKHFADNREEKVALVKGITAKEGFELTPLPQEVLIIWGEFDQIYPVEKAHKMGEKLGEKATVKVIPGTGHLPQQQDIKLFNRVLLDFLLQPAAASTSNGSAAAK

SEQ ID NO: 17553 - DNA, 1913 bp, Zea mays subsp. mays
  misc_feature (1)..(1913): Ceres Seq. ID no. 12417052
  misc_feature (1)..(1913): Ortholog of  Ceres SEQ ID NO 12613725 as cited in SEQ ID NO 68196
gtgagtccgtcttcaactccatcgtcgtcgtcgtcgcgcgcgccgagtgtttggttgctcgggagaggagactatggagacgaccaagagcttggaggttgctgggggcgccatggacgacaacgacgacgaccacgaggcgtgggtgcacgactcctccgtcgatcaccgcgggaggtctccctcccgcgccaccaccgggtcctggaaggccgccatgttcatcatcttgatcgagttcagcgagaggctgagctacttcggcatagccacgagcctcatgatctacctcaccaaggtgctgcaagaggagatgaaggcggccgccaagaatgccaactactggatgagcgtcaccacgctcatgcccctgctcggtggcttcctcgccgacggctacctcggcaggttctccaccgtcgtcgtctccaccgccgtctacctgctgggcctgacggtgctggcgacggcgcagctggcgccggggctgaggcccgaccgctcgccgcgcctgcacgaggcgctcttcttcgccggcatctacctggtgtccgccggcaccggcggccacaagccggccctggagagcttcggcgcggaccagttcgacgaggcccacgcggcggagcgggtgcgcaagatgtccttcttcaactggtggaactgcgcgctctgctcgggcgtcctgctcggcgtcaccgccgtcgtctacgcgcaggaccgcgccggctggggcgccgccaccgtcgcgctcgccgccgtcatggccgcctcgctcgccgtcttcctcgccggccgccggtactaccgctacagggtgcccgagggcagcccgctcacgccgctgctccaggtcctcgtcgccgccttccggaataggcggctcccgttgccggacgacgacgccgagctgtacgaggtcaggcggccgcanagtancaagaggaggctgctttgccacacctaccagctgaggttcctcgacaaggcagccatagtggagcccggcgccggcgaggacgcctgcgggccgtggcggctggcgacggtgacgcaggtggaggagacgaagctggtgctggcgatggtgcccatctgggtgtgcacgctgcccttcggcatggcggtggcgcaggtgtccaccttcttcatcaagcagggcagcgtgatggaccgtcgcctgggcccgcacttggaggccccggcggcgtcggtgttcgcgctgtcggcggtggccatgatcgccacggtggcggcctacgacaaggcgctggtgccgtacctgcggcgcgccacgggaggggagcgcgggatcagcatccttgggcgcgtgggcatcggcatggcgttcgccatcgcggggctgggcgtggcggcggcggttggagcggcggctcctgntgtcggcggnngccgcgcggccgtcgacgtcggtgctgtggctggtgccgcagttcgcgctgatgggcgtggccgacgggttcgcgctggtgggcctgcaggagtacttctacgagcaggtccccgacggcatgcgcagcctgggcatcggcctctacctcagcgtcattggcgccgggagcttcctgagcagcctggtgatcacggcggcggaccgcgccagctcccgcggagggcgcgccggctggttcgccaaggacctcaaccgcagcaggctggacctcttctactggctgctggcgtgcatcagcgccgtcaacctggcattctacgcgctggtcgccaccaagtgctcgtacaagcagaccgtcagggccggcagggtcggcgacnaggtcgagtgcgccgccgcgtagctgctgctgtacgtggnggtcatgaaaccaaccatgcatcagccgcacgaccatgtgtattattattattattataggggctaatagtaactagct

SEQ ID NO: 17554 - protein, 606 aa, Zea mays subsp. mays
  peptide (1)..(606): Ceres Seq. ID no. 12417053
  misc_feature (287)..(287): Xaa is any aa, unknown or other
  misc_feature (289)..(289): Xaa is any aa, unknown or other
  misc_feature (443)..(443): Xaa is any aa, unknown or other
  misc_feature (446)..(446): Xaa is any aa, unknown or other
  misc_feature (447)..(447): Xaa is any aa, unknown or other
  misc_feature (574)..(574): Xaa is any aa, unknown or other
  misc_feature (587)..(587): Xaa is any aa, unknown or other
METTKSLEVAGGAMDDNDDDHEAWVHDSSVDHRGRSPSRATTGSWKAAMFIILIEFSERLSYFGIATSLMIYLTKVLQEEMKAAAKNANYWMSVTTLMPLLGGFLADGYLGRFSTVVVSTAVYLLGLTVLATAQLAPGLRPDRSPRLHEALFFAGIYLVSAGTGGHKPALESFGADQFDEAHAAERVRKMSFFNWWNCALCSGVLLGVTAVVYAQDRAGWGAATVALAAVMAASLAVFLAGRRYYRYRVPEGSPLTPLLQVLVAAFRNRRLPLPDDDAELYEVRRPXSXKRRLLCHTYQLRFLDKAAIVEPGAGEDACGPWRLATVTQVEETKLVLAMVPIWVCTLPFGMAVAQVSTFFIKQGSVMDRRLGPHLEAPAASVFALSAVAMIATVAAYDKALVPYLRRATGGERGISILGRVGIGMAFAIAGLGVAAAVGAAAPXVGXXRAAVDVGAVAGAAVRADGRGRRVRAGGPAGVLLRAGPRRHAQPGHRPLPQRHWRRELPEQPGDHGGGPRQLPRRARRLVRQGPQPQQAGPLLLAAGVHQRRQPGILRAGRHQVLVQADRQGRQGRRXGRVRRRVAAAVRXGHETNHASAARPCVLLLLL

SEQ ID NO: 17555 - protein, 593 aa, Zea mays subsp. mays
  peptide (1)..(593): Ceres Seq. ID no. 12417054
  misc_feature (274)..(274): Xaa is any aa, unknown or other
  misc_feature (276)..(276): Xaa is any aa, unknown or other
  misc_feature (430)..(430): Xaa is any aa, unknown or other
  misc_feature (433)..(433): Xaa is any aa, unknown or other
  misc_feature (434)..(434): Xaa is any aa, unknown or other
  misc_feature (561)..(561): Xaa is any aa, unknown or other
  misc_feature (574)..(574): Xaa is any aa, unknown or other
MDDNDDDHEAWVHDSSVDHRGRSPSRATTGSWKAAMFIILIEFSERLSYFGIATSLMIYLTKVLQEEMKAAAKNANYWMSVTTLMPLLGGFLADGYLGRFSTVVVSTAVYLLGLTVLATAQLAPGLRPDRSPRLHEALFFAGIYLVSAGTGGHKPALESFGADQFDEAHAAERVRKMSFFNWWNCALCSGVLLGVTAVVYAQDRAGWGAATVALAAVMAASLAVFLAGRRYYRYRVPEGSPLTPLLQVLVAAFRNRRLPLPDDDAELYEVRRPXSXKRRLLCHTYQLRFLDKAAIVEPGAGEDACGPWRLATVTQVEETKLVLAMVPIWVCTLPFGMAVAQVSTFFIKQGSVMDRRLGPHLEAPAASVFALSAVAMIATVAAYDKALVPYLRRATGGERGISILGRVGIGMAFAIAGLGVAAAVGAAAPXVGXXRAAVDVGAVAGAAVRADGRGRRVRAGGPAGVLLRAGPRRHAQPGHRPLPQRHWRRELPEQPGDHGGGPRQLPRRARRLVRQGPQPQQAGPLLLAAGVHQRRQPGILRAGRHQVLVQADRQGRQGRRXGRVRRRVAAAVRXGHETNHASAARPCVLLLLL

SEQ ID NO: 17556 - protein, 558 aa, Zea mays subsp. mays
  peptide (1)..(558): Ceres Seq. ID no. 12417055
  misc_feature (239)..(239): Xaa is any aa, unknown or other
  misc_feature (241)..(241): Xaa is any aa, unknown or other
  misc_feature (395)..(395): Xaa is any aa, unknown or other
  misc_feature (398)..(398): Xaa is any aa, unknown or other
  misc_feature (399)..(399): Xaa is any aa, unknown or other
  misc_feature (526)..(526): Xaa is any aa, unknown or other
  misc_feature (539)..(539): Xaa is any aa, unknown or other
MFIILIEFSERLSYFGIATSLMIYLTKVLQEEMKAAAKNANYWMSVTTLMPLLGGFLADGYLGRFSTVVVSTAVYLLGLTVLATAQLAPGLRPDRSPRLHEALFFAGIYLVSAGTGGHKPALESFGADQFDEAHAAERVRKMSFFNWWNCALCSGVLLGVTAVVYAQDRAGWGAATVALAAVMAASLAVFLAGRRYYRYRVPEGSPLTPLLQVLVAAFRNRRLPLPDDDAELYEVRRPXSXKRRLLCHTYQLRFLDKAAIVEPGAGEDACGPWRLATVTQVEETKLVLAMVPIWVCTLPFGMAVAQVSTFFIKQGSVMDRRLGPHLEAPAASVFALSAVAMIATVAAYDKALVPYLRRATGGERGISILGRVGIGMAFAIAGLGVAAAVGAAAPXVGXXRAAVDVGAVAGAAVRADGRGRRVRAGGPAGVLLRAGPRRHAQPGHRPLPQRHWRRELPEQPGDHGGGPRQLPRRARRLVRQGPQPQQAGPLLLAAGVHQRRQPGILRAGRHQVLVQADRQGRQGRRXGRVRRRVAAAVRXGHETNHASAARPCVLLLLL

SEQ ID NO: 17557 - DNA, 1271 bp, Zea mays subsp. mays
  misc_feature (1)..(1271): Ceres Seq. ID no. 12358974
  misc_feature (1)..(1271): Ortholog of  Ceres SEQ ID NO 13594651 as cited in SEQ ID NO 52212
aaagagaggtgccctagcttccctcccaatcccaccaggccgccgccaccacatcgcgccctcgcccgcttgccgccgaccctaaccggctgagcccctgaccagctcgtccaggcggacagcggcctgcggcaagccagcgcccagccaacagcgactgcctgactggtgagaggtgcgcatggtatggccggcctgatcagcttgcgcgccggtccgaggagttcaccgtcacttgcccggtcgtcgtccgcctgggcatcaccatcaccggcttcacaggtggcggttcgtttgccaagcccactgtttcgctgtgccaaacttcgtaggagccgtagtctactggcagcagcactggagatctctaaggacggttccgccgcggttctggccaacagcctgccttcccaaggggctatcgagacgctgcggaatgccgatgcagtatgtttcgacgttgacagcaccgtcatcctggacgagggcattgacgagcttgctgatttctgcggggcggggaaagctgttgctgaatggactgcaaaggccatgacagggactgttccgtttgaggaggcgctggcagccaggctgtctttaatcaagccatctctctcccaggtggaggagtgcctggagaagaggccaccaaggatttctcctggaatggctgatttggttaataagctaaaatccaataatattgacgtgttccttgtgtcaggaggcttccgacaaatgatcaagccagtagcatttgagcttggtattcctcctgaaaacatcactgcaaaccaattgttatttggcacattgggggagtacgccggatttgatcccacagagcccacttctngcagtgggggtaaagcaaaagcagtgcagcaaataaaacaggaccatggctacaagacagttgttatgattggtgatggtgcaactgatctggaggcccggcaacctggcggagcagacttgttcatatgttacgccggggttcanatgagagagccagtcgcagcacaagctgactgggtggtttttgattttcaagagctgatcactaagttgccatgaattcattacctaccgcaatttatgaacctttgcattgtcggctaaataattgcggccacattttaaagctgtagatttcactagcaattcttggagacaactgaattattacccggttgtaaagtattttttatttgttttcccgcattgtttgtatgatcctgaaccatgaatgcggaggttgtgttccg

SEQ ID NO: 17558 - protein, 297 aa, Zea mays subsp. mays
  peptide (1)..(297): Ceres Seq. ID no. 12358975
  misc_feature (225)..(225): Xaa is any aa, unknown or other
  misc_feature (273)..(273): Xaa is any aa, unknown or other
MAGLISLRAGPRSSPSLARSSSAWASPSPASQVAVRLPSPLFRCAKLRRSRSLLAAALEISKDGSAAVLANSLPSQGAIETLRNADAVCFDVDSTVILDEGIDELADFCGAGKAVAEWTAKAMTGTVPFEEALAARLSLIKPSLSQVEECLEKRPPRISPGMADLVNKLKSNNIDVFLVSGGFRQMIKPVAFELGIPPENITANQLLFGTLGEYAGFDPTEPTSXSGGKAKAVQQIKQDHGYKTVVMIGDGATDLEARQPGGADLFICYAGVXMREPVAAQADWVVFDFQELITKLP

SEQ ID NO: 17559 - protein, 175 aa, Zea mays subsp. mays
  peptide (1)..(175): Ceres Seq. ID no. 12358976
  misc_feature (103)..(103): Xaa is any aa, unknown or other
  misc_feature (151)..(151): Xaa is any aa, unknown or other
MTGTVPFEEALAARLSLIKPSLSQVEECLEKRPPRISPGMADLVNKLKSNNIDVFLVSGGFRQMIKPVAFELGIPPENITANQLLFGTLGEYAGFDPTEPTSXSGGKAKAVQQIKQDHGYKTVVMIGDGATDLEARQPGGADLFICYAGVXMREPVAAQADWVVFDFQELITKLP

SEQ ID NO: 17560 - DNA, 831 bp, Zea mays subsp. mays
  misc_feature (1)..(831): Ceres Seq. ID no. 12375378
  misc_feature (1)..(831): Ortholog of  Ceres SEQ ID NO 13595747 as cited in SEQ ID NO 58679
aggctcgtgcaccatttcccctggttcccctcaatccaaatagtgccgtcccccccatcggctacctttcctcatcccacgcggcgcccatgccagccacacctgttcgaccacctgacccgcgcgcgccctgatggctcccgcgctcacctccaacccgccctccttccgtcccctaacgtccccactccgccgtcgtgccgccaccgtcccatgccgcgtcggtaagcccggcaaggactcctccgctgcggatgacgctaccggccccaacaagaggcccaacctcttcgcggacttcgggaatgccaagtcgctcatacaggcgttcccgtcgcagtcgctgttcgcgggcggtggcaggggcaggaaggacccgcagacggtgttcgtcgcaggcgccacagggcaggccggggtccgcatcgcgcagaccctgctgcggcaggggtttgccgtgcgcgctggcgtcccggacctagcgtcggcgcaggagctagcgcggctggcggcggcataccggctcatctcccccgcggaagcgcggcggctaaacgcggtagaggcgggcttcggtgaccccgacgcgatagccaagtccatcggccccgccgcgaaggtggtggtcaccgtcggctcggccgagaaagggccagaaggcggaggcgtcaccaccgacgacgcgctccgagtggtgcgggccgcagatctcgccagcgtggcgcacgtcgttgtcgtgtatgacgagggggcggccagcggcggccttggcggcgggggctccacttacaatgtgcttagcaagttctatctatcagagtgttttagttc

SEQ ID NO: 17561 - protein, 232 aa, Zea mays subsp. mays
  peptide (1)..(232): Ceres Seq. ID no. 12375379
MAPALTSNPPSFRPLTSPLRRRAATVPCRVGKPGKDSSAADDATGPNKRPNLFADFGNAKSLIQAFPSQSLFAGGGRGRKDPQTVFVAGATGQAGVRIAQTLLRQGFAVRAGVPDLASAQELARLAAAYRLISPAEARRLNAVEAGFGDPDAIAKSIGPAAKVVVTVGSAEKGPEGGGVTTDDALRVVRAADLASVAHVVVVYDEGAASGGLGGGGSTYNVLSKFYLSECFS

SEQ ID NO: 17562 - DNA, 1155 bp, Zea mays subsp. mays
  misc_feature (1)..(1155): Ceres Seq. ID no. 12369561
  misc_feature (1)..(1155): Ortholog of  Ceres SEQ ID NO 15168413 as cited in SEQ ID NO 59281
atctctggtctggtcgctgcgcctcccgcttggccgcgagcccgcgaccatggcggcgccacccgtccccgtcctctgcagcgcttccccatgtcgcatcaccacccacctcgcccctcctgcctttcggaccgttgccgcggcgcggccgcaggccttgcccttcgtcttgtgcgtcgagcagcgcgtggggccctcggcgcgcgcgcgcgcgccgttcgcggccaagcgcggcggcggcggcgaggtatccgcggaagctccagacggcacgcgcgcgctgctccaggcggcgctctggggcgccgaggctgcctatatactctggctcttccttctgccttacgccccgggcgacccggtctgggcaatctcgcaggctaccatcagcgacctcatcggcctatcactcaacttcttcttcgtcctgccgctgctcaactcagttggcgttcacctgctcgaatcgcctctacttcaccctatggcagaaggattgttcaacttggtgctcgcttggacgctgctttttgcgccactcctcttcacggattgtaggagggaccgctacaagggatcgctcgacgtcctgtggggctttcagatgttcctcacaaacactttcttgataccttacatggcgatccgactgaacggtccggacgcggaccggtctccgccacgaagatcacagctgggttcagtcatggtcaacggcgcgccggctgtgggcgcggtcggcggcctcgtctgcgttctctcgatcgtttgggcgttctctggccgcggagattctggtttcggaggcattgcggaacggtggcagtatctgcagagctacctattctcggagcggcttgcttatgcgtttctctgggatatgtttctgtactccgtattccagccgtggctgatcggggacaatcttgggaacgtgaaggcggatgctgctgggcttgtgagtgtggtgcggttcgtccccgttgtgggtttagttgcctaccttctttgcttagaggaagaggattagctgttaactgtgttttttatatattttttttgtcgatcgtttggatcgttgatcagcgtgcagttgagtggattctgtgcttggtggcagtgagtttgcaactgaaaacacaaatcttgccgccg

SEQ ID NO: 17563 - protein, 342 aa, Zea mays subsp. mays
  peptide (1)..(342): Ceres Seq. ID no. 12369562
SLVWSLRLPLGREPATMAAPPVPVLCSASPCRITTHLAPPAFRTVAAARPQALPFVLCVEQRVGPSARARAPFAAKRGGGGEVSAEAPDGTRALLQAALWGAEAAYILWLFLLPYAPGDPVWAISQATISDLIGLSLNFFFVLPLLNSVGVHLLESPLLHPMAEGLFNLVLAWTLLFAPLLFTDCRRDRYKGSLDVLWGFQMFLTNTFLIPYMAIRLNGPDADRSPPRRSQLGSVMVNGAPAVGAVGGLVCVLSIVWAFSGRGDSGFGGIAERWQYLQSYLFSERLAYAFLWDMFLYSVFQPWLIGDNLGNVKADAAGLVSVVRFVPVVGLVAYLLCLEEED

SEQ ID NO: 17564 - protein, 326 aa, Zea mays subsp. mays
  peptide (1)..(326): Ceres Seq. ID no. 12369563
MAAPPVPVLCSASPCRITTHLAPPAFRTVAAARPQALPFVLCVEQRVGPSARARAPFAAKRGGGGEVSAEAPDGTRALLQAALWGAEAAYILWLFLLPYAPGDPVWAISQATISDLIGLSLNFFFVLPLLNSVGVHLLESPLLHPMAEGLFNLVLAWTLLFAPLLFTDCRRDRYKGSLDVLWGFQMFLTNTFLIPYMAIRLNGPDADRSPPRRSQLGSVMVNGAPAVGAVGGLVCVLSIVWAFSGRGDSGFGGIAERWQYLQSYLFSERLAYAFLWDMFLYSVFQPWLIGDNLGNVKADAAGLVSVVRFVPVVGLVAYLLCLEEED

SEQ ID NO: 17565 - protein, 208 aa, Zea mays subsp. mays
  peptide (1)..(208): Ceres Seq. ID no. 12369564
LWSGRCASRLAASPRPWRRHPSPSSAALPHVASPPTSPLLPFGPLPRRGRRPCPSSCASSSAWGPRRARARRSRPSAAAAARYPRKLQTARARCSRRRSGAPRLPIYSGSSFCLTPRATRSGQSRRLPSATSSAYHSTSSSSCRCSTQLAFTCSNRLYFTLWQKDCSTWCSLGRCFLRHSSSRIVGGTATRDRSTSCGAFRCSSQTLS

SEQ ID NO: 17566 - DNA, 2712 bp, Zea mays subsp. mays
  misc_feature (1)..(2712): Ceres Seq. ID no. 12382014
  misc_feature (1)..(2712): Ortholog of  Ceres SEQ ID NO 13596319 as cited in SEQ ID NO 67933
gcacgagaccattacctagaacatcctaatcaaaaaaaaaaccataagaacgcacgcgagtggccagtgggaaccaggaaacaagaaagtgagagggggaagctgcggccgacggccgagctcttgccgtccctatccacccctctcgcctttcgctcttgcctttcgctccgtccagccgccgcgtaaaatccgcggaaccagatgcccttatccgccctctgatcgaatccggccagaaagcccggttctttgtcgtcgtcctcggcatcgccgacgaccttgatggcactggaggcgggtagtagcggcggcggcgggaggggatggggtggcgggttccgaagtctgatgcggcggaagcaggtggactccgatcgggtccgcgccgagggccagccgcagctcgccaaggagctcaacgtgccggagctggtcgcgatcggggttggttccacagttggaccaggagtatatgttcttgttggaacagttgctagggagcacgctggtccagcattgacaatttcatttctgatagctggaatagcagccgcgctttcagctttctgttatgctgagcttgctagtcgttgcccctcagctggaagtgcttaccattattcatatatctgtgttggagaaggtgttgcctggttgattggctgggctctagtgctggaatatactattggtgggtctgctgttgcccgtggtatatctccaaatttagccttgttttttggaggacaggatagtgtgccatggattttagcacgccatcagcttccatggtttgatatcattgttgatccctgtgcagccgctcttgtttttgttgtcactgttttactatgtgtgggaattaaagagagttcatttgcacaaggagtcgtaacagttctcaatgcctgtgtaatgatatttgttattgtagctgggagttatattggcttccaaataggatgggtgggctacaaggtttctgacgggtatttcccacatggagtaaatggaatgcttgctggatcagcaactgtcttctttgcatacataggctttgatacagtcgctagtacagctgaagaggtaaagaatccacagagagatttgccattgggaattggagttgcattggctatttgttgtgcgttgtatatggctgtttctgttgttattgttgggctggtgccatatttcgccatggatccagatactcctatttcatctgcctttgcaaggcatggaatgcaatgggctatgtacgttgtgacaagtggtgctgttcttgcactctgctcgaccttgatgggctcacttcttccacagcctagaatacttatggccatggcacgagatggtctgttgccatccttcttctctgatgttaacaagcaaactcaagtacctgttaagagcacaattgtgactggcatctgtgcagctgctctggcttttgcaatggatgtttcacagttagcaggaatggtcagtgtaggcacactccttgcattcaccgtagttgctgtctcgatcttgatactcagatatgtccctccatatgaggtccctttgccgccttctatgcaagaatcattccgtttgaaccaggaatgtgatgaggaaagggataggggtcttcttggagttgggaactgtaacttatctcagacaaaggatgtgattgtggtagtagaatcagtgaaggatcctctcattgataaaagactgcataaaggcaagatggatgagacgaagcgccgaaagatagcctctttaagcatagggtctgtgtgtgtaggggttctgatccttgcttcttcagcctctgccacatggttgccttttctcccgatatgtattggctgcaccattggagttgtgctccttctggctggcctcagcttgctctcctggatcgaccaagatgctggcaggcactcttttggtcattccggaggattcacatgcccttttgttccagtgctaccagttttgtgtatcctgataaatacgtatctgttaataaacctgagtggtgacacatggatgagagttggcatatggctgctgctgggtgttcttgtgtacgctttctacggacgaacccacagctccttaatagatgttgtctacgttccggcagcgcaagctgatgagatatacaggagttcatcaggatatgtatcatagaaaagaacagctgcagctgcagtcatgtgacacgatagagccacagaaagaccgagcggatgacagttacttaaaaggtggttgtccatcagctgtagaaaattggttatcagccggggaagacggaactgactgttatttctttcatgctcggctagcatgatctcgtggatgcaacttggcaagatatatatgctgctcacgagccaggtcaatttatacattgttggagtgtgtgtagatgtggtgtatataaaaccaactgggtggagtatgtgatgcgatacataataatttgtctaattcatgtaaaagccctttgtgcggaaatgtgagtgcatttaaaggacctattgaaaacagtacacggacggcaaaagaagccaccttttttatatatcatgtatatgtcgtccacaaacattctcttcatgtgtcatgtatatttgaccttggtcaggggttcatgaatgtactttgtttcttggtgtggcttttattagggataaaaagtccact

SEQ ID NO: 17567 - protein, 635 aa, Zea mays subsp. mays
  peptide (1)..(635): Ceres Seq. ID no. 12382015
MALEAGSSGGGGRGWGGGFRSLMRRKQVDSDRVRAEGQPQLAKELNVPELVAIGVGSTVGPGVYVLVGTVAREHAGPALTISFLIAGIAAALSAFCYAELASRCPSAGSAYHYSYICVGEGVAWLIGWALVLEYTIGGSAVARGISPNLALFFGGQDSVPWILARHQLPWFDIIVDPCAAALVFVVTVLLCVGIKESSFAQGVVTVLNACVMIFVIVAGSYIGFQIGWVGYKVSDGYFPHGVNGMLAGSATVFFAYIGFDTVASTAEEVKNPQRDLPLGIGVALAICCALYMAVSVVIVGLVPYFAMDPDTPISSAFARHGMQWAMYVVTSGAVLALCSTLMGSLLPQPRILMAMARDGLLPSFFSDVNKQTQVPVKSTIVTGICAAALAFAMDVSQLAGMVSVGTLLAFTVVAVSILILRYVPPYEVPLPPSMQESFRLNQECDEERDRGLLGVGNCNLSQTKDVIVVVESVKDPLIDKRLHKGKMDETKRRKIASLSIGSVCVGVLILASSASATWLPFLPICIGCTIGVVLLLAGLSLLSWIDQDAGRHSFGHSGGFTCPFVPVLPVLCILINTYLLINLSGDTWMRVGIWLLLGVLVYAFYGRTHSSLIDVVYVPAAQADEIYRSSSGYVS

SEQ ID NO: 17568 - protein, 613 aa, Zea mays subsp. mays
  peptide (1)..(613): Ceres Seq. ID no. 12382016
MRRKQVDSDRVRAEGQPQLAKELNVPELVAIGVGSTVGPGVYVLVGTVAREHAGPALTISFLIAGIAAALSAFCYAELASRCPSAGSAYHYSYICVGEGVAWLIGWALVLEYTIGGSAVARGISPNLALFFGGQDSVPWILARHQLPWFDIIVDPCAAALVFVVTVLLCVGIKESSFAQGVVTVLNACVMIFVIVAGSYIGFQIGWVGYKVSDGYFPHGVNGMLAGSATVFFAYIGFDTVASTAEEVKNPQRDLPLGIGVALAICCALYMAVSVVIVGLVPYFAMDPDTPISSAFARHGMQWAMYVVTSGAVLALCSTLMGSLLPQPRILMAMARDGLLPSFFSDVNKQTQVPVKSTIVTGICAAALAFAMDVSQLAGMVSVGTLLAFTVVAVSILILRYVPPYEVPLPPSMQESFRLNQECDEERDRGLLGVGNCNLSQTKDVIVVVESVKDPLIDKRLHKGKMDETKRRKIASLSIGSVCVGVLILASSASATWLPFLPICIGCTIGVVLLLAGLSLLSWIDQDAGRHSFGHSGGFTCPFVPVLPVLCILINTYLLINLSGDTWMRVGIWLLLGVLVYAFYGRTHSSLIDVVYVPAAQADEIYRSSSGYVS

SEQ ID NO: 17569 - protein, 424 aa, Zea mays subsp. mays
  peptide (1)..(424): Ceres Seq. ID no. 12382017
MIFVIVAGSYIGFQIGWVGYKVSDGYFPHGVNGMLAGSATVFFAYIGFDTVASTAEEVKNPQRDLPLGIGVALAICCALYMAVSVVIVGLVPYFAMDPDTPISSAFARHGMQWAMYVVTSGAVLALCSTLMGSLLPQPRILMAMARDGLLPSFFSDVNKQTQVPVKSTIVTGICAAALAFAMDVSQLAGMVSVGTLLAFTVVAVSILILRYVPPYEVPLPPSMQESFRLNQECDEERDRGLLGVGNCNLSQTKDVIVVVESVKDPLIDKRLHKGKMDETKRRKIASLSIGSVCVGVLILASSASATWLPFLPICIGCTIGVVLLLAGLSLLSWIDQDAGRHSFGHSGGFTCPFVPVLPVLCILINTYLLINLSGDTWMRVGIWLLLGVLVYAFYGRTHSSLIDVVYVPAAQADEIYRSSSGYVS

SEQ ID NO: 17570 - DNA, 1314 bp, Zea mays subsp. mays
  misc_feature (1)..(1314): Ceres Seq. ID no. 15179566
  misc_feature (1)..(1314): Ortholog of  Ceres SEQ ID NO 13597798 as cited in SEQ ID NO 64311
agaatacacaggctttcctatacttggagttgaatggcagaaaatggagaacccggatctccgcaaagcaatgggaatgaaaccagatcaaaagggtgttcgtgttagaagggtggagcccactgctccagaatctggatgcctacgaccatctgatattattcttagtttcgatggtgttgacattgctaatgatggaacagttcctttcaggcatggtgagcgcattggtttcagttatctggtttctcagaaatatactggagagaaagctcttgttaaagttctgcgtgattcaaaagttcatgaatttaaaataaggttagcaactcacaagcggcttgttgcggctcatgtgaagggcaggccaccgtcgtattacatagttgctggctttgtttttgcagctatctctgttccatatcttcgatctgagtatggaaaagattatgaatatgatgcacctgtcaagttgttggtgaaacatttacatgcgatggcggaatcacctgatgaacagcttgtggtggtatcacaggtgcttgtatcagatatcaatataggttatgaagaaatagtcaatactcaggtacttgctttcaatggccagcctgtaaaaaatttaaagaacttggcgaccatggtggaaaattgcaaggatgaatttttgaagtttgatctggagtatgaccagattgttgtcctcgagacgaaaactgcaaaggctgctacccaggacattctgacgacgcactgtataccttctgcaatgtcggatgaccttaaggcctagtggaaggaagggagcataacgcagccctgggccagggccatcaggtgggccaatagtttgggccgcattttcggctgaattgattagcgaagcgtacgatccgtgatgaagaggaaccccaatgtttatctgtttgagttaaatatcttttgaggggttgtggatgtgagagtgctggctggtgtctaaagctccgccattatagaaggtttgagggactgtcactgtcagataacaataaactggagttgttacaggcggagtcatcgtgaaaacgatagtgtctagtaagaagctgagtttgttttttctttacatgatttcattacaactacaccaaattattgacggggaaaggaatcataattggtccgtgatttcattacatccttggtgtctcaagcttgttccgcatagtacctgctatttgtcaacgatactttcacttctgcttgtaaagtatttgcatcttgtttctggacaagtggtacttaaaagatatttaagcgccgtgaaccaac

SEQ ID NO: 17571 - protein, 263 aa, Zea mays subsp. mays
  peptide (1)..(263): Ceres Seq. ID no. 15179567
EYTGFPILGVEWQKMENPDLRKAMGMKPDQKGVRVRRVEPTAPESGCLRPSDIILSFDGVDIANDGTVPFRHGERIGFSYLVSQKYTGEKALVKVLRDSKVHEFKIRLATHKRLVAAHVKGRPPSYYIVAGFVFAAISVPYLRSEYGKDYEYDAPVKLLVKHLHAMAESPDEQLVVVSQVLVSDINIGYEEIVNTQVLAFNGQPVKNLKNLATMVENCKDEFLKFDLEYDQIVVLETKTAKAATQDILTTHCIPSAMSDDLKA

SEQ ID NO: 17572 - protein, 249 aa, Zea mays subsp. mays
  peptide (1)..(249): Ceres Seq. ID no. 15179568
MENPDLRKAMGMKPDQKGVRVRRVEPTAPESGCLRPSDIILSFDGVDIANDGTVPFRHGERIGFSYLVSQKYTGEKALVKVLRDSKVHEFKIRLATHKRLVAAHVKGRPPSYYIVAGFVFAAISVPYLRSEYGKDYEYDAPVKLLVKHLHAMAESPDEQLVVVSQVLVSDINIGYEEIVNTQVLAFNGQPVKNLKNLATMVENCKDEFLKFDLEYDQIVVLETKTAKAATQDILTTHCIPSAMSDDLKA

SEQ ID NO: 17573 - protein, 240 aa, Zea mays subsp. mays
  peptide (1)..(240): Ceres Seq. ID no. 15179569
MGMKPDQKGVRVRRVEPTAPESGCLRPSDIILSFDGVDIANDGTVPFRHGERIGFSYLVSQKYTGEKALVKVLRDSKVHEFKIRLATHKRLVAAHVKGRPPSYYIVAGFVFAAISVPYLRSEYGKDYEYDAPVKLLVKHLHAMAESPDEQLVVVSQVLVSDINIGYEEIVNTQVLAFNGQPVKNLKNLATMVENCKDEFLKFDLEYDQIVVLETKTAKAATQDILTTHCIPSAMSDDLKA

SEQ ID NO: 17574 - DNA, 1498 bp, Zea mays subsp. mays; identical to SEQ ID NO: 8726
  misc_feature (1)..(1498): Ceres Seq. ID no. 13570285
  misc_feature (1)..(1498): Ortholog of  Ceres SEQ ID NO 14302243 as cited in SEQ ID NO 64663

SEQ ID NO: 17575 - protein, 180 aa, Zea mays subsp. mays; identical to SEQ ID NO: 8727
  peptide (1)..(180): Ceres Seq. ID no. 15222583
  misc_feature (24)..(24): Xaa is any aa, unknown or other
  misc_feature (26)..(26): Xaa is any aa, unknown or other
  misc_feature (172)..(172): Xaa is any aa, unknown or other

SEQ ID NO: 17576 - protein, 153 aa, Zea mays subsp. mays; identical to SEQ ID NO: 8728
  peptide (1)..(153): Ceres Seq. ID no. 15222584
  misc_feature (145)..(145): Xaa is any aa, unknown or other

SEQ ID NO: 17577 - protein, 135 aa, Zea mays subsp. mays; identical to SEQ ID NO: 8729
  peptide (1)..(135): Ceres Seq. ID no. 15222585

SEQ ID NO: 17578 - DNA, 1091 bp, Zea mays subsp. mays
  misc_feature (1)..(1091): Ceres Seq. ID no. 12350723
  misc_feature (1)..(1091): Ortholog of  Ceres SEQ ID NO 15171329 as cited in SEQ ID NO 51748
acaagtcacaacgccctagagtagaggctgagctgcatatatcaccgagcaccctctctctctctgttcccctccctcgctcgacatggaggtcgccgccgccacttgtacgctccttgctgccgtcgccctaccagtttcgtcctcagcagcagcagcacgctctgcgacgaaacagagctactcgaggaggaagacgacggccgtgcgagccgtcatggcgaggccgcatcaggtgccgccgcctgccactgccaccgccaccgccaccacgtaccgcgacaactggttcgacaagctggccatcgggtacctgtcccggaaccttcaagaagcttctgggatgaagaacggaaaggacggctacgagggcctgatagaggcggccctggccatctccgcgctgttcagggttgaccagcagtgggacactgtggccagcgctctccaacgggccttccccagctacatcctcaccatgatcaaggtgatgatgccaccctctcgattctcgcgggagtatttcgccgccttcaccacggtgttcttcccttggctcgtcggaccatgtgaggtcagggaatcccaagtggatggaagggaagagaggaacgtggtctacatacccaaatgcagatttctggaaagcaccaactgtgtcggaatgtgcacgaacctctgcaaaatcccatgccagaggttcatccaggattcacttggcacggctgtctacatgtctcccaattttgaggacatgagctgcgagatgatctttggacagcaaccacctgaagatgatccagcactgaagcagccctgcttccggacaaaatgcatcgcaaagcagaatcatcaagtgaattgctctatttgatttgagaggaagtggatatgtaaattactatactactatcagtggaaattcccaaaattacatgctttcatgtttattcccttagtaagcagcatcagtttcatagattctttttacttgaaaacatagcagaaggcaattctagtatacgtcaaattgttaggaaactggttgctgatcaagaggattgaagaggaaacacaagatatgcctttgt

SEQ ID NO: 17579 - protein, 262 aa, Zea mays subsp. mays
  peptide (1)..(262): Ceres Seq. ID no. 12350724
MEVAAATCTLLAAVALPVSSSAAAARSATKQSYSRRKTTAVRAVMARPHQVPPPATATATATTYRDNWFDKLAIGYLSRNLQEASGMKNGKDGYEGLIEAALAISALFRVDQQWDTVASALQRAFPSYILTMIKVMMPPSRFSREYFAAFTTVFFPWLVGPCEVRESQVDGREERNVVYIPKCRFLESTNCVGMCTNLCKIPCQRFIQDSLGTAVYMSPNFEDMSCEMIFGQQPPEDDPALKQPCFRTKCIAKQNHQVNCSI

SEQ ID NO: 17580 - protein, 218 aa, Zea mays subsp. mays
  peptide (1)..(218): Ceres Seq. ID no. 12350725
MARPHQVPPPATATATATTYRDNWFDKLAIGYLSRNLQEASGMKNGKDGYEGLIEAALAISALFRVDQQWDTVASALQRAFPSYILTMIKVMMPPSRFSREYFAAFTTVFFPWLVGPCEVRESQVDGREERNVVYIPKCRFLESTNCVGMCTNLCKIPCQRFIQDSLGTAVYMSPNFEDMSCEMIFGQQPPEDDPALKQPCFRTKCIAKQNHQVNCSI

SEQ ID NO: 17581 - protein, 176 aa, Zea mays subsp. mays
  peptide (1)..(176): Ceres Seq. ID no. 12350726
MKNGKDGYEGLIEAALAISALFRVDQQWDTVASALQRAFPSYILTMIKVMMPPSRFSREYFAAFTTVFFPWLVGPCEVRESQVDGREERNVVYIPKCRFLESTNCVGMCTNLCKIPCQRFIQDSLGTAVYMSPNFEDMSCEMIFGQQPPEDDPALKQPCFRTKCIAKQNHQVNCSI

SEQ ID NO: 17582 - DNA, 1724 bp, Zea mays subsp. mays
  misc_feature (1)..(1724): Ceres Seq. ID no. 12359928
  misc_feature (1)..(1724): Ortholog of  Ceres SEQ ID NO 13663328 as cited in SEQ ID NO 66678
  misc_feature (1)..(1724): Ortholog of  Ceres SEQ ID NO 13624495 as cited in SEQ ID NO 0
acgcgtttgcttcttcaagcattgaccccttccgccccgtccgtcatcttccccacctctctccgcactgcaggagcttgcgggcgtggcggcggccgtgaccggcgctggagatcttggacgcgcgcgacatcctggtctccgctctgtgcctctggtctccgaaggcgccgccaccctatttttttttaaaaaaaatcctaagatagtttcttcagtccgacaccgcttctagcttcccctcggcgatctgtgaagctatgaagccacctctcgagaggaacccgactaagaagcgccactcgtggtggtgggacagtcacattagccctaagaactcgaaatggctcgccgaaaatctcgaagaaatggacaagcaagtgaaggaaatgctccagctgatcgaggaggacggcgactccttcgctaagaaagcgcaaatgtattaccagaggcgtccgatgctcgtcacccacgtcgagaacttctaccgtatgtatcgtgctctagccgagcgctatgacaatgtaaccggcgagctgcgcaagaacatccctacaaggctgcagacaaccggatttttaaccagttcagagtacggttctgagctgcagaggtcgccctcaccgtctcctgagccgttacagaggtcgtggacaagggagcagagccctagggccgctggcttcgacttcttcctgagcaataggagcaatgactcgccacctgtctacaggaaggaacccgaggacgcggcatcgcagtcggagtctgacgcgaagtctgcagacggtgaggatgatggcatcgcctacacgctgcaccagagagttcttgagctagaggacgagctcaatgcgacaaaccagaaactacaagatgcaaacgagaagcttgaggttctggaggagaagagcttgaggtgccattgtgattataaagagaatggaaacggtgctcagcgaactacagaagtttcaggcaaagagggggagctggaagccgaaatcgtcaatctccaggaggaagcggactcggcaagaaggcgattcgaagaggcattgtctgaacgagatggagaaatcagcaagctaaagcaagagcttgctggtgcttctgagaagctgcagcgagagaagtacgccaatggcgtgcaggtatctgagctgcagcgatcggttgaacacatcaggtccgaactagagagagtttctgaagagaaactactgtccgagaacaagatcaaggagctggaggcagcaaacgctgaagccggtaagtacggccacgagctcacgcgagctgccgagaagatttccgaggagaagttcgcgctcgaagctgagatcctcacgatgcggcagaacattgaagatctgaaatccaggatcgagagcctcgctcgagagaagtccctgctcaaatcatggtttgaggacttggagcaagttgtggggcgaggaaggggcatcttcgccgattaaccgagtttctatccagaacatcatcggtagctagaatttagcaagttagcaacattttgttttgttttctggtactggtacccataccatcttgcgaaattgagatacgtcagtgtacttcctttttgttggctgaatcttaaacttagacgtgatggatggtggtgatgtactggcaatatatgaaatattatactgaaccgcgctcgacgtcaataataagattcctatggtgcatcc

SEQ ID NO: 17583 - protein, 407 aa, Zea mays subsp. mays
  peptide (1)..(407): Ceres Seq. ID no. 12359929
MKPPLERNPTKKRHSWWWDSHISPKNSKWLAENLEEMDKQVKEMLQLIEEDGDSFAKKAQMYYQRRPMLVTHVENFYRMYRALAERYDNVTGELRKNIPTRLQTTGFLTSSEYGSELQRSPSPSPEPLQRSWTREQSPRAAGFDFFLSNRSNDSPPVYRKEPEDAASQSESDAKSADGEDDGIAYTLHQRVLELEDELNATNQKLQDANEKLEVLEEKSLRCHCDYKENGNGAQRTTEVSGKEGELEAEIVNLQEEADSARRRFEEALSERDGEISKLKQELAGASEKLQREKYANGVQVSELQRSVEHIRSELERVSEEKLLSENKIKELEAANAEAGKYGHELTRAAEKISEEKFALEAEILTMRQNIEDLKSRIESLAREKSLLKSWFEDLEQVVGRGRGIFAD

SEQ ID NO: 17584 - protein, 371 aa, Zea mays subsp. mays
  peptide (1)..(371): Ceres Seq. ID no. 12359930
MDKQVKEMLQLIEEDGDSFAKKAQMYYQRRPMLVTHVENFYRMYRALAERYDNVTGELRKNIPTRLQTTGFLTSSEYGSELQRSPSPSPEPLQRSWTREQSPRAAGFDFFLSNRSNDSPPVYRKEPEDAASQSESDAKSADGEDDGIAYTLHQRVLELEDELNATNQKLQDANEKLEVLEEKSLRCHCDYKENGNGAQRTTEVSGKEGELEAEIVNLQEEADSARRRFEEALSERDGEISKLKQELAGASEKLQREKYANGVQVSELQRSVEHIRSELERVSEEKLLSENKIKELEAANAEAGKYGHELTRAAEKISEEKFALEAEILTMRQNIEDLKSRIESLAREKSLLKSWFEDLEQVVGRGRGIFAD

SEQ ID NO: 17585 - protein, 364 aa, Zea mays subsp. mays
  peptide (1)..(364): Ceres Seq. ID no. 12359931
MLQLIEEDGDSFAKKAQMYYQRRPMLVTHVENFYRMYRALAERYDNVTGELRKNIPTRLQTTGFLTSSEYGSELQRSPSPSPEPLQRSWTREQSPRAAGFDFFLSNRSNDSPPVYRKEPEDAASQSESDAKSADGEDDGIAYTLHQRVLELEDELNATNQKLQDANEKLEVLEEKSLRCHCDYKENGNGAQRTTEVSGKEGELEAEIVNLQEEADSARRRFEEALSERDGEISKLKQELAGASEKLQREKYANGVQVSELQRSVEHIRSELERVSEEKLLSENKIKELEAANAEAGKYGHELTRAAEKISEEKFALEAEILTMRQNIEDLKSRIESLAREKSLLKSWFEDLEQVVGRGRGIFAD

SEQ ID NO: 17586 - DNA, 2165 bp, Zea mays subsp. mays
  misc_feature (1)..(2165): Ceres Seq. ID no. 12435375
  misc_feature (1)..(2165): Ortholog of  Ceres SEQ ID NO 14313670 as cited in SEQ ID NO 54491
gcacgagaccattacctagaacatcctaatcgaaaaatcccagcacgtctcgtctcccggccctcccacaaaaaaaaactgctcggttgctgctcctgctccgccgcgccggcatcatgtgtggcatcttagccgtgctcggttgctccgactggtctcaggcaaagagggctcgcatcctcgcctgctccagaaggttgaagcacaggggccccgactggtcgggcctttaccagcacgagggcaacttcctggcgcagcagcggctcgccgtcgtctccccgctgtccggcgaccagccgctgttcaacgaggaccgcaccgtcgtggtggtggccaatggagagatctacaaccacaagaacgtccggaagcagttcaccggcacacacaacttcagcacgggcagtgactgcgaggtcatcatgcccctgtacgagaagtacggcgagaacttcgtggacatgctggacggggtgttcgcgttcgtgctctacgacacccgcgacaggacctacgtggcggcgcgcgacgccatcggcgtcaacccgctctacatcggctggggcagtgacggttccgtctggatcgcgtccgagatgaaggcgctgaacgaggactgcgtgcgcttcgagatcttccccgccgggccacctctactccagcgccggcggcgggttccggcggtggtacaccccgcactggttccaggagcaggtgccccggacgccgtaccagccgctcgtcctcagagaggccttcgagaaggcggtcatcaagaggctcatgactgacgtcccgttcggggtcctcctctccggcagcctcgactcctcgctagtcgcctccgtcaccaagcgccacctcgtcgagaccgaggccgccgagaagttcggcaccgagctccactcctttgtcgtcggcctcgagggctcccctgacctgaaggccgcacgagaggtcgctgactacctcggaaccatccatcacgagttccacttcaccgtacaggacggcatcgacgcgatcgaggaggtgatctaccacgacgagacgtacgacgtgacgacgatccgggccagcacgcccatgttcctgatggctcgcaagatcaagtcgctgggcgtgaagatggtgctgtccggggagggctccgacgagctcctgggcggctacctctacttccacttcgcccccaacaaggaggagttccacagggagacctgccgcaaggtgaaagccctgcaccagtacgactgcctgcgcgccaacaaggccacgtcggcgtggggcctggaggtccgcgtgccgttcctcgacaaggagttcatcaacgtcgccatgggcatggaccccgaatggaaaatgtacgacaagaacctgggccgcatcgagaagtgggtcatgaggaaggcgttcgacgacgacgagcacccttacctgcccaagcatattctctaccggcagaaagaacagttcagtgacggcgttggctacaactggatcgatggccttaaatccttcactgaacagcaggtgacggatgagatgatgaacaacgccgcccagatgttcccctacaacacgcccgtcaacaaggaggcctactactaccggatgatattcgagaggctcttccctcaggactcggcgagggagacggtgccgtggggcccgagcatcgcctgcagcacgcccgcggccatcgagtgggtggagcagtggaaggcctccaacgacccctccggccgcttcatctcctcccacgactccgccgccaccgaccacaccggcggtaagccggcggtggccaacggcggcggccacggcgcggcgaacggcacggtcaacggcaaggacgtcgcagtcgcgatcgcggtctgacgagagtacgtgctcgcgcacctccctgcttctaccgggctgcatcctgcagcatgcactgtgcgagcacagccgatcagcgccaataaactggaggataagaacgactggtagctgtgtgtgtgtgtgtcgtgcgtgcccaccggccatatcccggtgccgcagcacgtgctattgttacgtgttgtactgccaccagcgtacgtgtctgtgtgtctcgatcatatctgtacgtttttagatttagaaggggaaaaaaagtatgtccgtgtctgtatgtc

SEQ ID NO: 17587 - protein, 365 aa, Zea mays subsp. mays
  peptide (1)..(365): Ceres Seq. ID no. 12435376
MTDVPFGVLLSGSLDSSLVASVTKRHLVETEAAEKFGTELHSFVVGLEGSPDLKAAREVADYLGTIHHEFHFTVQDGIDAIEEVIYHDETYDVTTIRASTPMFLMARKIKSLGVKMVLSGEGSDELLGGYLYFHFAPNKEEFHRETCRKVKALHQYDCLRANKATSAWGLEVRVPFLDKEFINVAMGMDPEWKMYDKNLGRIEKWVMRKAFDDDEHPYLPKHILYRQKEQFSDGVGYNWIDGLKSFTEQQVTDEMMNNAAQMFPYNTPVNKEAYYYRMIFERLFPQDSARETVPWGPSIACSTPAAIEWVEQWKASNDPSGRFISSHDSAATDHTGGKPAVANGGGHGAANGTVNGKDVAVAIAV

SEQ ID NO: 17588 - protein, 264 aa, Zea mays subsp. mays
  peptide (1)..(264): Ceres Seq. ID no. 12435377
MFLMARKIKSLGVKMVLSGEGSDELLGGYLYFHFAPNKEEFHRETCRKVKALHQYDCLRANKATSAWGLEVRVPFLDKEFINVAMGMDPEWKMYDKNLGRIEKWVMRKAFDDDEHPYLPKHILYRQKEQFSDGVGYNWIDGLKSFTEQQVTDEMMNNAAQMFPYNTPVNKEAYYYRMIFERLFPQDSARETVPWGPSIACSTPAAIEWVEQWKASNDPSGRFISSHDSAATDHTGGKPAVANGGGHGAANGTVNGKDVAVAIAV

SEQ ID NO: 17589 - protein, 261 aa, Zea mays subsp. mays
  peptide (1)..(261): Ceres Seq. ID no. 12435378
MARKIKSLGVKMVLSGEGSDELLGGYLYFHFAPNKEEFHRETCRKVKALHQYDCLRANKATSAWGLEVRVPFLDKEFINVAMGMDPEWKMYDKNLGRIEKWVMRKAFDDDEHPYLPKHILYRQKEQFSDGVGYNWIDGLKSFTEQQVTDEMMNNAAQMFPYNTPVNKEAYYYRMIFERLFPQDSARETVPWGPSIACSTPAAIEWVEQWKASNDPSGRFISSHDSAATDHTGGKPAVANGGGHGAANGTVNGKDVAVAIAV

SEQ ID NO: 17590 - DNA, 898 bp, Zea mays subsp. mays
  misc_feature (1)..(898): Ceres Seq. ID no. 12377943
  misc_feature (1)..(898): Ortholog of  Ceres SEQ ID NO 14313536 as cited in SEQ ID NO 67925
gcacgagaccattacctagaacatcctaatcgaaaactacaaggaaaatgaggattggggctgcagctagcaagaagaatacagatgctcagcagacatatgcaactaatggtgcataccagagttctcaaggcaattgttcagagaatgatcccaacaatacaacagtctttgtgggtgggttagattccaatgtagacgaggagtatctaagggaaatttttactccgtacggagaaatttcctatgtgaagattcctgtaggcaagcattgtggatttgttcaatttaccagcaggtcatgtgctgaggaagccatccaaatgctgaatgggagtcagattggtggacagaaagctcggctttcatggggccgtagtactcaaaacagacaggcttctcagcatgatgccaacagccagtataatgggaacaactattatcgataccaacagccgggtaatgaaggttatagctatggtgcacccaatgcacaagacccaagcattcaaaactactatggataccctggttatggtaactatgagcagcagtcaacacaggaacagcagcagcagcagcctccaccagcacaggagcagcctccaccggcaccacagtaacaatcatcgtggtgacgattgcttgggcacttctggaatgctatcagattagagggactacagtcagagcagtgccgtgccgaatgagacgtcctgaagatatggagggcatatagtctcatgggtgttcttgggccggtgttaatctacgatgacactcctgatgtctcttttgtttgtcattgagatcttgacggctgaagtatgcaccgttgaaattgatgtattcgtcgtcgtcggattgtttatttgctcggaaccattttttgcacttt

SEQ ID NO: 17591 - protein, 191 aa, Zea mays subsp. mays
  peptide (1)..(191): Ceres Seq. ID no. 12377944
MRIGAAASKKNTDAQQTYATNGAYQSSQGNCSENDPNNTTVFVGGLDSNVDEEYLREIFTPYGEISYVKIPVGKHCGFVQFTSRSCAEEAIQMLNGSQIGGQKARLSWGRSTQNRQASQHDANSQYNGNNYYRYQQPGNEGYSYGAPNAQDPSIQNYYGYPGYGNYEQQSTQEQQQQQPPPAQEQPPPAPQ

SEQ ID NO: 17592 - protein, 114 aa, Zea mays subsp. mays
  peptide (1)..(114): Ceres Seq. ID no. 12377945
MGVRLVDRKLGFHGAVVLKTDRLLSMMPTASIMGTTIIDTNSRVMKVIAMVHPMHKTQAFKTTMDTLVMVTMSSSQHRNSSSSSLHQHRSSLHRHHSNNHRGDDCLGTSGMLSD

SEQ ID NO: 17593 - protein, 99 aa, Zea mays subsp. mays
  peptide (1)..(99): Ceres Seq. ID no. 12377946
MLNGSQIGGQKARLSWGRSTQNRQASQHDANSQYNGNNYYRYQQPGNEGYSYGAPNAQDPSIQNYYGYPGYGNYEQQSTQEQQQQQPPPAQEQPPPAPQ

SEQ ID NO: 17594 - DNA, 1484 bp, Zea mays subsp. mays
  misc_feature (1)..(1484): Ceres Seq. ID no. 12578861
  misc_feature (1)..(1484): Ortholog of  Ceres SEQ ID NO 15176321 as cited in SEQ ID NO 52814
  misc_feature (1)..(1484): Ortholog of  Ceres SEQ ID NO 12563124 as cited in SEQ ID NO 57104
  misc_feature (1)..(1484): Ortholog of  Ceres SEQ ID NO 12584664 as cited in SEQ ID NO 62232
  misc_feature (1)..(1484): Ortholog of  Ceres SEQ ID NO 12617639 as cited in SEQ ID NO 65219
  misc_feature (1)..(1484): Ortholog of  Ceres SEQ ID NO 15175556 as cited in SEQ ID NO 0
  misc_feature (1)..(1484): Ortholog of  Ceres SEQ ID NO 15179982 as cited in SEQ ID NO 0
gcacgagaccattacctagaacatcctaatcgaaaagacctcgcatccggcccgattcgactagggttttagcactcccagtcccggctcccgccgtcgcctcgacgcttcccccctcttcctccgccgccaacccagcgagagagctcccagtccgcgaagacatggcggggaagaagcgcaagtccggctccgagaagccgacgaagcaccgcctcccgctgggagccgatgccgacgctgtcgccgaagcctcgaagcgccgccgatcgggcgccaccaagcagcaccaggcggacgaggaagcgtccatcccgccctctctcagcgccaagatcctccgcgaggcgcgcaagcagcaggaagaggagatgcgcgccgactccagcgacgaacagcgaccctcagccgtcgaggcgaccgcggggccgtccacgtcgtcctcgtttcccgtccccgccgccgacggcgagaatgagggggacgacgtcgatgagttcgacgggtttgacgcgcctgagcgagtacgatggcggtgaggtggagatcaacgaggaggacgagaaggccctcgctgctttcatgtcaaaggacaaagctgccgagcgcacccttggcgatatcattctccagaagatcagggagaaggacgccgaggtcgcaactggtgaaggacgacctcgtgtaaaattggacaacagcattattgaactttataaagaggttgggaagttcttaagccggtacacgagtggggctggcttctcctccccctcttaccaagtcctcctcgggttagggttccttagggttttgtggaggggcgatggcggcggctgatgtggagtaccgttgcttcgtcggcgggcttgcctgggccaccagcaacgagtcgctggagaatgccttcgcctcctacggcgagatcctcgactccaaggtcatcaccgaccgggagacggggaggtctcgcggcttcggcttcgttaccttctcctccgagaactccatgctcgacgctatcgagaacatgaacggcaaggagctcgacggccgtaacatcaccgttaaccaggcccagtcccgtggcggtggcggtggcggcggtggccgcggcggtcgcggcggcggcggctatggtggcgggcgccgtgacggcggttatggcggcggtggcggctacggcggtcggcgcgagggtggtggcggcggctacggaggcggtggcggctacggcggtcggcgcgagggtggtggtggcggctacggcggcggcggcggcggctggagggactgatgtgtgggcccatcctggcttcggccgagttatcttatctatctatagtatcgtgttaccgttcgcttctgtcaccgtgttagtgtccgttctacctttggattaggtgttggtacccctgttgttccctttgtttgctcccgctatgaaacgagacgagagaagaatgagcaaggtttttgttcgc

SEQ ID NO: 17595 - protein, 202 aa, Zea mays subsp. mays
  peptide (1)..(202): Ceres Seq. ID no. 12578862
MPTLSPKPRSAADRAPPSSTRRTRKRPSRPLSAPRSSARRASSRKRRCAPTPATNSDPQPSRRPRGRPRRPRFPSPPPTARMRGTTSMSSTGLTRLSEYDGGEVEINEEDEKALAAFMSKDKAAERTLGDIILQKIREKDAEVATGEGRPRVKLDNSIIELYKEVGKFLSRYTSGAGFSSPSYQVLLGLGFLRVLWRGDGGG

SEQ ID NO: 17596 - protein, 156 aa, Zea mays subsp. mays
  peptide (1)..(156): Ceres Seq. ID no. 12578863
MAAADVEYRCFVGGLAWATSNESLENAFASYGEILDSKVITDRETGRSRGFGFVTFSSENSMLDAIENMNGKELDGRNITVNQAQSRGGGGGGGGRGGRGGGGYGGGRRDGGYGGGGGYGGRREGGGGGYGGGGGYGGRREGGGGGYGGGGGGWRD

SEQ ID NO: 17597 - protein, 124 aa, Zea mays subsp. mays
  peptide (1)..(124): Ceres Seq. ID no. 12578864
MAGKKRKSGSEKPTKHRLPLGADADAVAEASKRRRSGATKQHQADEEASIPPSLSAKILREARKQQEEEMRADSSDEQRPSAVEATAGPSTSSSFPVPAADGENEGDDVDEFDGFDAPERVRWR

SEQ ID NO: 17598 - DNA, 1833 bp, Zea mays subsp. mays
  misc_feature (1)..(1833): Ceres Seq. ID no. 12379198
  misc_feature (1)..(1833): Ortholog of  Ceres SEQ ID NO 14308221 as cited in SEQ ID NO 60363
acgacaaatcgacgatcgccgcttctcttggccattgtagagggagagagagagcgcgagcgacctaggtcagtcggtttcggttttgggcgtcagcttcagctatccgcgaccgcgacgatgggtctgcgcgtggccgccaccgcgccagctccggccggcgtgcgcgtgctcggcaggggcgccgcgcgcgtgacgccgcgaccgtgggcggctgtcggcggcaggagacgcttctccgtgcggatgtccgtcgcgaccaccgaggccaccaccaccatcgccgtgggcgcctcggaggaccaggcgctggaggctaggaactccaagacggtggtggcggtcatcctcggcggtggcgccgggaccaggctcttcccgcttaccagacgcagggccaagcccgcggtgccaattggcggcgcgtacaggctcatcgacgtgccgatgagcaactgcataaacagcgggatcaacaaggtctacatcctcacgcagttcaactcgcaatccctcaatcgccacctctccagagcctacgatttcagcaatggcgtggccatcggagacggattcgtcgaggttctagcagcaacccagaggcctggaacggaggggaaaaggtggtttcagggtactgctgatgcagttcggcagttcgactggcttttcgatgatgcaaaatctaaagacattgaagatgtgctgattctttctggtgaccatctctaccgtatggactacatggactttgttcagagtcatcggcaaagaggtgcaggcatcagcatctgttgtttgccaattgatggcagccgggcatctgattttggcctaatgaagatagacgacactggaagggtaatttcattcagtgagaaaccaaaaggagacgaattaaaggcaatgcaagttgacaccacagtgcttggcttatcaaaggaggaagcagaaaacaaaccttatatagcttcaatggggatctatatttttaagaaagacatactcctaaaccttctaagatggcgttttcccactgcaaatgattttggttctgaaataattcctgcttcagcaaaagaaatcgatgtaaaggcttatcttttcaatgattactgggaagatattggaactattaagtccttctttgaggcaaaccttgctcttgctgaacagcctccaaggttcagtttctacgatgctgacaaaccaatgtatacatcacggagaaacctaccaccatctatggtcaacaatagtaagatcactgattcaatcatttcccacggatgtttcttggataactgcaggatagaacatagtgttgttggagttcgttctcggataggctccaatgtgcacctcaaggatactgtaatgcttggcgctgattattatgaaactgccgtggaaagaggagagctgcttgcagaaggaaaagttcctattgggattggagagaatacaacgattcaaaagtgtatcatagacaagaatgcgaggatagggaagaaagtggtaatctccaactctgaaggtgtagatgaagctgatagaacttccgaaggcttctacattcgatctggcatcactgtcgtactgaagaacgcgataattgctgatggattggtcatatgagctgaaaaggtctcacaggacgggtatttgccgcacaaaatatcaataggagttctttgttagttttacaataagatgctgtatagcagtcaacaggttattcttgtctatacaagatacctttgtctacaaatcttgtctcaccatgttgtattcgactcaaacaatgttgcagtcatggacattgtccgttcc

SEQ ID NO: 17599 - protein, 545 aa, Zea mays subsp. mays
  peptide (1)..(545): Ceres Seq. ID no. 12379199
TTNRRSPLLLAIVEGERERERPRSVGFGFGRQLQLSATATMGLRVAATAPAPAGVRVLGRGAARVTPRPWAAVGGRRRFSVRMSVATTEATTTIAVGASEDQALEARNSKTVVAVILGGGAGTRLFPLTRRRAKPAVPIGGAYRLIDVPMSNCINSGINKVYILTQFNSQSLNRHLSRAYDFSNGVAIGDGFVEVLAATQRPGTEGKRWFQGTADAVRQFDWLFDDAKSKDIEDVLILSGDHLYRMDYMDFVQSHRQRGAGISICCLPIDGSRASDFGLMKIDDTGRVISFSEKPKGDELKAMQVDTTVLGLSKEEAENKPYIASMGIYIFKKDILLNLLRWRFPTANDFGSEIIPASAKEIDVKAYLFNDYWEDIGTIKSFFEANLALAEQPPRFSFYDADKPMYTSRRNLPPSMVNNSKITDSIISHGCFLDNCRIEHSVVGVRSRIGSNVHLKDTVMLGADYYETAVERGELLAEGKVPIGIGENTTIQKCIIDKNARIGKKVVISNSEGVDEADRTSEGFYIRSGITVVLKNAIIADGLVI

SEQ ID NO: 17600 - protein, 505 aa, Zea mays subsp. mays
  peptide (1)..(505): Ceres Seq. ID no. 12379200
MGLRVAATAPAPAGVRVLGRGAARVTPRPWAAVGGRRRFSVRMSVATTEATTTIAVGASEDQALEARNSKTVVAVILGGGAGTRLFPLTRRRAKPAVPIGGAYRLIDVPMSNCINSGINKVYILTQFNSQSLNRHLSRAYDFSNGVAIGDGFVEVLAATQRPGTEGKRWFQGTADAVRQFDWLFDDAKSKDIEDVLILSGDHLYRMDYMDFVQSHRQRGAGISICCLPIDGSRASDFGLMKIDDTGRVISFSEKPKGDELKAMQVDTTVLGLSKEEAENKPYIASMGIYIFKKDILLNLLRWRFPTANDFGSEIIPASAKEIDVKAYLFNDYWEDIGTIKSFFEANLALAEQPPRFSFYDADKPMYTSRRNLPPSMVNNSKITDSIISHGCFLDNCRIEHSVVGVRSRIGSNVHLKDTVMLGADYYETAVERGELLAEGKVPIGIGENTTIQKCIIDKNARIGKKVVISNSEGVDEADRTSEGFYIRSGITVVLKNAIIADGLVI

SEQ ID NO: 17601 - protein, 463 aa, Zea mays subsp. mays
  peptide (1)..(463): Ceres Seq. ID no. 12379201
MSVATTEATTTIAVGASEDQALEARNSKTVVAVILGGGAGTRLFPLTRRRAKPAVPIGGAYRLIDVPMSNCINSGINKVYILTQFNSQSLNRHLSRAYDFSNGVAIGDGFVEVLAATQRPGTEGKRWFQGTADAVRQFDWLFDDAKSKDIEDVLILSGDHLYRMDYMDFVQSHRQRGAGISICCLPIDGSRASDFGLMKIDDTGRVISFSEKPKGDELKAMQVDTTVLGLSKEEAENKPYIASMGIYIFKKDILLNLLRWRFPTANDFGSEIIPASAKEIDVKAYLFNDYWEDIGTIKSFFEANLALAEQPPRFSFYDADKPMYTSRRNLPPSMVNNSKITDSIISHGCFLDNCRIEHSVVGVRSRIGSNVHLKDTVMLGADYYETAVERGELLAEGKVPIGIGENTTIQKCIIDKNARIGKKVVISNSEGVDEADRTSEGFYIRSGITVVLKNAIIADGLVI

SEQ ID NO: 17602 - DNA, 1182 bp, Zea mays subsp. mays
  misc_feature (1)..(1182): Ceres Seq. ID no. 13499256
  misc_feature (1)..(1182): Ortholog of  Ceres SEQ ID NO 15168860 as cited in SEQ ID NO 65053
gcacgagaccattacctagaacatcctaatcaaaaaatctctagccagcgtcgtcggctgacctcctaccgtcgtcatggcttctcttcacccgttgatcgctgctgcgctcgtagtcgcggcggcctccacggcagcggcggcggcgagctgggcggcaccgtcgtcgccagcacgccctctgttccgcgagtacatcggcgcggagggcaagaacgtgacgttcgcggacgtgccggtgcacccgggcgtggacttccacttcatcctctccttcgccatcgactacgccgcgaacgccaccaacgcctccgcgccgccggtgcccacggacggccgcttcgccgtgttctgggacgaggcgaacctcaccccggccgccgtggccgccctcaagtgcccctcctcccacgcccgcgtcgcgctcagcctcggcggcgacaccgtgttcggcgccaacgccacgttccgcgcgtcctccgtcgacgcctgggtcggcaacgccgtggcgtcgctcgcggccatcctcacccgctacggcctcgacggggtggacgtggactacgagcacttcggggagcgcgagacgcccgaggtgttcgccgagtgcgtcggccgcctcgtgcgcgcgctccgggcccgcggcgtcatctccttcgcctccatcgcgcccttcgccaacccggacgtgcaggcgcactacgccgagctctggcgacgctacggccgcgacttcgactacgtcaacttccagttctacgcgtacccgtccaacaccacggtgccggagttcctggcccactatgacgagcagagcgcccggtacgccggcgccagcggaggggggaaggtgcttgtcagcttcgggacggaccccgccagcggcggcctgcgccccgggaagggcttcttcagggcgtgccgggagctgcgccgccaagggaggttgcatggaattttttgtctgggccgcggataactccgccgccgacgggtttcgcgacgagcgcctcgcgcagacgttcctcgccggcaacgccccgggtttcccctgacgcatgcatgcgttaagctccccgtgtctccgttccatatttccgttccttgtgtacgtcttgttatgttttgtcgcgtccatatgatttgtaattggtccagttcattgattatttgcgtgcatcc

SEQ ID NO: 17603 - protein, 300 aa, Zea mays subsp. mays
  peptide (1)..(300): Ceres Seq. ID no. 13499257
MASLHPLIAAALVVAAASTAAAAASWAAPSSPARPLFREYIGAEGKNVTFADVPVHPGVDFHFILSFAIDYAANATNASAPPVPTDGRFAVFWDEANLTPAAVAALKCPSSHARVALSLGGDTVFGANATFRASSVDAWVGNAVASLAAILTRYGLDGVDVDYEHFGERETPEVFAECVGRLVRALRARGVISFASIAPFANPDVQAHYAELWRRYGRDFDYVNFQFYAYPSNTTVPEFLAHYDEQSARYAGASGGGKVLVSFGTDPASGGLRPGKGFFRACRELRRQGRLHGIFCLGRG

SEQ ID NO: 17604 - protein, 268 aa, Zea mays subsp. mays
  peptide (1)..(268): Ceres Seq. ID no. 13499258
ARDHYLEHPNQKISSQRRRLTSYRRHGFSSPVDRCCARSRGGLHGSGGGELGGTVVASTPSVPRVHRRGGQERDVRGRAGAPGRGLPLHPLLRHRLRRERHQRLRAAGAHGRPLRRVLGRGEPHPGRRGRPQVPLLPRPRRAQPRRRHRVRRQRHVPRVLRRRLGRQRRGVARGHPHPLRPRRGGRGLRALRGARDARGVRRVRRPPRARAPGPRRHLLRLHRALRQPGRAGALRRALATLRPRLRLRQLPVLRVPVQHHGAGVPGPL

SEQ ID NO: 17605 - DNA, 461 bp, Zea mays subsp. mays
  misc_feature (1)..(461): Ceres Seq. ID no. 13635148
  misc_feature (1)..(461): Ortholog of  Ceres SEQ ID NO 15177927 as cited in SEQ ID NO 1170
  misc_feature (1)..(461): Ortholog of  Ceres SEQ ID NO 13596295 as cited in SEQ ID NO 68019
gacttgtgcgccatcacacacaagacacaaccccactcacccggcagggaggccctcttcgtcggcggaggccatggtttccctcaagccgcagaagaggctcgccgcgggagtcctaaaatgtggcaaggggaaggtgtggcttgaccccaacgaggtctacgagatctcgatggctaactcgcgtcagaacattcgtaagctggtgaaggatggattcataattaagaagccacagaaaatccactcaaggtcccgggcaaggagggcccatgaggccaagcagaaggggaggcactctggttacggtaagcgcaggggtaccagggaggctaggctccccaccaagatcctttggatgcgcaggatgcgtgtcctttttttttcaggcgtctgctgcgcaagtatcgtgaagcaaagaaaatcgacaaacacatgtaccacgatatgtatatgaaagt

SEQ ID NO: 17606 - protein, 151 aa, Zea mays subsp. mays
  peptide (1)..(151): Ceres Seq. ID no. 13635149
TCAPSHTRHNPTHPAGRPSSSAEAMVSLKPQKRLAAGVLKCGKGKVWLDPNEVYEISMANSRQNIRKLVKDGFIIKKPQKIHSRSRARRAHEAKQKGRHSGYGKRRGTREARLPTKILWMRRMRVLFFSGVCCASIVKQRKSTNTCTTICI

SEQ ID NO: 17607 - protein, 127 aa, Zea mays subsp. mays
  peptide (1)..(127): Ceres Seq. ID no. 13635150
MVSLKPQKRLAAGVLKCGKGKVWLDPNEVYEISMANSRQNIRKLVKDGFIIKKPQKIHSRSRARRAHEAKQKGRHSGYGKRRGTREARLPTKILWMRRMRVLFFSGVCCASIVKQRKSTNTCTTICI

SEQ ID NO: 17608 - protein, 94 aa, Zea mays subsp. mays
  peptide (1)..(94): Ceres Seq. ID no. 13635151
MANSRQNIRKLVKDGFIIKKPQKIHSRSRARRAHEAKQKGRHSGYGKRRGTREARLPTKILWMRRMRVLFFSGVCCASIVKQRKSTNTCTTICI

SEQ ID NO: 17609 - DNA, 533 bp, Zea mays subsp. mays
  misc_feature (1)..(533): Ceres Seq. ID no. 1674907
  misc_feature (1)..(533): Ortholog of  Ceres SEQ ID NO 14308221 as cited in SEQ ID NO 60363
aacaggctccccgccgtgagctcttcggccacgcgggcgtcttgcctccctcgtccttcctcaccgcaggaggatggccgcgatagcctcagcttcgcccaggaccctgatccctccgcggccgcgccaccacggcgccgcgccctccccatccacctccgacgtctcctcgctccgactcctccgcgcgcacccgcgccacgtccgacgcagccgcggagtgtccatctcgatgcccgtggcgcggagccggtcgttcgtcttctccccgcgcgcggtggctgactccaagagctcccagacctgcctggaccccgacgccagcacgagtgttcttggaatcattctgggaggtggtgctgggactagattgtaccccttgacaaagaagcgtgccaagcctgcagtgccattgggtgccaactatagactgattgatattcctgtcagcaattgtctcaacagcaacatatccaagatctatgtgctaacgcaatttaactctgcttccctcaaccgtcactctcaagagc

SEQ ID NO: 17610 - protein, 94 aa, Zea mays subsp. mays
  peptide (1)..(94): Ceres Seq. ID no. 1674908
NRLPAVSSSATRASCLPRPSSPQEDGRDSLSFAQDPDPSAAAPPRRRALPIHLRRLLAPTPPRAPAPRPTQPRSVHLDARGAEPVVRLLPARGG

SEQ ID NO: 17611 - protein, 153 aa, Zea mays subsp. mays
  peptide (1)..(153): Ceres Seq. ID no. 1674909
MAAIASASPRTLIPPRPRHHGAAPSPSTSDVSSLRLLRAHPRHVRRSRGVSISMPVARSRSFVFSPRAVADSKSSQTCLDPDASTSVLGIILGGGAGTRLYPLTKKRAKPAVPLGANYRLIDIPVSNCLNSNISKIYVLTQFNSASLNRHSQE

SEQ ID NO: 17612 - protein, 100 aa, Zea mays subsp. mays
  peptide (1)..(100): Ceres Seq. ID no. 1674910
MPVARSRSFVFSPRAVADSKSSQTCLDPDASTSVLGIILGGGAGTRLYPLTKKRAKPAVPLGANYRLIDIPVSNCLNSNISKIYVLTQFNSASLNRHSQE

SEQ ID NO: 17613 - DNA, 2297 bp, Zea mays subsp. mays
  misc_feature (1)..(2297): Ceres Seq. ID no. 12375193
  misc_feature (1)..(2297): Ortholog of  Ceres SEQ ID NO 13574398 as cited in SEQ ID NO 0
gcacgagaccattacctagaacatcntaatcgaaaaactcgtcacaagctctctttcatcgcatccaccattccacttccaccccacgaggatccagcctgcctgtccctctcgccgcacgccacaaccgtagtcgctcgccggcgtatctagcctagccggggcctgggcctccgcgctcgtgctcccgggaaacaacgaccgacgcgtcctcatagtcatagaggcagctaaggcagccacgcattcgtcactcgctcgaccggcgatggcgagaggtggcacggcgggcgcgggcgcgggcggggaggggagggcggctagcgaggcgctgacggcggactcagccgacgaggaggggcgccgcgggagcagctccagcgccagctccgacgccgcctccagcttctcctgcacgtactccccggccccgcccgacgagtggcacaaggtggccatcatcaagacctgcgtgtctgtgtcggccgacgccgcgggcggcggcggcggcaaggaccagaagccgcgcggcgtcgtcgccgcggccgacaggcacggaggagcatcagagatggagatgatgaaggagcggttctccaagctgctgctcggcgaggacatgtccgggagcggcaagggcgtctgcaccgcgctcgccatctccaacgccgtcaccaacctctgcgcgacggtgttcggccagctctggaggctggagccgctgccgccggagaagaaggccatgtggcggcgcgagttggactgcctgctctgcgtcagcgaccacatcgtggagctggtgcccacgtggcagacattcccggatggtacaaggcttgagatcatgacaagcaggccgcggtctgatctgtacatcaacctgccggcgcttcggaagctagacaacatgctcctcgaaatcctggaaggtttcagggacgtcgagttctggtacgtggaccagggcatctgtgcgccggactgcgacagctccgcgtcctaccggagaacgttccaccgccgcgacgacaagtggtggctgccggtgccgcacgtgccccacggcggtctccgcgaggccacgcggaggcagctggagcaccgtcgcgactgcgccagccagatcctcaaggccgccatggccatcaacagcaacgcactggccgagatggccgtgccggtctcctacctcgactcgctgccaaagaacgggcgcgcggcgctgggcgacgtcatctaccggtacatcacctcggaccagttctcccaggactgcctcctcgactgcctcgacctgtcgtcggaataccaggcgctggagatcgccaaccgcgtcgaggcctccatctacgtgtggcgccggaaggggggcggcggcgccagatcgtcctggggcatcgtgaaggacatggtcatggacacggagaagagggacctgctcgccgagcgcgcggaggcgctgctcatgtccctcaagcagcggttccccgggctcactcagacgagcttggacatgagcaagatccagtacaacaaggacgtgggcaaatcgatcctcgagagctactcgagggtcctggagagcctggcctccaacatcatcgcgcggatcgacgacctgctcaacgtcgacgagctgagcaagcaaccagctgacagcatcccgtccgccggagcggacgcgaaggttgcgtgcaagagcaacggcagcaagcaggccacggcggtgcctgcctcgggcacgccgtacgcgacggcgtacgccacgccgagcttctcgccggcgcagctgtcgagcccgtccaagatcgggagggccctgctggtcgaccgccggtcgcaccacgttgccggagctaagagggcaacggcgtccgcggctgatcgcgctggcgtggaggtggtcaagggaatggtggtcgacggcagcagcgccatattcgatatcatcccgatagctgtcccagcaaagatatgaagagtccgctcgtctgtgcggaccagatacgtcatacgtgttgtgttggcgtgaagtagtgggtttactgtagcatccgagggcgatttctcttgttgccgatggcagccctccgcttgcgactgtaatgcttttggtgcggtgtcgtgtagtatgttacacgtagagttttctgtatctgtcagatgttcgttggatgaaagcaccgccgacactggtcgtcggctgtcgcggagtaagattatgtcaccacactcacgatctcactcctatttcaaactactacactttacaaaaaaaaaaaaaaaaaaaaagaaaa

SEQ ID NO: 17614 - protein, 569 aa, Zea mays subsp. mays
  peptide (1)..(569): Ceres Seq. ID no. 12375194
MARGGTAGAGAGGEGRAASEALTADSADEEGRRGSSSSASSDAASSFSCTYSPAPPDEWHKVAIIKTCVSVSADAAGGGGGKDQKPRGVVAAADRHGGASEMEMMKERFSKLLLGEDMSGSGKGVCTALAISNAVTNLCATVFGQLWRLEPLPPEKKAMWRRELDCLLCVSDHIVELVPTWQTFPDGTRLEIMTSRPRSDLYINLPALRKLDNMLLEILEGFRDVEFWYVDQGICAPDCDSSASYRRTFHRRDDKWWLPVPHVPHGGLREATRRQLEHRRDCASQILKAAMAINSNALAEMAVPVSYLDSLPKNGRAALGDVIYRYITSDQFSQDCLLDCLDLSSEYQALEIANRVEASIYVWRRKGGGGARSSWGIVKDMVMDTEKRDLLAERAEALLMSLKQRFPGLTQTSLDMSKIQYNKDVGKSILESYSRVLESLASNIIARIDDLLNVDELSKQPADSIPSAGADAKVACKSNGSKQATAVPASGTPYATAYATPSFSPAQLSSPSKIGRALLVDRRSHHVAGAKRATASAADRAGVEVVKGMVVDGSSAIFDIIPIAVPAKI

SEQ ID NO: 17615 - protein, 468 aa, Zea mays subsp. mays
  peptide (1)..(468): Ceres Seq. ID no. 12375195
MEMMKERFSKLLLGEDMSGSGKGVCTALAISNAVTNLCATVFGQLWRLEPLPPEKKAMWRRELDCLLCVSDHIVELVPTWQTFPDGTRLEIMTSRPRSDLYINLPALRKLDNMLLEILEGFRDVEFWYVDQGICAPDCDSSASYRRTFHRRDDKWWLPVPHVPHGGLREATRRQLEHRRDCASQILKAAMAINSNALAEMAVPVSYLDSLPKNGRAALGDVIYRYITSDQFSQDCLLDCLDLSSEYQALEIANRVEASIYVWRRKGGGGARSSWGIVKDMVMDTEKRDLLAERAEALLMSLKQRFPGLTQTSLDMSKIQYNKDVGKSILESYSRVLESLASNIIARIDDLLNVDELSKQPADSIPSAGADAKVACKSNGSKQATAVPASGTPYATAYATPSFSPAQLSSPSKIGRALLVDRRSHHVAGAKRATASAADRAGVEVVKGMVVDGSSAIFDIIPIAVPAKI

SEQ ID NO: 17616 - protein, 466 aa, Zea mays subsp. mays
  peptide (1)..(466): Ceres Seq. ID no. 12375196
MMKERFSKLLLGEDMSGSGKGVCTALAISNAVTNLCATVFGQLWRLEPLPPEKKAMWRRELDCLLCVSDHIVELVPTWQTFPDGTRLEIMTSRPRSDLYINLPALRKLDNMLLEILEGFRDVEFWYVDQGICAPDCDSSASYRRTFHRRDDKWWLPVPHVPHGGLREATRRQLEHRRDCASQILKAAMAINSNALAEMAVPVSYLDSLPKNGRAALGDVIYRYITSDQFSQDCLLDCLDLSSEYQALEIANRVEASIYVWRRKGGGGARSSWGIVKDMVMDTEKRDLLAERAEALLMSLKQRFPGLTQTSLDMSKIQYNKDVGKSILESYSRVLESLASNIIARIDDLLNVDELSKQPADSIPSAGADAKVACKSNGSKQATAVPASGTPYATAYATPSFSPAQLSSPSKIGRALLVDRRSHHVAGAKRATASAADRAGVEVVKGMVVDGSSAIFDIIPIAVPAKI

SEQ ID NO: 17617 - DNA, 2429 bp, Zea mays subsp. mays
  misc_feature (1)..(2429): Ceres Seq. ID no. 12366265
  misc_feature (1)..(2429): Ortholog of  Ceres SEQ ID NO 15174591 as cited in SEQ ID NO 53383
  misc_feature (1)..(2429): Ortholog of  Ceres SEQ ID NO 14310784 as cited in SEQ ID NO 58503
  misc_feature (1)..(2429): Ortholog of  Ceres SEQ ID NO 14312180 as cited in SEQ ID NO 59480
gcacgagaccattacctagaacatcctaatcgaaaaaagacaagaccataaagattactcatagattaaagtagggtttggacgtctgcctgtccatttcggcgtctgttcttagcggccgacaagcggaatctggatcaagtcccctgcttcaacccatcccctctcatcgattcattgccacaaggcagctgattgctcacagcgttggatgtgagaattggattcggacccaccgatcgatatgccgttcggccacacgcggctcgatgtccggcgtccgccgcagtcgtcctacctctgctgctccacaaccaccgtcgccgtattcgtcgcgctctgcctggtggctgtgtggatggcgtcgtccatgctcgtcacccctgccgagttccctccatttcagtccaaagtgcgtccactgaggcctcatgactctcctcctgccaccggaagcttaaccagtgctgatcagggcgatggcatcaccacccatgatgatccaccacctgctacacaacaattgcctcctgtaacagacagcatggatggtgaaaatcagcaacaagaacttttcactacagagcgcggaccatggtcaaccaaggctgaacaatctaacaaggacgctaaagagcaaaccttgacgtccagtagcccactgagcttccgttgggcgttatgcaacgtcgatgctggagcagattatatttccatgcctcgacaacgtagcagctatcaagaagctccgttccaccaagcactacgaacaccgagaaaggcattgccccgagaaatctcctacctgccttgttcctctaccagagggctacaggaatccaattaggtggccaaagagcagagatcagatatggtacaataacgttcctcatactaagctggttgaatacaagggacaccaaaactgggttaaggtttctggagaatacctcaccttccccggaggcgggactcagtttaaacatggtgcgttgcgctacattgattttattcaggaggcaaagaaggatgtagcatggggaaaacgaagccgtgtagtgttagatgttggttgtggagtagctagctttggaggatatctatttgacagagatgtgattactatgtcatttgcacctaaagatgagcacgaagctcaggttcagtttgctcttgaaagaggaatacctgctatatcagctgtcatgggtacaaaaaggctcccatttcccagtagggtgtttgatgttgttcattgtgcacgatgtagggtaccgtggcatattgaaggcggtaaactcttgcttgaactggacagactgttacgtcctggtggttactttgtgtggtctgctacacccgtataccagaagctgcctgaagatgttgagatatggcaagccatgtctgctctaaccagttcaatgtgctggaaaatggtcaacaaagtaaaggatagggtgaatagagtgggtatagcaatttacagaaagccaacagacaacagctgctacgaagcaagatctgaaacaaaccctccactctgtggagagtacgacgatcctgatgctgcctggaacatatcgttgggggcttgtatgcataagttgcctgtagatcctaccgttcgtggttcacagtggcctgagttatggccattgagactggagaaaccaccttattggctgagaggttctgaggctggagtatatgggaaacctgccccggaggattttcaagcagactatgaacactggaagcgagtcgtgagcaattcatacatgaatggtttgggtattgactggtctactgttagaaatgttatggatatgaaagccgtatatgcagggttcgcagcagctttgcgcgatctcaaggtgtgggtcatgaatgtggttccaattgattcacctgacacgcttccaattatatatgagcgcgggctgtttggactgtaccatgactggtgtgagtcgtttagcacctatccgagaacttatgatcttgtgcacgccaaccatctgttctccaaggttaagaagaggtgcgagctattacctgttatcgtggaggtggaccgggtgttgaggccacaaggccggctaattgtcagagacaacattgaaacaacaagtgaggtggagaacattctgaaatctctccactgggaggtccgcatgtcttacttccaggagaaagaaggcttgctgttggtgcagaagacgacatggcggccaaatgaaactgaagctaagctatgatgcagagcccttgccccttggaaggaggaaaggaagatctagtgtttgcaaggtcctctacttttgtgaggcatcttttatttatgtagaatttgtagagctatatgattggtagatgtggaggaatctggtggtttccagcatatccatattcatctgtggaagtcg

SEQ ID NO: 17618 - protein, 522 aa, Zea mays subsp. mays
  peptide (1)..(522): Ceres Seq. ID no. 12366266
MLEQIIFPCLDNVAAIKKLRSTKHYEHRERHCPEKSPTCLVPLPEGYRNPIRWPKSRDQIWYNNVPHTKLVEYKGHQNWVKVSGEYLTFPGGGTQFKHGALRYIDFIQEAKKDVAWGKRSRVVLDVGCGVASFGGYLFDRDVITMSFAPKDEHEAQVQFALERGIPAISAVMGTKRLPFPSRVFDVVHCARCRVPWHIEGGKLLLELDRLLRPGGYFVWSATPVYQKLPEDVEIWQAMSALTSSMCWKMVNKVKDRVNRVGIAIYRKPTDNSCYEARSETNPPLCGEYDDPDAAWNISLGACMHKLPVDPTVRGSQWPELWPLRLEKPPYWLRGSEAGVYGKPAPEDFQADYEHWKRVVSNSYMNGLGIDWSTVRNVMDMKAVYAGFAAALRDLKVWVMNVVPIDSPDTLPIIYERGLFGLYHDWCESFSTYPRTYDLVHANHLFSKVKKRCELLPVIVEVDRVLRPQGRLIVRDNIETTSEVENILKSLHWEVRMSYFQEKEGLLLVQKTTWRPNETEAKL

SEQ ID NO: 17619 - protein, 378 aa, Zea mays subsp. mays
  peptide (1)..(378): Ceres Seq. ID no. 12366267
MSFAPKDEHEAQVQFALERGIPAISAVMGTKRLPFPSRVFDVVHCARCRVPWHIEGGKLLLELDRLLRPGGYFVWSATPVYQKLPEDVEIWQAMSALTSSMCWKMVNKVKDRVNRVGIAIYRKPTDNSCYEARSETNPPLCGEYDDPDAAWNISLGACMHKLPVDPTVRGSQWPELWPLRLEKPPYWLRGSEAGVYGKPAPEDFQADYEHWKRVVSNSYMNGLGIDWSTVRNVMDMKAVYAGFAAALRDLKVWVMNVVPIDSPDTLPIIYERGLFGLYHDWCESFSTYPRTYDLVHANHLFSKVKKRCELLPVIVEVDRVLRPQGRLIVRDNIETTSEVENILKSLHWEVRMSYFQEKEGLLLVQKTTWRPNETEAKL

SEQ ID NO: 17620 - protein, 351 aa, Zea mays subsp. mays
  peptide (1)..(351): Ceres Seq. ID no. 12366268
MGTKRLPFPSRVFDVVHCARCRVPWHIEGGKLLLELDRLLRPGGYFVWSATPVYQKLPEDVEIWQAMSALTSSMCWKMVNKVKDRVNRVGIAIYRKPTDNSCYEARSETNPPLCGEYDDPDAAWNISLGACMHKLPVDPTVRGSQWPELWPLRLEKPPYWLRGSEAGVYGKPAPEDFQADYEHWKRVVSNSYMNGLGIDWSTVRNVMDMKAVYAGFAAALRDLKVWVMNVVPIDSPDTLPIIYERGLFGLYHDWCESFSTYPRTYDLVHANHLFSKVKKRCELLPVIVEVDRVLRPQGRLIVRDNIETTSEVENILKSLHWEVRMSYFQEKEGLLLVQKTTWRPNETEAKL

SEQ ID NO: 17621 - DNA, 1872 bp, Zea mays subsp. mays
  misc_feature (1)..(1872): Ceres Seq. ID no. 12366269
  misc_feature (1)..(1872): Ortholog of  Ceres SEQ ID NO 13597269 as cited in SEQ ID NO 63932
cttttcccctctcgaaacgcaccctgcatttactgcacgtcgctcgccctccggccatccgcgatcttcaaatcttccactgtaaaaagcgggcggagacgggaaggccgtgcgctcaaggatggcgcgcgagcagctggaggagtccatcgtggccgacggcaacggcaaggaggaagaggtcggggtcatgggcatcggcgccgcggacggcgccgacgaccagcacggcggcggcaagctcagcatgaagagcctgctgtggcacggcggctccgtctgggacgcgtggttcagctgcgcctccaaccaggtggcgcaggtgctcctgacgctgccgtactccttctcccagctggggatgctgtccggcgtgctgctgcagatcttctacggcttcctgggcagctggaccgcgtacctcatcagcgtcctctacgtcgagtaccgctcccgcaaggagaaggagggcgtcagcttcaagaaccacgtcatccagtggttcgaggtgctggacgggttgctgggcccctactggaaggcggcgggtctggccttcaactgcacgttcctgctgttcggctccgtcatccagctgatcgcctgcgcgagcaacatctactacatcaacgatcggctggacaagcggacatggacgtacatcttcggcgcctgctgcgccaccacggtgttcatcccgtccttccacaactaccggatctggtccttcctgggcctcggcatgaccacctacaccgcgtggtacctcgccatcgccgcgctcctcaacggccaggccgaaggcgtggcgcactccggcccgaccaagctcgtgctctacttcaccggcgccaccaacatcctctacaccttcggcggccacgccgtcacagtcgagatcatgcacgcgatgtggaagcccgccaagttcaagtacatctacctgctggcgacgctgtacgtgttcacgctgacgctgccgtcggcggcggccatgtactgggcgttcggcgacgagctgctgacccactcgaacgccttctcgctgctgcccaagacccggtggcgcgacgcggcggtgatcctgatgctgatccaccagttcatcaccttcggcttcgcgtgcacgccgctctacttcgtgtgggagaaggtgatcgggatgcacgacgccaagagcatcttcaagcgcgcgctggcgaggctgcccatcgtcgtgcccatctggttcctcgccatcatcttcccccttcttcgggcccatcaactccgccgtcggcgcgctgctcgtcagcttcaccgtctacatcatcccggccctggcgcacgtcctcacctaccgcacggcgtccgcgcgcatgaacgccgcggagaagccgcccttcttcctgccgagctggacggggatgttcgtcctcaacatgttcatcgtggtgtgggtgctggtggtcggcttcgggctgggcggctgggccagcatggtcaacttcgtgaggcagatcgacacgttcgggctgttcgccaagtgctaccagtgcccgaagccgccggtcccggcggccgcgcagtcgccggcgccgctgccgcaccactagggcgcgcaggcatggagctagcgtcgctgcttgcattgcagccggtgttaattgctactaggttttggtcgccttgtaatatacaagcctcctctagggtcgtagaactcgatcacagcagagtcacgcaaaggcggctcgtgccgtgccgccgccgcgttgctttcccgcccaccctcctctgcctgatcggtccgtcggcattggtgtcgttttgttttcgtttggcttgccaccggtattaaaaagttgagtgatggtcatggcttcttaatcc

SEQ ID NO: 17622 - protein, 572 aa, Zea mays subsp. mays
  peptide (1)..(572): Ceres Seq. ID no. 12366270
MAREQLEESIVADGNGKEEEVGVMGIGAADGADDQHGGGKLSMKSLLWHGGSVWDAWFSCASNQVAQVLLTLPYSFSQLGMLSGVLLQIFYGFLGSWTAYLISVLYVEYRSRKEKEGVSFKNHVIQWFEVLDGLLGPYWKAAGLAFNCTFLLFGSVIQLIACASNIYYINDRLDKRTWTYIFGACCATTVFIPSFHNYRIWSFLGLGMTTYTAWYLAIAALLNGQAEGVAHSGPTKLVLYFTGATNILYTFGGHAVTVEIMHAMWKPAKFKYIYLLATLYVFTLTLPSAAAMYWAFGDELLTHSNAFSLLPKTRWRDAAVILMLIHQFITFGFACTPLYFVWEKVIGMHDAKSIFKRALARLPIVVPIWFLAIIFPLLRAHQLRRRRAARQLHRLHHPGPGARPHLPHGVRAHERRGEAALLPAELDGDVRPQHVHRGVGAGGRLRAGRLGQHGQLREADRHVRAVRQVLPVPEAAGPGGRAVAGAAAAPLGRAGMELASLLALQPVLIATRFWSPCNIQASSRVVELDHSRVTQRRLVPCRRRVAFPPTLLCLIGPSALVSFCFRLACHRY

SEQ ID NO: 17623 - protein, 549 aa, Zea mays subsp. mays
  peptide (1)..(549): Ceres Seq. ID no. 12366271
MGIGAADGADDQHGGGKLSMKSLLWHGGSVWDAWFSCASNQVAQVLLTLPYSFSQLGMLSGVLLQIFYGFLGSWTAYLISVLYVEYRSRKEKEGVSFKNHVIQWFEVLDGLLGPYWKAAGLAFNCTFLLFGSVIQLIACASNIYYINDRLDKRTWTYIFGACCATTVFIPSFHNYRIWSFLGLGMTTYTAWYLAIAALLNGQAEGVAHSGPTKLVLYFTGATNILYTFGGHAVTVEIMHAMWKPAKFKYIYLLATLYVFTLTLPSAAAMYWAFGDELLTHSNAFSLLPKTRWRDAAVILMLIHQFITFGFACTPLYFVWEKVIGMHDAKSIFKRALARLPIVVPIWFLAIIFPLLRAHQLRRRRAARQLHRLHHPGPGARPHLPHGVRAHERRGEAALLPAELDGDVRPQHVHRGVGAGGRLRAGRLGQHGQLREADRHVRAVRQVLPVPEAAGPGGRAVAGAAAAPLGRAGMELASLLALQPVLIATRFWSPCNIQASSRVVELDHSRVTQRRLVPCRRRVAFPPTLLCLIGPSALVSFCFRLACHRY

SEQ ID NO: 17624 - protein, 530 aa, Zea mays subsp. mays
  peptide (1)..(530): Ceres Seq. ID no. 12366272
MKSLLWHGGSVWDAWFSCASNQVAQVLLTLPYSFSQLGMLSGVLLQIFYGFLGSWTAYLISVLYVEYRSRKEKEGVSFKNHVIQWFEVLDGLLGPYWKAAGLAFNCTFLLFGSVIQLIACASNIYYINDRLDKRTWTYIFGACCATTVFIPSFHNYRIWSFLGLGMTTYTAWYLAIAALLNGQAEGVAHSGPTKLVLYFTGATNILYTFGGHAVTVEIMHAMWKPAKFKYIYLLATLYVFTLTLPSAAAMYWAFGDELLTHSNAFSLLPKTRWRDAAVILMLIHQFITFGFACTPLYFVWEKVIGMHDAKSIFKRALARLPIVVPIWFLAIIFPLLRAHQLRRRRAARQLHRLHHPGPGARPHLPHGVRAHERRGEAALLPAELDGDVRPQHVHRGVGAGGRLRAGRLGQHGQLREADRHVRAVRQVLPVPEAAGPGGRAVAGAAAAPLGRAGMELASLLALQPVLIATRFWSPCNIQASSRVVELDHSRVTQRRLVPCRRRVAFPPTLLCLIGPSALVSFCFRLACHRY

SEQ ID NO: 17625 - DNA, 727 bp, Zea mays subsp. mays
  misc_feature (1)..(727): Ceres Seq. ID no. 12417192
  misc_feature (1)..(727): Ortholog of  Ceres SEQ ID NO 13599881 as cited in SEQ ID NO 1319
  misc_feature (1)..(727): Ortholog of  Ceres SEQ ID NO 13600163 as cited in SEQ ID NO 0
gaactcaagattgcaacagggtcgtccgccgccaccaattgctagcgcaatcctagccctagcccagcgccccctccggccctccctgcttcgtgcttggtagcgatggcgtcgttttctgaagcgcccccggggaacccaactgctggcgagaagatcttcaagaccaagtgcgcgcagtgccacaccgtcgacaagggcgccggccacaagcaaggtcctaatttgaatggtctgtttgggaggcagtctggtacaacacctggctactcttactcttcggctaacaagaacatggctgtgatttgggaggagaacactttgtatgactacttgcttaatcccaagaagtacattcctggaaccaagatggtattccctggactgaaaaagccacaggaacgtgctgatctcattgcatacctgaagaatgccactgtctgacgaggatgctgctgtggctctaaagatgaagagcagcgattctctttttttgcagttaaaataatgacacgaatttactttaatttgacagactggataatcaagaaagctaagaactccaggtagttctgtaacggttttgtctattgctgggggtaaacaccacccttgaagagcttttgattagtggttgaaatgtgacatcaccataatacgtttgacctgacgagcatttaaacacacgtttgggaagcttttgattagtgttttaatgttcgttttt

SEQ ID NO: 17626 - protein, 112 aa, Zea mays subsp. mays
  peptide (1)..(112): Ceres Seq. ID no. 12417193
MASFSEAPPGNPTAGEKIFKTKCAQCHTVDKGAGHKQGPNLNGLFGRQSGTTPGYSYSSANKNMAVIWEENTLYDYLLNPKKYIPGTKMVFPGLKKPQERADLIAYLKNATV

SEQ ID NO: 17627 - DNA, 1787 bp, Zea mays subsp. mays
  misc_feature (1)..(1787): Ceres Seq. ID no. 13498188
  misc_feature (1)..(1787): Ortholog of  Ceres SEQ ID NO 15176016 as cited in SEQ ID NO 56593
  misc_feature (1)..(1787): Ortholog of  Ceres SEQ ID NO 13660260 as cited in SEQ ID NO 67494
cctcccctcccctccctgctcctctaccccttcctctcccggcgaccagctggcctctcctttgttgaggcgagagacccccacccgatccggcgatggacgccgcgtccaggccgcctccgccccacggagcaggggtccgcgtccgcgccccgctggtggagtctgtctcctgctactgcagattagatacaggccttaaaactgttgttgaggccaggaagtttgttcctggcgcgaaaatgtgcatgcaacctgaagtcaaacaaaacaagcgcaagtcaaggggctcaaaaaaggaaaggtgcaggactcaagcaccacttttacctggccttcctgatgatcttgctattgcctgccttatacgagttcctcgacttgaacagcccaaactcaggatggtttgcaaaagatggaaccgtcttttgtctgggaattacttttactccttgcgtaagaaaattggagtggcagaagaatgggtgtatgtctttaaaagggaccgtgaagggaagatatcctggtatgcctttgatccactccaccagctatggaagtcactcccaccagttccacaagagtattcagaagcattgggctttgggtgtgccgttctgagtggttgctatctgtacttgtttggcgggaaagatcctttgaggggttctatgaggcgtgttgtattctacaatgctcgtacaaacaaatggcaccgggctccggatatgatgaggaaacgtcacttttttggttcttgtgtaataaacaattgtctctatgttgctggaggagagtgtgaaggaatacagagaacactgcagtctgcggaagtttatgatccaaataggaacagatgggcctgtgttactgaaatgaacaatgggatggtgcctttcattggagttgtatatgatggcaagtggttcttaaaggggctagattcccatcgccaagtaactagtgaggtctacttaccatcatccaatacatggtcagcaattgatgatgagatggtcacaggctggcggaacccaagtatttctttcaatggccgtctctattcagctgactgccgggatggctgcaagcttagagtctatgatgagaacacaggaacatggacaaggttcatggacagcaagcaccacttgggcagctcacgtgcctttgaagctgcagctttggtgtcactaaatgggaaactctgtgtcatcaggaacaacatgagcataactcttgttgatgtctccaacccaacaatgagtgttgagacagatagtgcgcgcatgtgggaaactgttgttcggaagggccagcacaggtcgtttgtggcgaacttatggtcgagcattgcaggacggaacttaaagagtcacattatccattgccatgtgctgcaagtttgagggcaggttttgttagtgggaacatgatcaagttttttaagaagcaaaaggttcagatcagtgacagaaccctccatttcgaaggtagtaaggtttcattgcagaatcgcggggaaaaaggtcattggcgtgccactgctgcccccaaagtcccaaatagttatttgctctcttccagaactgaaaattccaattactttctggcaacatttgaagactcttatcattaatggataaggtttttcagattttgagtgcaaaccagaaagtgagtaggaacttccctagtgtaatgacattttccccttgctggcaggctgggaaatgtgtttggtggatatattggtctcttatcatatttatctatctttgcattgt

SEQ ID NO: 17628 - protein, 437 aa, Zea mays subsp. mays
  peptide (1)..(437): Ceres Seq. ID no. 13498189
MDAASRPPPPHGAGVRVRAPLVESVSCYCRLDTGLKTVVEARKFVPGAKMCMQPEVKQNKRKSRGSKKERCRTQAPLLPGLPDDLAIACLIRVPRLEQPKLRMVCKRWNRLLSGNYFYSLRKKIGVAEEWVYVFKRDREGKISWYAFDPLHQLWKSLPPVPQEYSEALGFGCAVLSGCYLYLFGGKDPLRGSMRRVVFYNARTNKWHRAPDMMRKRHFFGSCVINNCLYVAGGECEGIQRTLQSAEVYDPNRNRWACVTEMNNGMVPFIGVVYDGKWFLKGLDSHRQVTSEVYLPSSNTWSAIDDEMVTGWRNPSISFNGRLYSADCRDGCKLRVYDENTGTWTRFMDSKHHLGSSRAFEAAALVSLNGKLCVIRNNMSITLVDVSNPTMSVETDSARMWETVVRKGQHRSFVANLWSSIAGRNLKSHIIHCHVLQV

SEQ ID NO: 17629 - protein, 388 aa, Zea mays subsp. mays
  peptide (1)..(388): Ceres Seq. ID no. 13498190
MCMQPEVKQNKRKSRGSKKERCRTQAPLLPGLPDDLAIACLIRVPRLEQPKLRMVCKRWNRLLSGNYFYSLRKKIGVAEEWVYVFKRDREGKISWYAFDPLHQLWKSLPPVPQEYSEALGFGCAVLSGCYLYLFGGKDPLRGSMRRVVFYNARTNKWHRAPDMMRKRHFFGSCVINNCLYVAGGECEGIQRTLQSAEVYDPNRNRWACVTEMNNGMVPFIGVVYDGKWFLKGLDSHRQVTSEVYLPSSNTWSAIDDEMVTGWRNPSISFNGRLYSADCRDGCKLRVYDENTGTWTRFMDSKHHLGSSRAFEAAALVSLNGKLCVIRNNMSITLVDVSNPTMSVETDSARMWETVVRKGQHRSFVANLWSSIAGRNLKSHIIHCHVLQV

SEQ ID NO: 17630 - protein, 386 aa, Zea mays subsp. mays
  peptide (1)..(386): Ceres Seq. ID no. 13498191
MQPEVKQNKRKSRGSKKERCRTQAPLLPGLPDDLAIACLIRVPRLEQPKLRMVCKRWNRLLSGNYFYSLRKKIGVAEEWVYVFKRDREGKISWYAFDPLHQLWKSLPPVPQEYSEALGFGCAVLSGCYLYLFGGKDPLRGSMRRVVFYNARTNKWHRAPDMMRKRHFFGSCVINNCLYVAGGECEGIQRTLQSAEVYDPNRNRWACVTEMNNGMVPFIGVVYDGKWFLKGLDSHRQVTSEVYLPSSNTWSAIDDEMVTGWRNPSISFNGRLYSADCRDGCKLRVYDENTGTWTRFMDSKHHLGSSRAFEAAALVSLNGKLCVIRNNMSITLVDVSNPTMSVETDSARMWETVVRKGQHRSFVANLWSSIAGRNLKSHIIHCHVLQV

SEQ ID NO: 17631 - DNA, 1974 bp, Zea mays subsp. mays
  misc_feature (1)..(1974): Ceres Seq. ID no. 12366224
  misc_feature (1)..(1974): Ortholog of  Ceres SEQ ID NO 13593889 as cited in SEQ ID NO 53305
  misc_feature (1)..(1974): Ortholog of  Ceres SEQ ID NO 13581959 as cited in SEQ ID NO 56156
  misc_feature (1)..(1974): Ortholog of  Ceres SEQ ID NO 15171809 as cited in SEQ ID NO 57329
gcacgagaccattacctagaacatcctaatcgaaaacttcgtcttctgtcactgtcccacactcctatcattctcgccttcgacttcccaggagcgcccagcgccgcggagcttctagaacacgcgactggggcgagctagacgaagctaaggaggcgcgaggggtgacgatgcggggcaggtgacggtgcggcgtggtggaggcgggacagaggccgggggatggtggcggcggagggtgggcccgtcgaggagggcgtcggggagagctcgtccccgccgcgcgtagacgcagccccagcgccctctggctccgttgggagcgggggcagaggaggcgccagcgacatctgcgccgaggtgctcgagcgcctcgtcgccgacggccacgcggaggcgtccgaccccgagttccgcgacaggctcgccgcacatttcgggcggctcccgcacagctatcagctggatatcaatgttgacaaagcaaccgatgtcttggtccaccagaatgtcttagcggaagcaaaggatcctgataggcgccctgcattctatgttcgtttcttgaggattgaagatattgatcctgcaaacgactccgatgcatctgaagaaggggatggtgatggtgatgatctctctgtaaggcaggacacaccatatactcacattcatgaggtagtattctccacaatcgacaagccaaagctccttagtcagctatctgcattgctatctgacattggattgaacatcagagaagcacatgttttctctactcatgatggctattctcttgatgttttcgttgttgatggctggcccattaaggatactgatggtttgcacaaagcactggaagcatccattttaagaaatgagggttcatggtctggttcatctcattcgtcagcagctgaaagaacactgcccttccaagttaaaggtggtgaatgggaaatcgataaacgacttctgaagatgggagggttgattgcttctggttcttgtggggacttgtatcacgggacttacctcggtgaggatgtagctgttaaagttctaagagctgagcatttgaataagaatgtttggaacgaatttactcaagaagtatatatactaagagaagttcaacatacaaatgttgtgcgattcattggtgcttgcacaaaaccaccacaattttgcataattacagaatacatgtctggaggaagcttatatgactttgtgcacaagcagcataacgttctaaacctcacgactctattgaagtttgcagttgatgtatgccgagggatgtgctacttgcatgaaaggggtatcatccatagagacttaaagactgccaaccttctaatggacaacgatcatgctgtgaaagtggctgattttggcgtagctcggttccaggatcaaggaggtatcatgacagctgaaactggaacatacagatggatggcgcctgaggttataaaccaccaaccctatgatagcaaagcagatgtgttcagctttgccattgttctctgggagctgataacgtccaagatcccatatgataccatgacccctctccaagcggctgtaggtgtgagacaggggttgcgcccaggacttccgaagaagacgcacccaaagctgttggacttgatgcagagatgttgggaagcagatccatccgaccggcctgctttctcggacattttagccgaactggaggatcttttggcacaagctcagggaacatcgggaaagacggtccaagatccatcaaactcgaacgcgaaagattaacccccatgccatgcacatacctgacattttttctcaatccagtgatttgccacatctaggattcgagttgccaattatgaggaaatttgttttgcttgtgtacattcgaacaatcttcttggggcctattttttatgggcacctcattattcttatacaaaagaaattgggccc

SEQ ID NO: 17632 - protein, 525 aa, Zea mays subsp. mays
  peptide (1)..(525): Ceres Seq. ID no. 12366225
MVAAEGGPVEEGVGESSSPPRVDAAPAPSGSVGSGGRGGASDICAEVLERLVADGHAEASDPEFRDRLAAHFGRLPHSYQLDINVDKATDVLVHQNVLAEAKDPDRRPAFYVRFLRIEDIDPANDSDASEEGDGDGDDLSVRQDTPYTHIHEVVFSTIDKPKLLSQLSALLSDIGLNIREAHVFSTHDGYSLDVFVVDGWPIKDTDGLHKALEASILRNEGSWSGSSHSSAAERTLPFQVKGGEWEIDKRLLKMGGLIASGSCGDLYHGTYLGEDVAVKVLRAEHLNKNVWNEFTQEVYILREVQHTNVVRFIGACTKPPQFCIITEYMSGGSLYDFVHKQHNVLNLTTLLKFAVDVCRGMCYLHERGIIHRDLKTANLLMDNDHAVKVADFGVARFQDQGGIMTAETGTYRWMAPEVINHQPYDSKADVFSFAIVLWELITSKIPYDTMTPLQAAVGVRQGLRPGLPKKTHPKLLDLMQRCWEADPSDRPAFSDILAELEDLLAQAQGTSGKTVQDPSNSNAKD

SEQ ID NO: 17633 - protein, 272 aa, Zea mays subsp. mays
  peptide (1)..(272): Ceres Seq. ID no. 12366226
MGGLIASGSCGDLYHGTYLGEDVAVKVLRAEHLNKNVWNEFTQEVYILREVQHTNVVRFIGACTKPPQFCIITEYMSGGSLYDFVHKQHNVLNLTTLLKFAVDVCRGMCYLHERGIIHRDLKTANLLMDNDHAVKVADFGVARFQDQGGIMTAETGTYRWMAPEVINHQPYDSKADVFSFAIVLWELITSKIPYDTMTPLQAAVGVRQGLRPGLPKKTHPKLLDLMQRCWEADPSDRPAFSDILAELEDLLAQAQGTSGKTVQDPSNSNAKD

SEQ ID NO: 17634 - DNA, 437 bp, Zea mays subsp. mays
  misc_feature (1)..(437): Ceres Seq. ID no. 2790081
  misc_feature (1)..(437): Ortholog of  Ceres SEQ ID NO 13502858 as cited in SEQ ID NO 65109
aaccttaaaagtggaattggttccaatctcacccccccgcgcgctgcagtgtgcaggccctgccgtctgccgcaaaagagagcactaggaaaagaagtgctgcggcgttgcgaggtgggggacgaggacgaggccagaacgccccaaaaccaaaaacccccagaaccccgacctagggttacgccatcgccatgggatctgttgcctccgccgctgtgccaccacctcctcctcaatcagcgctgcctcaggcgggcgcgccgccctacgggcccgggctcgccgggatcctcccgcagatgtcgaagggggaggagaagaaggatgagaaggtggactacctcaacctcccctgccccgtgcccttcgaggagatccagcgcgaggctctcatgtctttgaagcctgaactttttgaaggattgaggtttgacttc

SEQ ID NO: 17635 - protein, 133 aa, Zea mays subsp. mays
  peptide (1)..(133): Ceres Seq. ID no. 2790082
NLKSGIGSNLTPPRAAVCRPCRLPQKRALGKEVLRRCEVGDEDEARTPQNQKPPEPRPRVTPSPWDLLPPPLCHHLLLNQRCLRRARRPTGPGSPGSSRRCRRGRRRRMRRWTTSTSPAPCPSRRSSARLSCL

SEQ ID NO: 17636 - protein, 82 aa, Zea mays subsp. mays
  peptide (1)..(82): Ceres Seq. ID no. 2790083
MGSVASAAVPPPPPQSALPQAGAPPYGPGLAGILPQMSKGEEKKDEKVDYLNLPCPVPFEEIQREALMSLKPELFEGLRFDF

SEQ ID NO: 17637 - DNA, 1529 bp, Zea mays subsp. mays
  misc_feature (1)..(1529): Ceres Seq. ID no. 12366273
  misc_feature (1)..(1529): Ortholog of  Ceres SEQ ID NO 14311854 as cited in SEQ ID NO 51455
  misc_feature (1)..(1529): Ortholog of  Ceres SEQ ID NO 14313097 as cited in SEQ ID NO 58902
cactccgtaaaaccacaggaaacctcacacgtcttcctccgtccagcctgtctccggccggccccccgccttccttaactccgcatcatccccttccaatctcgtcttcccagcacccgaaccgatcaaattcacttccgctcgattctccgggagggggagggtagctgaaggacatcccggggacgcaatgcgcgtcctcgccgtgttcctcctcggcgcagcgttcgcggcggcggccggaggcggcggggagcttccggagttccgggaagctccggcgttccgcaacggcgcagcctgcgcggacgcgccgacgatccacatcgcgatgacgctggacggcacctacctgcggggctccctcgccggcgtcctctccgtgctccgccacgccgcctgtccggagtccgtcgccttccacttcgtcgcctcctcggcctccccggcgcgccgcctcgcctcgctccgccgtgcgctggcggctgccttccccacgctcccggccaccgtgcatcgcttcgacgcacgcctcgtccggggcaagatctcctcatccgtccggcgcgcgctcgaccagcccctcaactacgcccgcatctacctcgcggacctcctgccgcgctccgtctcccgcgtgctctacctcgactccgacctcctcgtggtcgacgacgtggcccgcctctgggcgaccgacctcggccccgacgccgccctcgntgcccccgagtactgccacgccaactttacctcctatttcaccgacgcgttctggagccaccccgagtacaccgccgtcttcgccaaccggacgcgcgtcccctgctacttcaacaccggggtaatggtcatcgacctggacaggtggcgctccggtgggtacaccgcgaagctggaatactggatggaggtgcagaagcaggaggccaggatttacgagctgggctccctcccgccgtttctcctggtgttcgccggcgaggtgaaagccgtggagcaccggtggaaccagcacgggctcggcggcgacaacgtggcggggcagtgccggcagctgcaccccggtccggttagcctgctgcactggagtgggaaggggaagccgtggctgcggctggacgccgggcggccgtgcccgctcgacgcgctctggatgccctacgacctccttcgccgccgcggcgctcgggacgatctcctcgccgccgtctcctgacaatgctgtccgcgcatcgctgcagggcgatcgatttgctcgcgtccgatcggatcatatgccacggcgcttggctgctccgctcgttccgtcgtcccacgggtcggcgtcggtcaccaagtcacagacacgttggacccacctggacactctcctctccgcatgggtccatgcgcaatggcgttagttggtgtggccctgtcggtactgaagtccgtcggccccactcgttggtggcggatggggatttttggggtgggggccaaggtgaaattcagacatggggctgtgtacagctgttgtttttggc

SEQ ID NO: 17638 - protein, 342 aa, Zea mays subsp. mays
  peptide (1)..(342): Ceres Seq. ID no. 12366274
  misc_feature (178)..(178): Xaa is any aa, unknown or other
MRVLAVFLLGAAFAAAAGGGGELPEFREAPAFRNGAACADAPTIHIAMTLDGTYLRGSLAGVLSVLRHAACPESVAFHFVASSASPARRLASLRRALAAAFPTLPATVHRFDARLVRGKISSSVRRALDQPLNYARIYLADLLPRSVSRVLYLDSDLLVVDDVARLWATDLGPDAALXAPEYCHANFTSYFTDAFWSHPEYTAVFANRTRVPCYFNTGVMVIDLDRWRSGGYTAKLEYWMEVQKQEARIYELGSLPPFLLVFAGEVKAVEHRWNQHGLGGDNVAGQCRQLHPGPVSLLHWSGKGKPWLRLDAGRPCPLDALWMPYDLLRRRGARDDLLAAVS

SEQ ID NO: 17639 - protein, 295 aa, Zea mays subsp. mays
  peptide (1)..(295): Ceres Seq. ID no. 12366275
  misc_feature (131)..(131): Xaa is any aa, unknown or other
MTLDGTYLRGSLAGVLSVLRHAACPESVAFHFVASSASPARRLASLRRALAAAFPTLPATVHRFDARLVRGKISSSVRRALDQPLNYARIYLADLLPRSVSRVLYLDSDLLVVDDVARLWATDLGPDAALXAPEYCHANFTSYFTDAFWSHPEYTAVFANRTRVPCYFNTGVMVIDLDRWRSGGYTAKLEYWMEVQKQEARIYELGSLPPFLLVFAGEVKAVEHRWNQHGLGGDNVAGQCRQLHPGPVSLLHWSGKGKPWLRLDAGRPCPLDALWMPYDLLRRRGARDDLLAAVS

SEQ ID NO: 17640 - DNA, 489 bp, Zea mays subsp. mays
  misc_feature (1)..(489): Ceres Seq. ID no. 1677695
  misc_feature (1)..(489): Ortholog of  Ceres SEQ ID NO 12578315 as cited in SEQ ID NO 62451
  misc_feature (1)..(489): Ortholog of  Ceres SEQ ID NO 13584577 as cited in SEQ ID NO 65298
acgaaaatctgacatctcatcttgatccatccagctttgcctcgatcgccggccggtagccatgtcccccacggaagaagccgctggtggtggtctcgacgactatgaccgcttgagcgagctgaaggcgttcgacgacagcaaggccggcgtcaagggcctcgtggacgctggcgtcacgaccatccctgccatcttccgcggccatctccttcaggaagggccgaagtcgcacgggaggaggtggtcgcccagtygaaggctgcagccgagacggtggggttcttccagctggtgaaccacggcgttcccagcgagctcctgtccgagatgctggcgtcggtgaggcggttcaacgaggagccccacgaggtgaagcggccctactacacgcgggacgcacgtcgcaaggtgcggttcaactccaacttcgatctgttccagtcgccggcggccaactggcgcgacacgctcttctgcgaggcagcg

SEQ ID NO: 17641 - protein, 78 aa, Zea mays subsp. mays
  peptide (1)..(78): Ceres Seq. ID no. 1677696
  misc_feature (66)..(66): Xaa is any aa, unknown or other
MSPTEEAAGGGLDDYDRLSELKAFDDSKAGVKGLVDAGVTTIPAIFRGHLLQEGPKSHGRRWSPSXRLQPRRWGSSSW

SEQ ID NO: 17642 - protein, 53 aa, Zea mays subsp. mays
  peptide (1)..(53): Ceres Seq. ID no. 1677697
MLASVRRFNEEPHEVKRPYYTRDARRKVRFNSNFDLFQSPAANWRDTLFCEAA

SEQ ID NO: 17643 - DNA, 2290 bp, Zea mays subsp. mays
  misc_feature (1)..(2290): Ceres Seq. ID no. 12375158
  misc_feature (1)..(2290): Ortholog of  Ceres SEQ ID NO 14303173 as cited in SEQ ID NO 66550
gcacgagaccattacctagaacatcctaatcgaaaaaccagtcagcactcagcacacagagtccgcctccgccgcggctccggcgcccgcatccgtctcaggagtcccttctccccgcgggtggagacatcttgatcatttctgagattaaactgatgatgctgatgctcgtttagttatcttggtttggagatatatcagatatgggtgatcggaatcatggacgctctctccctctactgctctatctacatcttttgctgccaatacttccgtttgctatggcagatatagcctccgagaagcaagcactccttgcttttgcctctgcagtctaccatggcaacaaactgaattggagccaaaatatcccagtgtgctcatggcatggtgtgacatgctcactggatcgatcgtgtatattggcccttagggtgccaggtgctggtttgattggtaccattcctgctgatactcttggcaggcttgtgtccctccaagttttaagcatgaggtctaaccgtttgagtggaagccttccgaacgatgttgtctcacttccttctttacaagccatatttgttcagcacaacgaactgtcaggagacttgcctccatttctctctccaaaccttaatacccttgatctctcttacaactcctttacaggacaaatcccatcaggtttgcagaatcttaccaaattgtctgtcttgaatttagcagaaaattccctgtccgggccgattccggatctcaaacttcctagcttaagacagctaaatctgagcaacaatgaactgaatggttcgattcctccctttttccaaatcttctcaaatagttccttcctagggaactctggattgtgtggaccgccgctaactgaatgttcttttctatcttcaccaacaccgtcgcaagtgccttcaccaccaaaattaccaaatcatgagaagaaggctggcaatggcttggtaatcgtggctgttgctgggagctttgtcatatttctgctagctgctgtgatgttcactatgtgcatttcaaagaggaaggagaagaaagacgaagcgggttacaacggtaaggttactgatggtggaaggattgagaagcgcaaagaggatctcagcagtggcgtccaaatggcgcataagaacaagttagttttcttggagggatgcagttacaactttgacttggaggacttgctgagagcttctgctgaagttctcgggaaagggagctatggaactgcctacaaggctatactcgaggatggctctactgtggtagtcaagaggctaaaggatgtcgtggcagggaagaaagaatttgagcagcagatggagctcatagggagggtaggtaaacatgcaaacatcgcgcctattcgtgcttactactactcgaaggatgagaagcttgttgtttatgagtatattggtagaggcagcttctcagctctgttgcatggtatcaagggcgtgtgtgagaagaccccattagattggaacacaaggatgaagattatactcggaacagcacgcggcctcgagcacatccattcagaaggcggctccaggctcgcacacggcaacatcaagtcaaccaacgttctgctcgacggagaccacaacccttacgtctcagactacgggctgagctcgttgacgagccttccgatcaccacttcccgagctgtcgctggctaccgagctcaggagaccttcgaatcgaggaagttcacccacaagtccgacgtgtacggtttcggcgtcctcctcatggagacgctgacgggcaaggccccgcttcagtcacagggtcaggacgacgccgtcgacctaccgaggtgggtgcattcggtggtccgcgaggagtggaccgctgaggtgtttgacgtccagctgatgaagtatcccaacatagaagacgagctggtccagatgctccgtatcgccatggcgtgcacggcgtggtctcccgaccggcgtccgacgatggcgcaggtggttaggatggtggaggagctccggcactctgcttccgggagtcgcgctctctccgttggcagtcccaaggaatccagccctctgtcagcctgaattgtggttctgattcagaattcgtgtatccatgacatcgatgatcgatggtatcctgcatgtggttcacggtgcacacgttgtctgcctcgtcagatacttcgtactgctgtaactttggttcaatggaatgcttaagaaacaaggtcggaataggcgaatagctattttcgtctttc

SEQ ID NO: 17644 - protein, 635 aa, Zea mays subsp. mays
  peptide (1)..(635): Ceres Seq. ID no. 12375159
MGDRNHGRSLPLLLYLHLLLPILPFAMADIASEKQALLAFASAVYHGNKLNWSQNIPVCSWHGVTCSLDRSCILALRVPGAGLIGTIPADTLGRLVSLQVLSMRSNRLSGSLPNDVVSLPSLQAIFVQHNELSGDLPPFLSPNLNTLDLSYNSFTGQIPSGLQNLTKLSVLNLAENSLSGPIPDLKLPSLRQLNLSNNELNGSIPPFFQIFSNSSFLGNSGLCGPPLTECSFLSSPTPSQVPSPPKLPNHEKKAGNGLVIVAVAGSFVIFLLAAVMFTMCISKRKEKKDEAGYNGKVTDGGRIEKRKEDLSSGVQMAHKNKLVFLEGCSYNFDLEDLLRASAEVLGKGSYGTAYKAILEDGSTVVVKRLKDVVAGKKEFEQQMELIGRVGKHANIAPIRAYYYSKDEKLVVYEYIGRGSFSALLHGIKGVCEKTPLDWNTRMKIILGTARGLEHIHSEGGSRLAHGNIKSTNVLLDGDHNPYVSDYGLSSLTSLPITTSRAVAGYRAQETFESRKFTHKSDVYGFGVLLMETLTGKAPLQSQGQDDAVDLPRWVHSVVREEWTAEVFDVQLMKYPNIEDELVQMLRIAMACTAWSPDRRPTMAQVVRMVEELRHSASGSRALSVGSPKESSPLSA

SEQ ID NO: 17645 - protein, 609 aa, Zea mays subsp. mays
  peptide (1)..(609): Ceres Seq. ID no. 12375160
MADIASEKQALLAFASAVYHGNKLNWSQNIPVCSWHGVTCSLDRSCILALRVPGAGLIGTIPADTLGRLVSLQVLSMRSNRLSGSLPNDVVSLPSLQAIFVQHNELSGDLPPFLSPNLNTLDLSYNSFTGQIPSGLQNLTKLSVLNLAENSLSGPIPDLKLPSLRQLNLSNNELNGSIPPFFQIFSNSSFLGNSGLCGPPLTECSFLSSPTPSQVPSPPKLPNHEKKAGNGLVIVAVAGSFVIFLLAAVMFTMCISKRKEKKDEAGYNGKVTDGGRIEKRKEDLSSGVQMAHKNKLVFLEGCSYNFDLEDLLRASAEVLGKGSYGTAYKAILEDGSTVVVKRLKDVVAGKKEFEQQMELIGRVGKHANIAPIRAYYYSKDEKLVVYEYIGRGSFSALLHGIKGVCEKTPLDWNTRMKIILGTARGLEHIHSEGGSRLAHGNIKSTNVLLDGDHNPYVSDYGLSSLTSLPITTSRAVAGYRAQETFESRKFTHKSDVYGFGVLLMETLTGKAPLQSQGQDDAVDLPRWVHSVVREEWTAEVFDVQLMKYPNIEDELVQMLRIAMACTAWSPDRRPTMAQVVRMVEELRHSASGSRALSVGSPKESSPLSA

SEQ ID NO: 17646 - protein, 533 aa, Zea mays subsp. mays
  peptide (1)..(533): Ceres Seq. ID no. 12375161
MRSNRLSGSLPNDVVSLPSLQAIFVQHNELSGDLPPFLSPNLNTLDLSYNSFTGQIPSGLQNLTKLSVLNLAENSLSGPIPDLKLPSLRQLNLSNNELNGSIPPFFQIFSNSSFLGNSGLCGPPLTECSFLSSPTPSQVPSPPKLPNHEKKAGNGLVIVAVAGSFVIFLLAAVMFTMCISKRKEKKDEAGYNGKVTDGGRIEKRKEDLSSGVQMAHKNKLVFLEGCSYNFDLEDLLRASAEVLGKGSYGTAYKAILEDGSTVVVKRLKDVVAGKKEFEQQMELIGRVGKHANIAPIRAYYYSKDEKLVVYEYIGRGSFSALLHGIKGVCEKTPLDWNTRMKIILGTARGLEHIHSEGGSRLAHGNIKSTNVLLDGDHNPYVSDYGLSSLTSLPITTSRAVAGYRAQETFESRKFTHKSDVYGFGVLLMETLTGKAPLQSQGQDDAVDLPRWVHSVVREEWTAEVFDVQLMKYPNIEDELVQMLRIAMACTAWSPDRRPTMAQVVRMVEELRHSASGSRALSVGSPKESSPLSA

SEQ ID NO: 17647 - DNA, 3580 bp, Zea mays subsp. mays
  misc_feature (1)..(3580): Ceres Seq. ID no. 12366227
  misc_feature (1)..(3580): Ortholog of  Ceres SEQ ID NO 15170741 as cited in SEQ ID NO 58530
gcacgagaccattacctagaacatcctaatcgaaaaatcaatctctttcgctgcttgctttccattgaaaatgatgtgttctcccacaccctgcaacctgaaggcaacatgcctagcacaaaattctcccaaggattcccatggtttcctagcccaagatgtgcatggagccttgcttcttgatctccagcagaacagaagtgaagcactgtggccttgcatgcccaagttttgttgttagcgttaccaagatcatagctaccactgatgcagtgcgttcgcgatgaactgtgtagagcaggttctgaagagagtgttacctgcatctgcatggaagagggaggagacccgcagcttccgagcatctccgtggcacgcaccacgtccgaaggcgcgggggccgtcgacttggatctccttgagcagctactgtccggcgacaacggttggctcgaggtggtctcgcgctcgcccaactcggtagcgtttcctccaccctcggccttcttctcggctgacgcgacggccaccacagtgacgacgacggcggcgccggccgcgaacgccagctggttgattcagacgggcggcgcgagcaccccctccgtgcgggagcggttcagccaggccctgtcctacatccgtgatacgcagagcgacggcgacgtcctcgtgcagctctgggtgccggtcaaccgcgatgacgggaagctggtgctgaccaccagcggtcagccgttcacgctcgaccaccgctccgacagcctcatccggttcagggaggtgtccaccaagtaccagttcccagccgacgttaggtcaggggagtcaccagggttgccagggagggtcttcatcggcaggctccctgagtggtcgccggacatcaggtgcttcaccagctacgagtacgccagggtgacagatgcaaagtacctcgatgtccacggcaccatggggctgccagtgttcgagaaaagaagttacagttgcctgggcgttatcgagctgatcatgacaaagcagaagctcaacttcacctctgagctcaacaccatctgcagtgctctacaggcagttaatctcagaagtacagaagtttcgagcattccacgcaaaaagtttagcactgcttcctacaaagatgctttaccagagatactggaggtcctgagggcagcctgcttgacccacaagctgccattagctcagacatgggtcacatgtactcaacaagggaaacgaggcagccgacattctgacgagaactacaggtactgcatttccaccatcgacgaagcatgctttgtgaatgaagccgagatgcggggcttccatgaggcctgctccgaacaccatctgctgcgtggcgagggggtggcagggaaggccctcacgacaaaccagccatgcttcctgccggacattggatcctcaactaaattggaataccccttgtctcaccatgctaagatcttcaggttaaaaggtgcagtggcgatccgactgcggtgcacacgcactgggatagcagacttcgtgctggaattctttcttccaacagattgtgaagcactggaggagcagaagacagtgctggactccttgtcaggcaccatgcgaagtgtttgccagaccctacgtgtggtcacagatagagagatggaaggcgaagcggcgctggaaatgaacgagctgaactcttttactcctcctgagaaggacaaagatgagttgtcctttggaggcaattcagcagatcgtagaggggcctcttggacaagtctggcaggaacttcacagcaagaacccgagttagctgcattgcggatgcatggaacgttctcacctgtggggcagggtccatctctatctggtgttcaggcaactgctgaaggcagtaagacaaaaaggcgcacaaaggccgagaagaccgttagtttgcaggttcttcggcagtacttcgctggtagcctcaaagatgcagcgagaagccttggagtgtgtcccacgaccctcaaaagaatatgcaggcaacatggtataacccgctggccatcacgaaagatcaagaaggtagaccactctctaagaaagctccaacagatcattgattcggttcatggtgcagagacagctttccagctaaacaccctgtacaaggatctcacagacacctcaatatcatctgacaacaatttgtcaggaagtgtcacggttcctccaactaaccagagcaatctcaccgacttcaacaagcaccaaccccacaagtcaagtagcaatatgccatcaacttcacactcacactcctcatgcagccacggttctcagtcaagcccctcgtgtagcgttggtgcaacagaacatgcacaacagggtataattgatctgatgaagtcagaaaatcctgtgaaagacagctctattcagactatgcaaacagaaaacacttcattatatgagcatttctcagttcatgaggctccaattgatcttctacaggatgttactgaaaaggctaatggtgcacatcattcttctcgaagcctgtcatcccccaaccccaagcagaacacagatgcaaatatgagagtaaaggcaacatttggctcagaaaaggtgagattccgactaaacccagagtgcaattttcaaggactgaagcatgagctagcgaaacgtttgagtatagtagacacaaaccccttggttttaaagtacttggatgatgattcagaatgggtcttgatgacatgtgatgcagatctgcaggagtgccttcatgtatacaaactagcagatatccaaacaatcaaaatttcagttcatttagctgttagtccagctacaagggtcacagctggtcacactggtttgtcatgacaacagtatgagcctcaccactttgtgaggtttaatcaaattcaaccaggatcacatggttttgtgcaggggaaaccaaagattccaggagtccagggttggtagctgtgcaatactgcaatgtactatgtaccaccacgtcccagttctactgttagatcaattagtcttgtttctgatgctcaggttaggaactaatgatcaaacaagaatacttgacaatgagagagtcaagaaatcaggataaacagaagtaagcatgcattgcttgtaaatacttattgatgaacctgaatctctgaatgacaatgcaattgattgaattaatagggtgacgtatctacaaatcagatttgctccaactccaagtatgttttgtttctttgagtgctgatgtgcaacaatcattgatggcttctttctgataattgatcagctacaattgtcccttaagatcacagcattccttcatcgcctgagcgatcagcatgctctgttcaatgcacatgaaattctgcttctgaaattgtaattttctgcagcaaggattagatctagaataggatgataggatacttagtttgttcaatatgtttgtccattgcaaaaaaaataaaaaatgaatggtacactgaattatgggcctctttgaaagaacgtctgctgctgtagacattatagattgttttccttt

SEQ ID NO: 17648 - protein, 872 aa, Zea mays subsp. mays
  peptide (1)..(872): Ceres Seq. ID no. 12366228
MQCVRDELCRAGSEESVTCICMEEGGDPQLPSISVARTTSEGAGAVDLDLLEQLLSGDNGWLEVVSRSPNSVAFPPPSAFFSADATATTVTTTAAPAANASWLIQTGGASTPSVRERFSQALSYIRDTQSDGDVLVQLWVPVNRDDGKLVLTTSGQPFTLDHRSDSLIRFREVSTKYQFPADVRSGESPGLPGRVFIGRLPEWSPDIRCFTSYEYARVTDAKYLDVHGTMGLPVFEKRSYSCLGVIELIMTKQKLNFTSELNTICSALQAVNLRSTEVSSIPRKKFSTASYKDALPEILEVLRAACLTHKLPLAQTWVTCTQQGKRGSRHSDENYRYCISTIDEACFVNEAEMRGFHEACSEHHLLRGEGVAGKALTTNQPCFLPDIGSSTKLEYPLSHHAKIFRLKGAVAIRLRCTRTGIADFVLEFFLPTDCEALEEQKTVLDSLSGTMRSVCQTLRVVTDREMEGEAALEMNELNSFTPPEKDKDELSFGGNSADRRGASWTSLAGTSQQEPELAALRMHGTFSPVGQGPSLSGVQATAEGSKTKRRTKAEKTVSLQVLRQYFAGSLKDAARSLGVCPTTLKRICRQHGITRWPSRKIKKVDHSLRKLQQIIDSVHGAETAFQLNTLYKDLTDTSISSDNNLSGSVTVPPTNQSNLTDFNKHQPHKSSSNMPSTSHSHSSCSHGSQSSPSCSVGATEHAQQGIIDLMKSENPVKDSSIQTMQTENTSLYEHFSVHEAPIDLLQDVTEKANGAHHSSRSLSSPNPKQNTDANMRVKATFGSEKVRFRLNPECNFQGLKHELAKRLSIVDTNPLVLKYLDDDSEWVLMTCDADLQECLHVYKLADIQTIKISVHLAVSPATRVTAGHTGLS

SEQ ID NO: 17649 - protein, 851 aa, Zea mays subsp. mays
  peptide (1)..(851): Ceres Seq. ID no. 12366229
MEEGGDPQLPSISVARTTSEGAGAVDLDLLEQLLSGDNGWLEVVSRSPNSVAFPPPSAFFSADATATTVTTTAAPAANASWLIQTGGASTPSVRERFSQALSYIRDTQSDGDVLVQLWVPVNRDDGKLVLTTSGQPFTLDHRSDSLIRFREVSTKYQFPADVRSGESPGLPGRVFIGRLPEWSPDIRCFTSYEYARVTDAKYLDVHGTMGLPVFEKRSYSCLGVIELIMTKQKLNFTSELNTICSALQAVNLRSTEVSSIPRKKFSTASYKDALPEILEVLRAACLTHKLPLAQTWVTCTQQGKRGSRHSDENYRYCISTIDEACFVNEAEMRGFHEACSEHHLLRGEGVAGKALTTNQPCFLPDIGSSTKLEYPLSHHAKIFRLKGAVAIRLRCTRTGIADFVLEFFLPTDCEALEEQKTVLDSLSGTMRSVCQTLRVVTDREMEGEAALEMNELNSFTPPEKDKDELSFGGNSADRRGASWTSLAGTSQQEPELAALRMHGTFSPVGQGPSLSGVQATAEGSKTKRRTKAEKTVSLQVLRQYFAGSLKDAARSLGVCPTTLKRICRQHGITRWPSRKIKKVDHSLRKLQQIIDSVHGAETAFQLNTLYKDLTDTSISSDNNLSGSVTVPPTNQSNLTDFNKHQPHKSSSNMPSTSHSHSSCSHGSQSSPSCSVGATEHAQQGIIDLMKSENPVKDSSIQTMQTENTSLYEHFSVHEAPIDLLQDVTEKANGAHHSSRSLSSPNPKQNTDANMRVKATFGSEKVRFRLNPECNFQGLKHELAKRLSIVDTNPLVLKYLDDDSEWVLMTCDADLQECLHVYKLADIQTIKISVHLAVSPATRVTAGHTGLS

SEQ ID NO: 17650 - protein, 643 aa, Zea mays subsp. mays
  peptide (1)..(643): Ceres Seq. ID no. 12366230
MGLPVFEKRSYSCLGVIELIMTKQKLNFTSELNTICSALQAVNLRSTEVSSIPRKKFSTASYKDALPEILEVLRAACLTHKLPLAQTWVTCTQQGKRGSRHSDENYRYCISTIDEACFVNEAEMRGFHEACSEHHLLRGEGVAGKALTTNQPCFLPDIGSSTKLEYPLSHHAKIFRLKGAVAIRLRCTRTGIADFVLEFFLPTDCEALEEQKTVLDSLSGTMRSVCQTLRVVTDREMEGEAALEMNELNSFTPPEKDKDELSFGGNSADRRGASWTSLAGTSQQEPELAALRMHGTFSPVGQGPSLSGVQATAEGSKTKRRTKAEKTVSLQVLRQYFAGSLKDAARSLGVCPTTLKRICRQHGITRWPSRKIKKVDHSLRKLQQIIDSVHGAETAFQLNTLYKDLTDTSISSDNNLSGSVTVPPTNQSNLTDFNKHQPHKSSSNMPSTSHSHSSCSHGSQSSPSCSVGATEHAQQGIIDLMKSENPVKDSSIQTMQTENTSLYEHFSVHEAPIDLLQDVTEKANGAHHSSRSLSSPNPKQNTDANMRVKATFGSEKVRFRLNPECNFQGLKHELAKRLSIVDTNPLVLKYLDDDSEWVLMTCDADLQECLHVYKLADIQTIKISVHLAVSPATRVTAGHTGLS

SEQ ID NO: 17651 - DNA, 2511 bp, Zea mays subsp. mays
  misc_feature (1)..(2511): Ceres Seq. ID no. 12361105
  misc_feature (1)..(2511): Ortholog of  Ceres SEQ ID NO 14308455 as cited in SEQ ID NO 55108
  misc_feature (1)..(2511): Ortholog of  Ceres SEQ ID NO 14316344 as cited in SEQ ID NO 60120
gcacgagaccattacctagaacatcctaatcgaaaaaccaatccgactctcgtccctccccgactcaccccactgcccagccgcacgcgccgccgtgtgttcgcgctctctcccactgtgtctgtgacgactgggtaggctacagccgccgcccgtcgccaggtgccgatcccttcgccgacgaagagcatccaccaggctccggccaagggcgtgatggcggctgtagggagcttgcagccgggggtggagactctacatgtgcaggattacaaggacgcgcctccagccaaggctgtggcggccgcggtagagagcttgcagccggcgatggagagcctacatgtgcaggaattcaaggacgcggctccggctaagggcgtttccgccgctgctgtagggagcttgcagccggggatggagaacctgcaggtgcaggattacaaggacgctagcatgtattatggtgcttacccggcttatccctatggagcaccctatggtggctggggggagtactccacatacttgagccatgatggagcacagacaccaactgctggcgcgtatgctgacatgtactatggccatgctgcatatggtcatatttatgggtctcagaattaccagtatccatcgacctacagcaagcaacagaattccactgccaagctgtcgtccaatggtaaaagtgagaaattggctccagctccggaaggggatgtctccactattgttgttgatgaggtgaaagtcctgaaaaatccaaacccgaccctgaaggcagacaggaatgcaccaggttccaatggttcatatggccgatctagtgtgcgttctggtaactatcagaaccagactagttggtcacactatccatattatagtagtgagatgttctctgacaagcagcaaaagtttaccagcaatcacaattcgactgctcccaatgataaaaccaaggggcagtcgaggaaccaaaacacgagacagtatcctcatctcatgggtctgcaaacaccaacttccccatcagtttactcagctaatggaatatatcggtatgatggcagctatggacctagcctttggtatggatcacacatgtatagttctgggttatatggtggatggaattcactgtatgatgggaagtacagaaccagaggaagatgtaataatggctattatgcttatggtaatggaagccttgatggctttaatgagctgaaaagagggccaagaagtgggatgtacacaaaccagctggggcttggagctactactgaagtaccagcaaaagagcaggaccttctgtctgctaatggttcacatcctgccatgaaggaccagtataatcgggctgactttgcggaaacatactcagacgcaaaattcttcattatcaaatcatacagtgaagacgatgttcacaagagcgtaaagtacaatgtgtgggctagcactccaaatggtaataagaaacttgatgctgcctatcaagaggctaaagaaaaatcaagcgaaactcctgttttccttcttttctctgtgaatgcaagtggccagtttgttgggcttgctgagatggtgggtcgtgttgattttaacaaaacagtagatcattggcaacaggacaagtggactggttgtttccctgtcaagtggcacattgtgaaggatgttccaaacagtttgctgaagcacatcattctcgagaacaatgaaaacaagccagtgacaaacagcagagatacacatgaggtgaagcttgagcaaggccttcaagtgcttaaggttttcaaggatcatgtgtgcaagacatctatactggatgactttggcttttacgataatcgtgagaagatgatgcaatataggaaagcaaagcagcagcagtcactgaaaaaggtcatcgatgtgaaggtgcctaacgccactgacgcagatacaagtctcgtaggaactggatcaacggaactcaccaatgttgaggctgatgtcttgaacaaagagctttcattagacaaagcagtagagaaaaacgaggagaaaggaaatgatgtcgccccacaggacctgaaatcatcagctgagaagtcggcaagcccaaatggctgttaatttttttttttttggttagctcggccattgacagtggtatggggcgggaacctgaggctgggggttgtttgaggaaatcctgagatcccattgagcttgtttcttgcccttgttttctatagttcatagaggattagttagttgcttgtgtgtttgggtgataggtgaggtcagtgtcctggcatggcaggtatttaggaatagaaggacgattaactggggtttacaatggtggttcatgggtttgaggttgtgtttccatctatttgcctttcccctctctatattccagttcctacctctctagattctggacaaacgtagtgcttatttaatgctggctggtttaagaacctgaaatggacaaaggaatccaatcaagtgttt

SEQ ID NO: 17652 - protein, 635 aa, Zea mays subsp. mays
  peptide (1)..(635): Ceres Seq. ID no. 12361106
MAAVGSLQPGVETLHVQDYKDAPPAKAVAAAVESLQPAMESLHVQEFKDAAPAKGVSAAAVGSLQPGMENLQVQDYKDASMYYGAYPAYPYGAPYGGWGEYSTYLSHDGAQTPTAGAYADMYYGHAAYGHIYGSQNYQYPSTYSKQQNSTAKLSSNGKSEKLAPAPEGDVSTIVVDEVKVLKNPNPTLKADRNAPGSNGSYGRSSVRSGNYQNQTSWSHYPYYSSEMFSDKQQKFTSNHNSTAPNDKTKGQSRNQNTRQYPHLMGLQTPTSPSVYSANGIYRYDGSYGPSLWYGSHMYSSGLYGGWNSLYDGKYRTRGRCNNGYYAYGNGSLDGFNELKRGPRSGMYTNQLGLGATTEVPAKEQDLLSANGSHPAMKDQYNRADFAETYSDAKFFIIKSYSEDDVHKSVKYNVWASTPNGNKKLDAAYQEAKEKSSETPVFLLFSVNASGQFVGLAEMVGRVDFNKTVDHWQQDKWTGCFPVKWHIVKDVPNSLLKHIILENNENKPVTNSRDTHEVKLEQGLQVLKVFKDHVCKTSILDDFGFYDNREKMMQYRKAKQQQSLKKVIDVKVPNATDADTSLVGTGSTELTNVEADVLNKELSLDKAVEKNEEKGNDVAPQDLKSSAEKSASPNGC

SEQ ID NO: 17653 - protein, 597 aa, Zea mays subsp. mays
  peptide (1)..(597): Ceres Seq. ID no. 12361107
MESLHVQEFKDAAPAKGVSAAAVGSLQPGMENLQVQDYKDASMYYGAYPAYPYGAPYGGWGEYSTYLSHDGAQTPTAGAYADMYYGHAAYGHIYGSQNYQYPSTYSKQQNSTAKLSSNGKSEKLAPAPEGDVSTIVVDEVKVLKNPNPTLKADRNAPGSNGSYGRSSVRSGNYQNQTSWSHYPYYSSEMFSDKQQKFTSNHNSTAPNDKTKGQSRNQNTRQYPHLMGLQTPTSPSVYSANGIYRYDGSYGPSLWYGSHMYSSGLYGGWNSLYDGKYRTRGRCNNGYYAYGNGSLDGFNELKRGPRSGMYTNQLGLGATTEVPAKEQDLLSANGSHPAMKDQYNRADFAETYSDAKFFIIKSYSEDDVHKSVKYNVWASTPNGNKKLDAAYQEAKEKSSETPVFLLFSVNASGQFVGLAEMVGRVDFNKTVDHWQQDKWTGCFPVKWHIVKDVPNSLLKHIILENNENKPVTNSRDTHEVKLEQGLQVLKVFKDHVCKTSILDDFGFYDNREKMMQYRKAKQQQSLKKVIDVKVPNATDADTSLVGTGSTELTNVEADVLNKELSLDKAVEKNEEKGNDVAPQDLKSSAEKSASPNGC

SEQ ID NO: 17654 - protein, 568 aa, Zea mays subsp. mays
  peptide (1)..(568): Ceres Seq. ID no. 12361108
MENLQVQDYKDASMYYGAYPAYPYGAPYGGWGEYSTYLSHDGAQTPTAGAYADMYYGHAAYGHIYGSQNYQYPSTYSKQQNSTAKLSSNGKSEKLAPAPEGDVSTIVVDEVKVLKNPNPTLKADRNAPGSNGSYGRSSVRSGNYQNQTSWSHYPYYSSEMFSDKQQKFTSNHNSTAPNDKTKGQSRNQNTRQYPHLMGLQTPTSPSVYSANGIYRYDGSYGPSLWYGSHMYSSGLYGGWNSLYDGKYRTRGRCNNGYYAYGNGSLDGFNELKRGPRSGMYTNQLGLGATTEVPAKEQDLLSANGSHPAMKDQYNRADFAETYSDAKFFIIKSYSEDDVHKSVKYNVWASTPNGNKKLDAAYQEAKEKSSETPVFLLFSVNASGQFVGLAEMVGRVDFNKTVDHWQQDKWTGCFPVKWHIVKDVPNSLLKHIILENNENKPVTNSRDTHEVKLEQGLQVLKVFKDHVCKTSILDDFGFYDNREKMMQYRKAKQQQSLKKVIDVKVPNATDADTSLVGTGSTELTNVEADVLNKELSLDKAVEKNEEKGNDVAPQDLKSSAEKSASPNGC

SEQ ID NO: 17655 - DNA, 1670 bp, Zea mays subsp. mays
  misc_feature (1)..(1670): Ceres Seq. ID no. 12366280
  misc_feature (1)..(1670): Ortholog of  Ceres SEQ ID NO 12608463 as cited in SEQ ID NO 60238
gcacgagaccattacctagaacatcctaatcgaaaaccctgtgcagtggtccatattctgggcggcgatccgcaggcgggctacacacacatacatggcggcggagggcgccggaggccggggacgagccatgcggtacccgcctctgtcggcactcgtggtctccgccatcgcagccttctccgccgtgatcgtcctcgccgtcgtccactcggcgtacgacgacgccatgtcgcggacgcggacgctgctgggccacaacctggagccgacgccgtggcacccgttcccgcacgacaagggccggccgccggcgcgcgcggcgctgcggtgcgcgccctccatcgcctgcctgccgccgctatcaccgtcgtcgtcggtcgtcgccgccgcaaggtaacaagaagaagaagcagaagcagtgccctgcctacttcgctgccatccaccgggacctggctccgtggcgcgggcagggccggggcgtgacgcgcgcgctcctggacgaggcgcggcggcgcgcgtccatgcgcgtcaccatcacgggcggcgggcggcggctgcacgtggacctctactacgcctgcgtgcagagccgcgccctgttcacggtgtggagcctgctgcagctgatgcggcggtaccccgggcgcgtgcccgacgtggacctcatgttcgactgcatggaccgccccgccatcaaccggaccgagcacggggacggcgctctgccgccgccgccgctcttccgctactgcaccaccagggaccacttcgacatccccttccctgactggtccttctggggctggccggacacgaacatcgagccatggaaccacgagttcaagaacatcagggcgggcgccagggcaacgagatgggcggacagggtgccgacggcgtactggaagggcaacccggacgtggcgtcgccgctgcgggaggcgctgctgggctgcaacgacacggccctgtggcgcgccgagatcatgcgccagaactgggacgacgaggccaggtccggctaccagcactcgaggctctcggcgcagtgcacgcaccgctacaagatctacgccgagggattcgcgtggtcggtcagcctcaagtacatcctctcctgcggctccatggcgctgctcatcgagccgcgctaccaggacttcttcagccgcgggctggagccccgggtgaactactggccggtcgccgccctgggcatgtgcgagtccatccgggacgccgtcgactggggcaacgccaacccggacgaggccgagcgcgtcggcaggcgcgggcagaggctcgtgcaggacctccgcatgcacgccgtctacgactacatgctgcacctgctcaccgagtatgcgcgcctcctcatagaccaggaccacggcttgagcccgccgccccacgcgcaggaggcatgcgaggcatccctgctctgcctcgcagacgacaagcagcggaggttcctccacgcatccaaggcagaccccgcgccgggcgacccgtgcgtgctcccgccgccgtgatccctccccctccctctctctctaggatttctttctttctttatttatttatttattagactcaacagacagatcagaacgagttgggaggatttcaatgatggttctaaagcttctgacaaaagcatgttc

SEQ ID NO: 17656 - protein, 336 aa, Zea mays subsp. mays
  peptide (1)..(336): Ceres Seq. ID no. 12366281
MRVTITGGGRRLHVDLYYACVQSRALFTVWSLLQLMRRYPGRVPDVDLMFDCMDRPAINRTEHGDGALPPPPLFRYCTTRDHFDIPFPDWSFWGWPDTNIEPWNHEFKNIRAGARATRWADRVPTAYWKGNPDVASPLREALLGCNDTALWRAEIMRQNWDDEARSGYQHSRLSAQCTHRYKIYAEGFAWSVSLKYILSCGSMALLIEPRYQDFFSRGLEPRVNYWPVAALGMCESIRDAVDWGNANPDEAERVGRRGQRLVQDLRMHAVYDYMLHLLTEYARLLIDQDHGLSPPPHAQEACEASLLCLADDKQRRFLHASKADPAPGDPCVLPPP

SEQ ID NO: 17657 - protein, 301 aa, Zea mays subsp. mays
  peptide (1)..(301): Ceres Seq. ID no. 12366282
MRRYPGRVPDVDLMFDCMDRPAINRTEHGDGALPPPPLFRYCTTRDHFDIPFPDWSFWGWPDTNIEPWNHEFKNIRAGARATRWADRVPTAYWKGNPDVASPLREALLGCNDTALWRAEIMRQNWDDEARSGYQHSRLSAQCTHRYKIYAEGFAWSVSLKYILSCGSMALLIEPRYQDFFSRGLEPRVNYWPVAALGMCESIRDAVDWGNANPDEAERVGRRGQRLVQDLRMHAVYDYMLHLLTEYARLLIDQDHGLSPPPHAQEACEASLLCLADDKQRRFLHASKADPAPGDPCVLPPP

SEQ ID NO: 17658 - protein, 288 aa, Zea mays subsp. mays
  peptide (1)..(288): Ceres Seq. ID no. 12366283
MFDCMDRPAINRTEHGDGALPPPPLFRYCTTRDHFDIPFPDWSFWGWPDTNIEPWNHEFKNIRAGARATRWADRVPTAYWKGNPDVASPLREALLGCNDTALWRAEIMRQNWDDEARSGYQHSRLSAQCTHRYKIYAEGFAWSVSLKYILSCGSMALLIEPRYQDFFSRGLEPRVNYWPVAALGMCESIRDAVDWGNANPDEAERVGRRGQRLVQDLRMHAVYDYMLHLLTEYARLLIDQDHGLSPPPHAQEACEASLLCLADDKQRRFLHASKADPAPGDPCVLPPP

SEQ ID NO: 17659 - DNA, 1861 bp, Zea mays subsp. mays
  misc_feature (1)..(1861): Ceres Seq. ID no. 15176874
  misc_feature (1)..(1861): Ortholog of  Ceres SEQ ID NO 14301830 as cited in SEQ ID NO 62310
  misc_feature (1)..(1861): Ortholog of  Ceres SEQ ID NO 15179524 as cited in SEQ ID NO 0
acgaaggcaacgcgtgctgagggctgaggcagaaaaacgcggggaaacaagagggaaacgccgtgagaggtcgccgataggtgcgcgggtcgcggtcgtcgcctcctctgcctccctggcacttcggctcggctcggcaaacgcaacaacacggagcgggcgtggggagcggagcggagcggtgagcgaggatcgagggcaacgtggcgaggccacacgcccgagggggagaggcgactttgcttccagttccaggaaagagtgggctataaaaaggcgctcgagatccagatctgggccgatgcgaccgccctcgctgctctccctcaccctcgacgccgcgctcctccgcatcgccaatatcgccgacctctcccacctcccagaccacctcctcatcgacctcttccgtagaaccctcagtgctggtaagctgacagagaaagttctcaagttgtttctagcaaccggctgtgaggatatcatattggctgttcggttgctcaacattaagcagccactcgtaccagtccttcccacaaggtgctctgagagattctagatctgctgccgcccacatcgttttgattacctgagaagatgcctttggaaattcaagatagtgaggttgacatagtgattgcggcactccagcccaacctgaccactttctatgaggcatggcgaccatttttctcccgtttccacatcattgtcgtcaaagatccagacatggcagaggatcttcaaatccctgcaggttttgatctcaaggtttacaccaagtcagatattaatgggttgcttggtgcctcctcatccataaacttatctggtcactcatgccgttactttgggtatcttgtctcacgcaagaagtatgtgatttcagttgatgacaattgcctcccagcgaaggacactgctgggtcgactgttgatgttgttgcacagcacatggccaatctgaaaacacctgctacacctttctttttcaacacactctatgatccatacaggaaaggtgctgactttgtccgtggttacccattcagcctgcgtgagggggttgagtgcatgctctcgtgtggtttgtggcttcataatgctgactacgacccgatgactcatgttgtgaagagaaatcaacggaacacaacatatgtggatgctgtgatgacggttccgcttggtgccatgctgcctgtgagcgggataaatgttgcattcaaccgcgatgtgctggggcctgctatgttcccaggcctgcgtctaagaaacgaagggaagcacagatgggatacccttgaagacatatggaatggcttatgtgctaaagtagtctgcgacagcttgggatatggtgtgaagaccagactgccttatgtgatgagaagtgatgcagaagcaggtaaagctctggagagcttgaaagagtgggaaggggtaaaagtcatggacgatgttctcccattcttccagtcgctcaagctatcgaggactgcagttactgttgacgattgtgttaaggagcttgctggaattgtccgtgagaaactaggacctaagaatgcaatcttcaccaaagcagccgatgccatggtggaatggaacaatctctggaaagtgcatggtgctcagaatgcatagtttgggaatttgcatgtttcctacagagcatctaatagttgtttggagtgcgcgttttacagttctaaattttccctgtggaactcatgaagctgaaataaacaacagtcctttatgccgtgaatttggcatgaatagctgagcatctcattgtatacgcttaagaattatgtaatgtaatgcatcaaaagaacatgtgatgttttcttgc

SEQ ID NO: 17660 - protein, 349 aa, Zea mays subsp. mays
  peptide (1)..(349): Ceres Seq. ID no. 15176875
MPLEIQDSEVDIVIAALQPNLTTFYEAWRPFFSRFHIIVVKDPDMAEDLQIPAGFDLKVYTKSDINGLLGASSSINLSGHSCRYFGYLVSRKKYVISVDDNCLPAKDTAGSTVDVVAQHMANLKTPATPFFFNTLYDPYRKGADFVRGYPFSLREGVECMLSCGLWLHNADYDPMTHVVKRNQRNTTYVDAVMTVPLGAMLPVSGINVAFNRDVLGPAMFPGLRLRNEGKHRWDTLEDIWNGLCAKVVCDSLGYGVKTRLPYVMRSDAEAGKALESLKEWEGVKVMDDVLPFFQSLKLSRTAVTVDDCVKELAGIVREKLGPKNAIFTKAADAMVEWNNLWKVHGAQNA

SEQ ID NO: 17661 - protein, 305 aa, Zea mays subsp. mays
  peptide (1)..(305): Ceres Seq. ID no. 15176876
MAEDLQIPAGFDLKVYTKSDINGLLGASSSINLSGHSCRYFGYLVSRKKYVISVDDNCLPAKDTAGSTVDVVAQHMANLKTPATPFFFNTLYDPYRKGADFVRGYPFSLREGVECMLSCGLWLHNADYDPMTHVVKRNQRNTTYVDAVMTVPLGAMLPVSGINVAFNRDVLGPAMFPGLRLRNEGKHRWDTLEDIWNGLCAKVVCDSLGYGVKTRLPYVMRSDAEAGKALESLKEWEGVKVMDDVLPFFQSLKLSRTAVTVDDCVKELAGIVREKLGPKNAIFTKAADAMVEWNNLWKVHGAQNA

SEQ ID NO: 17662 - protein, 230 aa, Zea mays subsp. mays
  peptide (1)..(230): Ceres Seq. ID no. 15176877
MANLKTPATPFFFNTLYDPYRKGADFVRGYPFSLREGVECMLSCGLWLHNADYDPMTHVVKRNQRNTTYVDAVMTVPLGAMLPVSGINVAFNRDVLGPAMFPGLRLRNEGKHRWDTLEDIWNGLCAKVVCDSLGYGVKTRLPYVMRSDAEAGKALESLKEWEGVKVMDDVLPFFQSLKLSRTAVTVDDCVKELAGIVREKLGPKNAIFTKAADAMVEWNNLWKVHGAQNA

SEQ ID NO: 17663 - DNA, 1596 bp, Zea mays subsp. mays
  misc_feature (1)..(1596): Ceres Seq. ID no. 12375384
  misc_feature (1)..(1596): Ortholog of  Ceres SEQ ID NO 14316404 as cited in SEQ ID NO 57641
  misc_feature (1)..(1596): Ortholog of  Ceres SEQ ID NO 15225111 as cited in SEQ ID NO 58444
  misc_feature (1)..(1596): Ortholog of  Ceres SEQ ID NO 15178920 as cited in SEQ ID NO 0
  misc_feature (1)..(1596): Ortholog of  Ceres SEQ ID NO 15180029 as cited in SEQ ID NO 0
gcacgagaccattacctagaacatcctaatcgaaaaattttgcacccagcaacgtacagctagctagcaggcaccaggcagcacatagcctccgattattcagctggaggtcggtctgtgtgtgcgtgcatggggcatcactcctgctgcaaccagcagaaggtgaagagggggctctggtcccctgaggaggacgagaagctcatcaggtacatcaccacccatggctacgggtgctggagcgaggtccccgagaaggccggcctacaacgctgcgggaagagctgccggctgcggtggatcaactacctcaggccggacatccgccgaggccggttcacggcggaggaggagaagctcatcatcagcctgcacgccattgttggcaacaggtgggcccacattgccagccacttgcccgggcggacggacaacgagatcaagaactactggaactcgtggatcaagaagaagatccgaaagccggcgatgagcacgacgacgacgagctcggccgtgacggcggcgagccctccgtgcagcacggcggcgtcggacgcggcgcttggtcgtcacctgcagacgccgttcagcgcggcggagcaccggctcgacgccatcctcagccagagccttgccttgccgccgccgaagctgggctccggcggcggcggcggcggcggccaagagtccccgccgctgcccccgcactgccccttcttcatgttcgacacgagcgtcagcgtcagcccgccgtcgcccgcggccgcagcacaccacctgcagcacccgttcctcaccttcacggcggcggcggcgatggacgacaacgcgccgatgggcttccatctgccgcccttggtggacggcatgggaatgggcatgccagcaggccatggactgcggcgctctaggccatgaccaccgcgttgccggcggcaacaacaatggtcaggcggaggcggcggcggccggcatggcgaacggctgctgctacgggcagctgcaaaagcagcaggaggaggagcagcagccgtcgctggggcaggaggaccagtgggacgacgagtcggcgcggcacctgctgatgtgggacgatgaccaagaactaacaccgtccaacctggaagccatggaaagtacagctcactccctcctttttatgggaccaaatgaccatacatgacgaaaaagctagcttattattggtgtgcatgcgcatctatccccctctcttcttgatctgatctgctacctctagctctctcacccgatctgctgatctgtgtccatacatgcaataatgaggttgttgtccaaggcgcataatttatttttgctggatttttcatttttctcatattgatttaacctttattttttttggtttttggtttgggctttgtggagtgaattgaagactaaaaggctaagagtgtgcgtgttaaatggggttttattttttgtaaagaggatttgcatgctcttgcatggcgctgcgcttggagtgtaatttgattgatgtatctaagtgaatttaaaataaggaagatgacactaaaagagatcgaaagggagtcacgcaccccttttcct

SEQ ID NO: 17664 - protein, 263 aa, Zea mays subsp. mays
  peptide (1)..(263): Ceres Seq. ID no. 12375385
MGHHSCCNQQKVKRGLWSPEEDEKLIRYITTHGYGCWSEVPEKAGLQRCGKSCRLRWINYLRPDIRRGRFTAEEEKLIISLHAIVGNRWAHIASHLPGRTDNEIKNYWNSWIKKKIRKPAMSTTTTSSAVTAASPPCSTAASDAALGRHLQTPFSAAEHRLDAILSQSLALPPPKLGSGGGGGGGQESPPLPPHCPFFMFDTSVSVSPPSPAAAAHHLQHPFLTFTAAAAMDDNAPMGFHLPPLVDGMGMGMPAGHGLRRSRP

SEQ ID NO: 17665 - protein, 143 aa, Zea mays subsp. mays
  peptide (1)..(143): Ceres Seq. ID no. 12375386
MSTTTTSSAVTAASPPCSTAASDAALGRHLQTPFSAAEHRLDAILSQSLALPPPKLGSGGGGGGGQESPPLPPHCPFFMFDTSVSVSPPSPAAAAHHLQHPFLTFTAAAAMDDNAPMGFHLPPLVDGMGMGMPAGHGLRRSRP

SEQ ID NO: 17666 - DNA, 1615 bp, Zea mays subsp. mays
  misc_feature (1)..(1615): Ceres Seq. ID no. 12358993
  misc_feature (1)..(1615): Ortholog of  Ceres SEQ ID NO 14303137 as cited in SEQ ID NO 53594
  misc_feature (1)..(1615): Ortholog of  Ceres SEQ ID NO 13585454 as cited in SEQ ID NO 65280
  misc_feature (1)..(1615): Ortholog of  Ceres SEQ ID NO 14307889 as cited in SEQ ID NO 67245
acctcttctcgcgcacgtggtctgtgcccgtacgcggcggcgctgccgctcaccagaccggccgccgccacgtctgcttccgcgcctccccgcctcctcaccgtccgcccccttttacctgcctgatcattttattataaatgtggggcgagagaactcatcataagcactggcatcaaggtcatggtacctcggggaattccaacaacaaaaagcatgataagcggcagccaaaatttataccagacaattatagctccgtcgatgaggttactactgctctgcgagaagctggcctcgaatcgtcaaatctaatcctcggtattgatttcaccaaaagcaatgagtggtcaggcaggcattcctttagaagaaaatctctgcatgccattaatggcaccccaaatccatatgaacaagctatctctataatcgggcgaacgctgtcaccttttgacgatgataacttgataccatgttttggatttggcgatgcttctacacatgatcattctgtgttcagtttctacccagagaaccgaccctgtcgtggctttgaggaggttcttgtaaggtatcgacagattgtaccacatttgaacctttcaggaccaacttcttttgcacctcttatttatgcagcgatttctgttgttgaaaacagtaattggcagtaccatgtcctcgtgatcatagctgatggacgtgactgccgcgaatataaatgatggaagattaagtccacaggaacaagcaactatacaagcaattgtcgatgctagctactatcctctttcaatagtaatggttggggtgggtgatggaccatgggatgcgatgcagcattttgatgactgtatccctgaaagagcttttgacaattttcagtttgtgaacttcactggtattatgtcaacaagtaaggatatgtcaaagaaggaggctgcatttgcccttgcagctcttatggaaataccttctcagtataaagcaacgcaaggcctccgacctccagaaaagcaagcacaaaggattggctctcctaggattcttcctcctccaaataaagttcttgaaaatgataatgccgccgccgctgcttcgcaccctcctcaaactgcaagctcgaaatcaactggtattggcaaaagtgctgctgacgagcaggtatgccccatatgtctaaccaatccaaaggacatggcttttcagtgtggtcatctgacatgtaaggaatgtggcccaacactatcaacgtgcccattgtgccgcgctctaatcaccatgcgtgtgaggctctactcctaagtcggttggtgtctggagggatgggaccaaacagaaaggagcaagaactttggggcgcaaggactgcgctacgatcttgagatatggtccatatggatgtcatgataacgatgcatgtacagaaaccttgtccgtgcctattcagtaatgtcgttgatgagtatcttccatcaatcacatgtaaaatttctaatgttatcttgtattagtagcaggggattgcttgttgagtggaataccaccagttgttcagcaacagatagtaaactccatgtgcatttggaagtcacttttgtgatttgtgttc

SEQ ID NO: 17667 - protein, 202 aa, Zea mays subsp. mays
  peptide (1)..(202): Ceres Seq. ID no. 12358994
MDVTAANINDGRLSPQEQATIQAIVDASYYPLSIVMVGVGDGPWDAMQHFDDCIPERAFDNFQFVNFTGIMSTSKDMSKKEAAFALAALMEIPSQYKATQGLRPPEKQAQRIGSPRILPPPNKVLENDNAAAAASHPPQTASSKSTGIGKSAADEQVCPICLTNPKDMAFQCGHLTCKECGPTLSTCPLCRALITMRVRLYS

SEQ ID NO: 17668 - protein, 195 aa, Zea mays subsp. mays
  peptide (1)..(195): Ceres Seq. ID no. 12358995
MWGERTHHKHWHQGHGTSGNSNNKKHDKRQPKFIPDNYSSVDEVTTALREAGLESSNLILGIDFTKSNEWSGRHSFRRKSLHAINGTPNPYEQAISIIGRTLSPFDDDNLIPCFGFGDASTHDHSVFSFYPENRPCRGFEEVLVRYRQIVPHLNLSGPTSFAPLIYAAISVVENSNWQYHVLVIIADGRDCREYK

SEQ ID NO: 17669 - protein, 167 aa, Zea mays subsp. mays
  peptide (1)..(167): Ceres Seq. ID no. 12358996
MVGVGDGPWDAMQHFDDCIPERAFDNFQFVNFTGIMSTSKDMSKKEAAFALAALMEIPSQYKATQGLRPPEKQAQRIGSPRILPPPNKVLENDNAAAAASHPPQTASSKSTGIGKSAADEQVCPICLTNPKDMAFQCGHLTCKECGPTLSTCPLCRALITMRVRLYS

SEQ ID NO: 17670 - DNA, 2973 bp, Zea mays subsp. mays
  misc_feature (1)..(2973): Ceres Seq. ID no. 12375065
  misc_feature (1)..(2973): Ortholog of  Ceres SEQ ID NO 14303276 as cited in SEQ ID NO 1264
  misc_feature (1)..(2973): Ortholog of  Ceres SEQ ID NO 12465083 as cited in SEQ ID NO 68239
gcacgagaccattacctagaacatcctaatcgaaaaagagacgacgacgacgacgacgacgacgacgacgcgagaagtcgaggcgccgctgcttgctaggaccgagcttcaggaagtctccaacggccccggcgccggcacggcctgccccgcgccgccacagggattgattgtgatcagatctattctgtagtggtcagcggctgagggtgaaccgaagatgagcgttgtgggattcgatctcggcaatgagagctgcattgtggcagtcgcgcggcagcgcggcatcgacgtggtcctcaacgatgagtccaaacgcgagacacccgccatcgtctgcttcggggacaagcagcggttcatcggtacggcgggcgccgcgtcctcaaccatgaaccccaaaaactccatttctcagatcaagcgcctgctcggccgcaagttctccgaccccgagctccagagtgatctcgcgtccttcccgttccgtgtcacggagggccccgatggatttcccttggtacatgtgcggttcctgggcgaggagcggacgtttacccccacccagctgcttgccatggtgctgtccaatctgaagggcattgctgaggggaaccttaagactgcggttgttgattgctgcattggcatccctgtgtacttcagtgatttgcagcgcagggctgttcttgatgctgctactattgcaggcctcacgccgttgcagctatttcatgagacaactgccacggcattggcttatggcatttataagactgacctcccggagcatgaccagctaaacgttgcatttgttgatgtcggccatgctagcttgcaggtcagcattgtcggttacaagaagggacagctcaagatgctttcgcatgcatatgaccgttctcttggtgggagggacttcgatgaggccctcttcaagcacttcgcggcgaagttcaaagaagaatataagattgatgtttaccagaatgcccgtgcatgccttaggttgcgtgtggcgtgtgagaagcttaagaagatgctgagcgccaacccagaggccccactgaacattgagtgcttgatggatgagaaagatgtgagagggtttattaagagagaggagtttgaacacatcagtgcacctgtgctggtacgtgtcaaaggacccttggagaaggccttggctgaagctggcttgacaactgaaaatgtgcactttgttgaggttgtcggatctggttctcgtgttccagccataatcaagataatcactgatttttttgggaaggagccgagacgaaccatgaatgcaagcgagtgtgttgcgcggggctgtgctctccagtgtgctattctcagccccactttcaaagtgcgggaattccaggttaatgatgggtttcctttctcaattgcattgtcatggaaacaagactcgcagaacagtgcaccccaacagacccttgtatttccaaaggggaatgtaattcccagcattaaagctctaaccttctataaatccagtacatttgaagttgatgttttgtatgtggacacatgcgactcgcaaattccacagaagataagcacttacacaattggacctttccaaccctccaaaggtgagagggccaaactgaaagttaaagtgcgtctcaacatccacgggattgtcacagttgattcagctatgatgctggaggaggatgtggcagttccagtctcatctgctaatgaagctccaaaggatactacaaagatggacacagatgatgcaccaagtgatcctgtctctggaactgatgtgaatgtgcatgagcctgatactactgaggctgctcctgcagctgaaaatggaacacaaaatcccgaggaaaaatctgttccaatggaaactgatgcaaaggttgagccatcaaaaaggaaagttaagagaacttctgttccggtccatgcgttggtctatggtgccttggctgcagctgacctgcagaaggctgtagagaaagagtatgagatggctcttcaggacagagtaatggaagaaaccaaagagaagaaaaatgctgtggaagcttatgtctatgacatgcgtaacaagctctacgacaggtacaacgattttgtgacacctgaggagaaggaagggttgattggaaagcttcaggaggttgaagattggctatatgaagatggtgaggatgagacaaagggagtctatatttctaaactggaagatcttaagaagattggtgacccaattgaggcacggtacaaggagtcgacagaaaggggttcctctgtagatcaactggtctactgcatcaacagtttcagagaggctgctttgtccagtgaccaaaagtttggccatatcgacatatctgagaaacagaaggtcatcaatgagtgctctgaagtagagaactggttgagagagaggaagcagcagcaggacgccctacctaagcacaccgatcctgtgctgctcgtatcagatctgaagaagaaagctgaagcacttgacaggttctgcaaaccgatcatgactaaaccaaagccagctccgaagccacagactccgccaccacatactccacctccacagcctgaagcccaagcatctgaccctcaaacaccagaacaacaacaaagcgggactggtgcagctggtgagccgggtagtgagggaggtgtgcagcaggcctccggtgagcaaatggacatggacaggcccgatgattctgcggatgttgcggcataattgtggttgtggttgtcatctgtcttatgatcgatcaaaattttctgtttgtctggtaggtggatgagttaaggcaacagcatattctcccaagcgatttcgttttagggtttggaacattgagattgaggtaatgcgtcttgtccagcgttgttttggtctggactgtgaatcagaatagaaacgttgcatgatcgaattgcgcc

SEQ ID NO: 17671 - protein, 848 aa, Zea mays subsp. mays
  peptide (1)..(848): Ceres Seq. ID no. 12375066
MSVVGFDLGNESCIVAVARQRGIDVVLNDESKRETPAIVCFGDKQRFIGTAGAASSTMNPKNSISQIKRLLGRKFSDPELQSDLASFPFRVTEGPDGFPLVHVRFLGEERTFTPTQLLAMVLSNLKGIAEGNLKTAVVDCCIGIPVYFSDLQRRAVLDAATIAGLTPLQLFHETTATALAYGIYKTDLPEHDQLNVAFVDVGHASLQVSIVGYKKGQLKMLSHAYDRSLGGRDFDEALFKHFAAKFKEEYKIDVYQNARACLRLRVACEKLKKMLSANPEAPLNIECLMDEKDVRGFIKREEFEHISAPVLVRVKGPLEKALAEAGLTTENVHFVEVVGSGSRVPAIIKIITDFFGKEPRRTMNASECVARGCALQCAILSPTFKVREFQVNDGFPFSIALSWKQDSQNSAPQQTLVFPKGNVIPSIKALTFYKSSTFEVDVLYVDTCDSQIPQKISTYTIGPFQPSKGERAKLKVKVRLNIHGIVTVDSAMMLEEDVAVPVSSANEAPKDTTKMDTDDAPSDPVSGTDVNVHEPDTTEAAPAAENGTQNPEEKSVPMETDAKVEPSKRKVKRTSVPVHALVYGALAAADLQKAVEKEYEMALQDRVMEETKEKKNAVEAYVYDMRNKLYDRYNDFVTPEEKEGLIGKLQEVEDWLYEDGEDETKGVYISKLEDLKKIGDPIEARYKESTERGSSVDQLVYCINSFREAALSSDQKFGHIDISEKQKVINECSEVENWLRERKQQQDALPKHTDPVLLVSDLKKKAEALDRFCKPIMTKPKPAPKPQTPPPHTPPPQPEAQASDPQTPEQQQSGTGAAGEPGSEGGVQQASGEQMDMDRPDDSADVAA

SEQ ID NO: 17672 - protein, 791 aa, Zea mays subsp. mays
  peptide (1)..(791): Ceres Seq. ID no. 12375067
MNPKNSISQIKRLLGRKFSDPELQSDLASFPFRVTEGPDGFPLVHVRFLGEERTFTPTQLLAMVLSNLKGIAEGNLKTAVVDCCIGIPVYFSDLQRRAVLDAATIAGLTPLQLFHETTATALAYGIYKTDLPEHDQLNVAFVDVGHASLQVSIVGYKKGQLKMLSHAYDRSLGGRDFDEALFKHFAAKFKEEYKIDVYQNARACLRLRVACEKLKKMLSANPEAPLNIECLMDEKDVRGFIKREEFEHISAPVLVRVKGPLEKALAEAGLTTENVHFVEVVGSGSRVPAIIKIITDFFGKEPRRTMNASECVARGCALQCAILSPTFKVREFQVNDGFPFSIALSWKQDSQNSAPQQTLVFPKGNVIPSIKALTFYKSSTFEVDVLYVDTCDSQIPQKISTYTIGPFQPSKGERAKLKVKVRLNIHGIVTVDSAMMLEEDVAVPVSSANEAPKDTTKMDTDDAPSDPVSGTDVNVHEPDTTEAAPAAENGTQNPEEKSVPMETDAKVEPSKRKVKRTSVPVHALVYGALAAADLQKAVEKEYEMALQDRVMEETKEKKNAVEAYVYDMRNKLYDRYNDFVTPEEKEGLIGKLQEVEDWLYEDGEDETKGVYISKLEDLKKIGDPIEARYKESTERGSSVDQLVYCINSFREAALSSDQKFGHIDISEKQKVINECSEVENWLRERKQQQDALPKHTDPVLLVSDLKKKAEALDRFCKPIMTKPKPAPKPQTPPPHTPPPQPEAQASDPQTPEQQQSGTGAAGEPGSEGGVQQASGEQMDMDRPDDSADVAA

SEQ ID NO: 17673 - protein, 729 aa, Zea mays subsp. mays
  peptide (1)..(729): Ceres Seq. ID no. 12375068
MVLSNLKGIAEGNLKTAVVDCCIGIPVYFSDLQRRAVLDAATIAGLTPLQLFHETTATALAYGIYKTDLPEHDQLNVAFVDVGHASLQVSIVGYKKGQLKMLSHAYDRSLGGRDFDEALFKHFAAKFKEEYKIDVYQNARACLRLRVACEKLKKMLSANPEAPLNIECLMDEKDVRGFIKREEFEHISAPVLVRVKGPLEKALAEAGLTTENVHFVEVVGSGSRVPAIIKIITDFFGKEPRRTMNASECVARGCALQCAILSPTFKVREFQVNDGFPFSIALSWKQDSQNSAPQQTLVFPKGNVIPSIKALTFYKSSTFEVDVLYVDTCDSQIPQKISTYTIGPFQPSKGERAKLKVKVRLNIHGIVTVDSAMMLEEDVAVPVSSANEAPKDTTKMDTDDAPSDPVSGTDVNVHEPDTTEAAPAAENGTQNPEEKSVPMETDAKVEPSKRKVKRTSVPVHALVYGALAAADLQKAVEKEYEMALQDRVMEETKEKKNAVEAYVYDMRNKLYDRYNDFVTPEEKEGLIGKLQEVEDWLYEDGEDETKGVYISKLEDLKKIGDPIEARYKESTERGSSVDQLVYCINSFREAALSSDQKFGHIDISEKQKVINECSEVENWLRERKQQQDALPKHTDPVLLVSDLKKKAEALDRFCKPIMTKPKPAPKPQTPPPHTPPPQPEAQASDPQTPEQQQSGTGAAGEPGSEGGVQQASGEQMDMDRPDDSADVAA

SEQ ID NO: 17674 - DNA, 1678 bp, Zea mays subsp. mays
  misc_feature (1)..(1678): Ceres Seq. ID no. 12363462
  misc_feature (1)..(1678): Ortholog of  Ceres SEQ ID NO 13584805 as cited in SEQ ID NO 65488
gcacgagaccattacctagaacatcctaattgaaaaacagtcctcaccaccagaccaaatcgcagtcgcgctcgagctcaagccccgccgccgacgccgtcatctgcgccccagaaccccgtatttccctccgccgccttccgatctctcgctcctccccatgtcggagaaaaagcgccgcgccggtgcgagcgcggccggcgccgcatccagctccaagaagccgcgtgcttcctcggccgcgtcgtacgccgagtccctccgctcgaagctccgccccgacgcctccatcctggccaccctccgctccctcgcttctgcctccgcttccaaatccaaggccgacgccaggtccctcgcggaccacgacccgtgcgcggaccccgcctcctcgtacatcgtggtggccgaccaggactccacctccgtcacctcccgcatcaaccgcctcgtccttgccgccgcgcgcagcatcctctccggccggggcttctccttcgcggtgccctcgcgcgccgcctctaaccaggtctacctcccggacctcgaccgcatcgtgctcgtccgccgcgagtccgcgcgccccttcgccaacgtcgccaccgcgcggaaggccaccatcacggcgcgagtcctctccctcgtccacgccgtcctcggcaggggcatccacgtcaccaagcgtgacctcttctacaccgacgtcaagctcttcggcgaccagacccagtctgacgccgtcctcgacgacgtctcctgcatgctcggatgcaccaggtcctcgctccacgtcgtcgcctccgagaagggcgtcgtcgtcggccgccttgtcttcgccgacgacggggaccggatcgactgcacgcgcatgggcgtcggcggcaaggccattccgcccaacgtcgacagggtctcgggcatcgagagcgacgcgctcttcatcctcctggtggagaaggacgctgcattcatgcgactcgccgaggacaggttctacaaccgcttcccctgcatcattctgacggccaaggggcagccagatgtcgccacccggctgttcctgcggaggctcaaggttgagctgaagctgccagtgctcgcgctggtggattctgatccatacgggctcaagatcttgtcggtgtacatgtgtggttccaagaacatgtcgtatgacagtgccaatctgacgacgccggacatcaagtggctcggtgtccggccgagcgacctggacaagtacagagtgccggagcagtgccgtctccccatgaccgatcacgatatcaaggtggggaaagagctgctcgaggaggacttcgtgaagcagaatgagggctgggtgaaggagctggagacgatgctgcgcaccaagcaaaaggctgagatacaggccctcagttccttcgggttccagtacctcaccgaggtctacctgcctcttaagttgcaggagcaggattggatttgagaactctccaatgctagatatcagtaatttccctagccaagataatgccctccgctcagtattttcaaggaccaaattggcatgaatgaagacttcgccatctagttaatcacatgtatttttgaacaccagctgttgtattatttatttctgctggagaactgttctgtggaaaacattgctgccagatatatgtgctggaatttg

SEQ ID NO: 17675 - protein, 436 aa, Zea mays subsp. mays
  peptide (1)..(436): Ceres Seq. ID no. 12363463
MSEKKRRAGASAAGAASSSKKPRASSAASYAESLRSKLRPDASILATLRSLASASASKSKADARSLADHDPCADPASSYIVVADQDSTSVTSRINRLVLAAARSILSGRGFSFAVPSRAASNQVYLPDLDRIVLVRRESARPFANVATARKATITARVLSLVHAVLGRGIHVTKRDLFYTDVKLFGDQTQSDAVLDDVSCMLGCTRSSLHVVASEKGVVVGRLVFADDGDRIDCTRMGVGGKAIPPNVDRVSGIESDALFILLVEKDAAFMRLAEDRFYNRFPCIILTAKGQPDVATRLFLRRLKVELKLPVLALVDSDPYGLKILSVYMCGSKNMSYDSANLTTPDIKWLGVRPSDLDKYRVPEQCRLPMTDHDIKVGKELLEEDFVKQNEGWVKELETMLRTKQKAEIQALSSFGFQYLTEVYLPLKLQEQDWI

SEQ ID NO: 17676 - protein, 236 aa, Zea mays subsp. mays
  peptide (1)..(236): Ceres Seq. ID no. 12363464
MLGCTRSSLHVVASEKGVVVGRLVFADDGDRIDCTRMGVGGKAIPPNVDRVSGIESDALFILLVEKDAAFMRLAEDRFYNRFPCIILTAKGQPDVATRLFLRRLKVELKLPVLALVDSDPYGLKILSVYMCGSKNMSYDSANLTTPDIKWLGVRPSDLDKYRVPEQCRLPMTDHDIKVGKELLEEDFVKQNEGWVKELETMLRTKQKAEIQALSSFGFQYLTEVYLPLKLQEQDWI

SEQ ID NO: 17677 - DNA, 2094 bp, Zea mays subsp. mays
  misc_feature (1)..(2094): Ceres Seq. ID no. 12417627
  misc_feature (1)..(2094): Ortholog of  Ceres SEQ ID NO 14311313 as cited in SEQ ID NO 53503
  misc_feature (1)..(2094): Ortholog of  Ceres SEQ ID NO 14310588 as cited in SEQ ID NO 58770
attgtgctcgctgcgctgtgtgtttctggataataaaaaacccgccagcccccgcatcggagggccgcgcaagtgggtcaactcgcaactgaagaccaaaggcgagagccggctgcccggattccggaagcgcccaagcccccaacgcgaccgtcgctgtcgccaccgcgctcggctcgcccgcgtccacagaagccgccagggccatacgccgatgaatcctgccgcgacggcggatcccagcagctccagcacctcggcggccacgctgcggaagcggatgatctctatagacacggctcgacgaggagccgacggcgcgtcgcctgagaccgcgcccaggccagatcgggcgggtagtgataaggcgccgcaggagcgggaggaggagggctcgatggcggcctccgcgcctgcggcggcagcagcgagggagagtgacctggaggcggtgggcgagccgatgagccccgcggggcggctgttccgcgagacgcacttcaactgctacatcgtggccgtgatcgggctgggcgcggcggtggacgtcgcggcggcgcgcgcggggctggaggtcacgctcgtccgccacccacgcttctccagcgtccaggtgaatgatggtgatgcgagaaagaacgccaagccgcggtgggtgcggaccacggttaacctggatgatcacatcatcgtcccctgcctggaacccgctgccacgtcgaccaagccggaccaggccgtggaggactacctgtcctggctgtccacggcgcccatggaccactcccgcccgctctgggagttccacgtcctggacttcccgacgtccgaggccaccgccaccgttgccatccgcatgcaccactccctcggcgacggcgtctcgctgctgtcgctgctcatcgcgtgcacccgcagcgccgcggacccggcgcggctgccggagctgccgcccgcgccgcgccgcgcgagccctgtctacgccaggcagcgccccccgctttccgcgggcctcgtggcgttctcgctgtggctgtggtcctacgtcttgctcgcgtggcacacactggtggacgtcgcgtgcttcgtggccacggcgtggttcctgcgcgaccagcgcacacccttcatggccgcgtccgagggcgtcgagttccgccgcaagcgcttcgtgcaccgcacgctcagcctcgacgacgtcaagttcgtcaagaatgtcatgaagtgtactgtcaacgatgtcctgattggagtgactaacgcagggttgtcgcggtattattttcgaaaaaccagtgataccaacaacgagaggaaaaaatcgcagaatattcgtgtccgatcagctctccttgttaacattaggagaacacctggtttacatgcattggcggaaatgatggattctatcaagaacaatagggcaaaatgggggaacctgattggttacatgatactgcctttccacatagccatgcacgatgatcctcttgaatacatccgccaagggaaaaggacagctcaaaggaagaaggcttcattagaagcggttttcacgtactggagtgggaacctaatagtcaaactatttggcatgaaggctgcagcagctctctgctatggtatgttcacaaatacgaccatgtcattctcaagcatggtcggacctgctgagaaggtggagttctacggccatccaatcatctacatcgctccctctgtctacgggcatccacatgctctgactatacattaccaaagctatacgaactccatcaagcttgtcctcgcagtggatgatgctcagtttccagactctcatcagcttttggacgacttcgccgagtccctcaggctcatccgtcaggcagcttcaacaagatgacagacacaaacaagagcatttttttcagtagaatgtagactgttggcgagaactcgcatacaaatgctggacaataacttatcaggaaattgatggcctggttacctgactggggactcttgaactttcaagaaatcattagaggcaaattgtaaagtgtaaagactagtatgtaatatcaatattgttcaaccaattgcggtggaatt

SEQ ID NO: 17678 - protein, 627 aa, Zea mays subsp. mays
  peptide (1)..(627): Ceres Seq. ID no. 12417628
LCSLRCVFLDNKKPASPRIGGPRKWVNSQLKTKGESRLPGFRKRPSPQRDRRCRHRARLARVHRSRQGHTPMNPAATADPSSSSTSAATLRKRMISIDTARRGADGASPETAPRPDRAGSDKAPQEREEEGSMAASAPAAAAARESDLEAVGEPMSPAGRLFRETHFNCYIVAVIGLGAAVDVAAARAGLEVTLVRHPRFSSVQVNDGDARKNAKPRWVRTTVNLDDHIIVPCLEPAATSTKPDQAVEDYLSWLSTAPMDHSRPLWEFHVLDFPTSEATATVAIRMHHSLGDGVSLLSLLIACTRSAADPARLPELPPAPRRASPVYARQRPPLSAGLVAFSLWLWSYVLLAWHTLVDVACFVATAWFLRDQRTPFMAASEGVEFRRKRFVHRTLSLDDVKFVKNVMKCTVNDVLIGVTNAGLSRYYFRKTSDTNNERKKSQNIRVRSALLVNIRRTPGLHALAEMMDSIKNNRAKWGNLIGYMILPFHIAMHDDPLEYIRQGKRTAQRKKASLEAVFTYWSGNLIVKLFGMKAAAALCYGMFTNTTMSFSSMVGPAEKVEFYGHPIIYIAPSVYGHPHALTIHYQSYTNSIKLVLAVDDAQFPDSHQLLDDFAESLRLIRQAASTR

SEQ ID NO: 17679 - protein, 556 aa, Zea mays subsp. mays
  peptide (1)..(556): Ceres Seq. ID no. 12417629
MNPAATADPSSSSTSAATLRKRMISIDTARRGADGASPETAPRPDRAGSDKAPQEREEEGSMAASAPAAAAARESDLEAVGEPMSPAGRLFRETHFNCYIVAVIGLGAAVDVAAARAGLEVTLVRHPRFSSVQVNDGDARKNAKPRWVRTTVNLDDHIIVPCLEPAATSTKPDQAVEDYLSWLSTAPMDHSRPLWEFHVLDFPTSEATATVAIRMHHSLGDGVSLLSLLIACTRSAADPARLPELPPAPRRASPVYARQRPPLSAGLVAFSLWLWSYVLLAWHTLVDVACFVATAWFLRDQRTPFMAASEGVEFRRKRFVHRTLSLDDVKFVKNVMKCTVNDVLIGVTNAGLSRYYFRKTSDTNNERKKSQNIRVRSALLVNIRRTPGLHALAEMMDSIKNNRAKWGNLIGYMILPFHIAMHDDPLEYIRQGKRTAQRKKASLEAVFTYWSGNLIVKLFGMKAAAALCYGMFTNTTMSFSSMVGPAEKVEFYGHPIIYIAPSVYGHPHALTIHYQSYTNSIKLVLAVDDAQFPDSHQLLDDFAESLRLIRQAASTR

SEQ ID NO: 17680 - protein, 534 aa, Zea mays subsp. mays
  peptide (1)..(534): Ceres Seq. ID no. 12417630
MISIDTARRGADGASPETAPRPDRAGSDKAPQEREEEGSMAASAPAAAAARESDLEAVGEPMSPAGRLFRETHFNCYIVAVIGLGAAVDVAAARAGLEVTLVRHPRFSSVQVNDGDARKNAKPRWVRTTVNLDDHIIVPCLEPAATSTKPDQAVEDYLSWLSTAPMDHSRPLWEFHVLDFPTSEATATVAIRMHHSLGDGVSLLSLLIACTRSAADPARLPELPPAPRRASPVYARQRPPLSAGLVAFSLWLWSYVLLAWHTLVDVACFVATAWFLRDQRTPFMAASEGVEFRRKRFVHRTLSLDDVKFVKNVMKCTVNDVLIGVTNAGLSRYYFRKTSDTNNERKKSQNIRVRSALLVNIRRTPGLHALAEMMDSIKNNRAKWGNLIGYMILPFHIAMHDDPLEYIRQGKRTAQRKKASLEAVFTYWSGNLIVKLFGMKAAAALCYGMFTNTTMSFSSMVGPAEKVEFYGHPIIYIAPSVYGHPHALTIHYQSYTNSIKLVLAVDDAQFPDSHQLLDDFAESLRLIRQAASTR

SEQ ID NO: 17681 - DNA, 1582 bp, Zea mays subsp. mays
  misc_feature (1)..(1582): Ceres Seq. ID no. 13499244
  misc_feature (1)..(1582): Ortholog of  Ceres SEQ ID NO 15171438 as cited in SEQ ID NO 51665
  misc_feature (1)..(1582): Ortholog of  Ceres SEQ ID NO 15170804 as cited in SEQ ID NO 52653
  misc_feature (1)..(1582): Ortholog of  Ceres SEQ ID NO 15170203 as cited in SEQ ID NO 53291
  misc_feature (1)..(1582): Ortholog of  Ceres SEQ ID NO 13656138 as cited in SEQ ID NO 65492
  misc_feature (1)..(1582): Ortholog of  Ceres SEQ ID NO 14303083 as cited in SEQ ID NO 66573
actattatagccaacgtctctgcgcgtgcggtgccggagcggcggagcctcccctccctcccccatcctacctcaccatgatggcaatgccggacgcggatcgcaacgccatgtcggcgccgctgctcccgcggcccgcgtgcctgacggcgtccttctcctcctcctcctcctccttcgcgtccttctcctcctccaactcctccagctccgacccctcacccccgtccgccttcccgccggcggggccgtgcaaggcgctggcggtgctgcgggaccacgcgggctccgtctccagcctctccctctgcggggagttcctgctcagcgcgtccacggccggcgacgtcgtggcgtggcagcagcccgacctccggcgcttcgcgcgcttcggccacggcgagagcggcggctccgtcaaggcgctggcggccgcgggcggccgcgtcttctccgcgcaccaggacnnccgcgtccgcgtctggcgcgtctcccgcggccgccgctccgagaacgccttcaagctcgtcgccgcgctgcccaccgccagggactacctgggccgggtgttccgccaggacagctacgtgcagaccaccgccaccacggcggcgcgccgcgcccaccaccgccgcctctggatcgagcacgccaacagcatctcctgcctcgccgtcgccgtgcacgacgccgcgctcctctactcgggctcctgggaccgcacgctcaaggtctggcgcgtcgccgacctcaggtgcctcgagtccatccgcgcccacgacgacgccgtcaacgccgtcgccgcagacgccggcatcgtctactccgcctccgccgacggccgcgtcaaggcctgggagaaggggaaggcgtcgcatttcctccagggcgtcctcgtcgcccgcgacggcgtctcgtggaacgcgctcaccgtcgccgccgacgaccgccggctctacgccgcgggctccgacggccacgtcgccgcctgggaccgcctcggcggcaggaccgccgcgcgctggaccctcgcgtgcgacgtcagggcgcacgacgccgccgtgctgtgcctctgcgtcgccagggacctgctctgcaccggctccgccgacaagaccatcggcctgtggcgccgtcagagcgccggcgagctggccaaggtgggcgtcgtcagaggccacgagggccccgtcaaatgcatccaggcgtcctggtgcaggctcaccaatggctgcatggtctacagcgggagccttgacaagaccatcagagtttggtgggtgcccggtgccttgcagcatgccaatgacaaagatcagcagcagcagcagcaaaaagatggcttcaaggatcacaagcacaaggcttctttgttcttgagatgaaacttgtgtctgctccaaatttcgaaatggattgattgagattgctcaggtctagtctgtattttggattggttgatttatattacaaggataaatgggtaacacacaaaagtagccatagagtggatgtgcttctgtaaatggctgtatactatgttctgattcttctttgatataggttttgactacatggagag

SEQ ID NO: 17682 - protein, 460 aa, Zea mays subsp. mays
  peptide (1)..(460): Ceres Seq. ID no. 13499245
  misc_feature (156)..(156): Xaa is any aa, unknown or other
YYSQRLCACGAGAAEPPLPPPSYLTMMAMPDADRNAMSAPLLPRPACLTASFSSSSSSFASFSSSNSSSSDPSPPSAFPPAGPCKALAVLRDHAGSVSSLSLCGEFLLSASTAGDVVAWQQPDLRRFARFGHGESGGSVKALAAAGGRVFSAHQDXRVRVWRVSRGRRSENAFKLVAALPTARDYLGRVFRQDSYVQTTATTAARRAHHRRLWIEHANSISCLAVAVHDAALLYSGSWDRTLKVWRVADLRCLESIRAHDDAVNAVAADAGIVYSASADGRVKAWEKGKASHFLQGVLVARDGVSWNALTVAADDRRLYAAGSDGHVAAWDRLGGRTAARWTLACDVRAHDAAVLCLCVARDLLCTGSADKTIGLWRRQSAGELAKVGVVRGHEGPVKCIQASWCRLTNGCMVYSGSLDKTIRVWWVPGALQHANDKDQQQQQQKDGFKDHKHKASLFLR

SEQ ID NO: 17683 - protein, 435 aa, Zea mays subsp. mays
  peptide (1)..(435): Ceres Seq. ID no. 13499246
  misc_feature (131)..(131): Xaa is any aa, unknown or other
MMAMPDADRNAMSAPLLPRPACLTASFSSSSSSFASFSSSNSSSSDPSPPSAFPPAGPCKALAVLRDHAGSVSSLSLCGEFLLSASTAGDVVAWQQPDLRRFARFGHGESGGSVKALAAAGGRVFSAHQDXRVRVWRVSRGRRSENAFKLVAALPTARDYLGRVFRQDSYVQTTATTAARRAHHRRLWIEHANSISCLAVAVHDAALLYSGSWDRTLKVWRVADLRCLESIRAHDDAVNAVAADAGIVYSASADGRVKAWEKGKASHFLQGVLVARDGVSWNALTVAADDRRLYAAGSDGHVAAWDRLGGRTAARWTLACDVRAHDAAVLCLCVARDLLCTGSADKTIGLWRRQSAGELAKVGVVRGHEGPVKCIQASWCRLTNGCMVYSGSLDKTIRVWWVPGALQHANDKDQQQQQQKDGFKDHKHKASLFLR

SEQ ID NO: 17684 - protein, 434 aa, Zea mays subsp. mays
  peptide (1)..(434): Ceres Seq. ID no. 13499247
  misc_feature (130)..(130): Xaa is any aa, unknown or other
MAMPDADRNAMSAPLLPRPACLTASFSSSSSSFASFSSSNSSSSDPSPPSAFPPAGPCKALAVLRDHAGSVSSLSLCGEFLLSASTAGDVVAWQQPDLRRFARFGHGESGGSVKALAAAGGRVFSAHQDXRVRVWRVSRGRRSENAFKLVAALPTARDYLGRVFRQDSYVQTTATTAARRAHHRRLWIEHANSISCLAVAVHDAALLYSGSWDRTLKVWRVADLRCLESIRAHDDAVNAVAADAGIVYSASADGRVKAWEKGKASHFLQGVLVARDGVSWNALTVAADDRRLYAAGSDGHVAAWDRLGGRTAARWTLACDVRAHDAAVLCLCVARDLLCTGSADKTIGLWRRQSAGELAKVGVVRGHEGPVKCIQASWCRLTNGCMVYSGSLDKTIRVWWVPGALQHANDKDQQQQQQKDGFKDHKHKASLFLR

SEQ ID NO: 17685 - DNA, 1416 bp, Zea mays subsp. mays
  misc_feature (1)..(1416): Ceres Seq. ID no. 12390128
  misc_feature (1)..(1416): Ortholog of  Ceres SEQ ID NO 14301614 as cited in SEQ ID NO 61994
agcattttaacatcgtttgaagtaggaacctcacccagattcattgaaccgccagctctgccatcttatccttgccacgtgaagtgacgttcttggcgaccccatcaatctcctcgatttggatgtccacgagcttattgagctgttgctcctgcgtcctgagatcctctggctgctgctcaacagtttgttcatcctcatccccaatctcatgtgtccaatacacagcaaaagatgcctccttattgaaactggttggcatctgcaacagacgcttcctgttagttccagaggcactgccaaggatctcccccttcatgaggtcatatatgcaggccctgaagttgtccatgctcttatgatcctgagagtcgaggcttaggaagatcagaatttcccagcaccggaggaactgtttcttctttatcttcagcttctaacgaacagtctccatcaggtcagccggtggaaccattctcaaactttgggccctttttgacaggttggtctccttcagagacgagacaatagcaccaagtgcaggtttgatcggatcaaacatgagcaaacggaggcagtcaacggatgatctcacatactgcaggtcaagaagcggaaggcgcgggtgcctctcgacgtcgccgacgccgtgatggagccagtacggcggtccggccggctcgccaacctcccggataagcccgtgtaccgcgagaaggttcccgattttgggatgaagattaggaggacgtacggatcggtgagaagagatctgaccaaccgggtgtacgcgaccgacgatgcgaggagctacgccatctctaaggcggaggatctggagcaagagctggactccagcttccccatcttcatcaagcccatgacccagtcccatgtcaccgggggcttctggctgggccttccgattcatttctgccggaagtatctgcccaagcgtgacgagatgatcaccctggtggatgaggatgatgacgagtccgacacgctgtacctcgcaatgaagcgggggctcagtgctggatggagagggtttgccgtccagcagaagctggtggatggagattgcctggtcttccagctgattgagcaaacaaagttcaaggtctacataactagagcaagttcctactacgaaagcgaggactgatgaaactagtagcttgtaatctggtgattggagctcagttatggaggtggctgcgttggacaagcttgcatctgggaatcgctggggtgtcttgaaactttttggtggcagaaagttagctgatgtatgaaacccagtatctcctaccaattgttgctgatttgtgtacttcttgggcttaccacttgcacggttcagaaacctgcactatgtaagggggttgttggtggcagctaacctcgttttgt

SEQ ID NO: 17686 - protein, 171 aa, Zea mays subsp. mays; identical to SEQ ID NO: 10745
  peptide (1)..(171): Ceres Seq. ID no. 12390129

SEQ ID NO: 17687 - protein, 144 aa, Zea mays subsp. mays; identical to SEQ ID NO: 10746
  peptide (1)..(144): Ceres Seq. ID no. 12390130

SEQ ID NO: 17688 - protein, 95 aa, Zea mays subsp. mays
  peptide (1)..(95): Ceres Seq. ID no. 12390131
MTQSHVTGGFWLGLPIHFCRKYLPKRDEMITLVDEDDDESDTLYLAMKRGLSAGWRGFAVQQKLVDGDCLVFQLIEQTKFKVYITRASSYYESED

SEQ ID NO: 17689 - DNA, 1955 bp, Zea mays subsp. mays
  misc_feature (1)..(1955): Ceres Seq. ID no. 12363415
  misc_feature (1)..(1955): Ortholog of  Ceres SEQ ID NO 15175923 as cited in SEQ ID NO 54037
  misc_feature (1)..(1955): Ortholog of  Ceres SEQ ID NO 14303366 as cited in SEQ ID NO 54418
  misc_feature (1)..(1955): Ortholog of  Ceres SEQ ID NO 13503610 as cited in SEQ ID NO 62416
  misc_feature (1)..(1955): Ortholog of  Ceres SEQ ID NO 13657610 as cited in SEQ ID NO 66165
  misc_feature (1)..(1955): Ortholog of  Ceres SEQ ID NO 13598312 as cited in SEQ ID NO 68448
  misc_feature (1)..(1955): Ortholog of  Ceres SEQ ID NO 13596100 as cited in SEQ ID NO 68573
ggcgaatccctgactttcttctccacgccgtgctctgcttcgagtgaggcctggttcagattttacaggggttcggttcgatctggtgtccgacggaggcggcggcggcggctcctctgctgttcgattgagggagaggggccatggaaaacccggcgccgccgaccaacccggcctccgccacgccgtcgccgtcgcggcagctgccggacttccagcagtcggttcgtctcaagtacgtgaagctggggtaccattacctcatcacccacggcatgtacctgctgctcaccccgctgatggtgctcgtggccgtgtacctctccacgctctccccgcgcgacgtcgccgacctgtgggcccacctccgcctcaacctcatctccgtgctggcctgctccacgctcctcgtcttcctcggcacggcctacttcctcacccgcccgcggcccgtgtacctggtcgacttcgcctgctacaagcccgggccggagcgtcggtgcacgcgcgacaccttcatgcgctgctccaggctcaccggctgcttcactgacgccagcctcgagttccagcgcaagatcctggagcgctcggggctgggcgaggacacgtaccttccccccgccgtcacgcgggtgccgcccaacccgtccatggacgaggcgcgcgcggaggcgcgggaggtcatgttcggcgccgtcgacgagctgctcgccaagacgggggtcaagcccaaggacatcgggatcctcgtggtgaactgcagcctgttcaacccgacgccgtcgctgtcggccatggtggtcaaccactacaagctgcgcgggaacgtggtgagctacaacctcggcgggatggggtgcagcgccgggctgctgtccgtggacctcgccaaggacctgctgcagacgcacccggggtcgtacgcgctggtcatcagcacggagaacatcacgctcaactggtactcggggaacgaccgctccaagctggtgtccaactgcctgttccggatgggcggcgccgcggtgctgctctcgaatcggcggtccgaccggcggcgggccaagtacgagctggtgcacacggtgcgcacgcacaagggcgcggacgaccggtgcttcggctgcgtgacgcaggaggaggacggcgagggcgtcgtgggcgtgtcgctgtcgagggacctgatggcggtggcgggcgacgcgctcaagacgaacataacaacgctgggcccgctggtgctgccgctgtcggagcagctgctgttcatggcgacgctggtcgccaagaagctgctcaagatgaagaaggtgaagccgtacatcccggatttcaaactggcgttcgagcacttctgcatccacgccggcggccgtgccgtgctggacgagctggagagcaacctggcgctcacggattggcacatggagccgtcgcggatgatgctgcaccggttcgggaacacgtccagcagctcgctctggtacgagctggcctacagcgaggccaaggggaggatccggcgccgccaccgggtgtggcagatcgcgttcgggtcagggttcaagtgcaacagcgccgtgtggagggcgctccggtcggtgaacccggcggaggagacgaacccgtggatggacgagatcgacaggtttcccgtggatgttcccaaggtctctaaggtttcaagcgactgaaatgcattgctagttgcgtgaatgatggagcttgcaattgtttggatagaagatctggttggaatttttcatagttcattactatatagttgtaggagataggaaaggcgatcgacttctctaatcttgaattatacatctgttaatgttgtttctgtatggcactcggtccctggcctatctatatagttgactgctcggtgttctgacagttctactatatctgttcattctccaactgttgatcactgttcttcc

SEQ ID NO: 17690 - protein, 517 aa, Zea mays subsp. mays
  peptide (1)..(517): Ceres Seq. ID no. 12363416
MENPAPPTNPASATPSPSRQLPDFQQSVRLKYVKLGYHYLITHGMYLLLTPLMVLVAVYLSTLSPRDVADLWAHLRLNLISVLACSTLLVFLGTAYFLTRPRPVYLVDFACYKPGPERRCTRDTFMRCSRLTGCFTDASLEFQRKILERSGLGEDTYLPPAVTRVPPNPSMDEARAEAREVMFGAVDELLAKTGVKPKDIGILVVNCSLFNPTPSLSAMVVNHYKLRGNVVSYNLGGMGCSAGLLSVDLAKDLLQTHPGSYALVISTENITLNWYSGNDRSKLVSNCLFRMGGAAVLLSNRRSDRRRAKYELVHTVRTHKGADDRCFGCVTQEEDGEGVVGVSLSRDLMAVAGDALKTNITTLGPLVLPLSEQLLFMATLVAKKLLKMKKVKPYIPDFKLAFEHFCIHAGGRAVLDELESNLALTDWHMEPSRMMLHRFGNTSSSSLWYELAYSEAKGRIRRRHRVWQIAFGSGFKCNSAVWRALRSVNPAEETNPWMDEIDRFPVDVPKVSKVSSD

SEQ ID NO: 17691 - protein, 473 aa, Zea mays subsp. mays
  peptide (1)..(473): Ceres Seq. ID no. 12363417
MYLLLTPLMVLVAVYLSTLSPRDVADLWAHLRLNLISVLACSTLLVFLGTAYFLTRPRPVYLVDFACYKPGPERRCTRDTFMRCSRLTGCFTDASLEFQRKILERSGLGEDTYLPPAVTRVPPNPSMDEARAEAREVMFGAVDELLAKTGVKPKDIGILVVNCSLFNPTPSLSAMVVNHYKLRGNVVSYNLGGMGCSAGLLSVDLAKDLLQTHPGSYALVISTENITLNWYSGNDRSKLVSNCLFRMGGAAVLLSNRRSDRRRAKYELVHTVRTHKGADDRCFGCVTQEEDGEGVVGVSLSRDLMAVAGDALKTNITTLGPLVLPLSEQLLFMATLVAKKLLKMKKVKPYIPDFKLAFEHFCIHAGGRAVLDELESNLALTDWHMEPSRMMLHRFGNTSSSSLWYELAYSEAKGRIRRRHRVWQIAFGSGFKCNSAVWRALRSVNPAEETNPWMDEIDRFPVDVPKVSKVSSD

SEQ ID NO: 17692 - protein, 465 aa, Zea mays subsp. mays
  peptide (1)..(465): Ceres Seq. ID no. 12363418
MVLVAVYLSTLSPRDVADLWAHLRLNLISVLACSTLLVFLGTAYFLTRPRPVYLVDFACYKPGPERRCTRDTFMRCSRLTGCFTDASLEFQRKILERSGLGEDTYLPPAVTRVPPNPSMDEARAEAREVMFGAVDELLAKTGVKPKDIGILVVNCSLFNPTPSLSAMVVNHYKLRGNVVSYNLGGMGCSAGLLSVDLAKDLLQTHPGSYALVISTENITLNWYSGNDRSKLVSNCLFRMGGAAVLLSNRRSDRRRAKYELVHTVRTHKGADDRCFGCVTQEEDGEGVVGVSLSRDLMAVAGDALKTNITTLGPLVLPLSEQLLFMATLVAKKLLKMKKVKPYIPDFKLAFEHFCIHAGGRAVLDELESNLALTDWHMEPSRMMLHRFGNTSSSSLWYELAYSEAKGRIRRRHRVWQIAFGSGFKCNSAVWRALRSVNPAEETNPWMDEIDRFPVDVPKVSKVSSD

SEQ ID NO: 17693 - DNA, 1561 bp, Zea mays subsp. mays; identical to SEQ ID NO: 5062
  misc_feature (1)..(1561): Ceres Seq. ID no. 13494774
  misc_feature (1)..(1561): Ortholog of  Ceres SEQ ID NO 12583469 as cited in SEQ ID NO 51031
  misc_feature (1)..(1561): Ortholog of  Ceres SEQ ID NO 13596527 as cited in SEQ ID NO 62582
  misc_feature (1)..(1561): Ortholog of  Ceres SEQ ID NO 15226378 as cited in SEQ ID NO 62741
  misc_feature (1)..(1561): Ortholog of  Ceres SEQ ID NO 15169639 as cited in SEQ ID NO 64624
  misc_feature (1)..(1561): Ortholog of  Ceres SEQ ID NO 14303071 as cited in SEQ ID NO 67114
  misc_feature (1)..(1561): Ortholog of  Ceres SEQ ID NO 13595998 as cited in SEQ ID NO 68161
  misc_feature (1)..(1561): Ortholog of  Ceres SEQ ID NO 14303635 as cited in SEQ ID NO 68503

SEQ ID NO: 17694 - protein, 382 aa, Zea mays subsp. mays; identical to SEQ ID NO: 5063
  peptide (1)..(382): Ceres Seq. ID no. 13494775

SEQ ID NO: 17695 - protein, 376 aa, Zea mays subsp. mays; identical to SEQ ID NO: 5064
  peptide (1)..(376): Ceres Seq. ID no. 13494776

SEQ ID NO: 17696 - protein, 238 aa, Zea mays subsp. mays; identical to SEQ ID NO: 5065
  peptide (1)..(238): Ceres Seq. ID no. 13494777

SEQ ID NO: 17697 - DNA, 1035 bp, Zea mays subsp. mays
  misc_feature (1)..(1035): Ceres Seq. ID no. 12364643
  misc_feature (1)..(1035): Ortholog of  Ceres SEQ ID NO 13638835 as cited in SEQ ID NO 52005
  misc_feature (1)..(1035): Ortholog of  Ceres SEQ ID NO 12614289 as cited in SEQ ID NO 68735
  misc_feature (1)..(1035): Ortholog of  Ceres SEQ ID NO 14309007 as cited in SEQ ID NO 0
tacctacaacatcctaatcaaaagagagagaaagttctcgagctagacgagcgccgtgcgaggagagaagcgagatgagcggtgaggcggcggccgtgggcggaggcgaaggagaggcgaatggcatcccgccgaacgtcaccatctatatcaacaacctcaacgagaagatcaagctcgaagaacttaagaagtccctaacagccgttttttcccagtttgggaaaattcttgatgtgcttgctttcaagactttgaagcataaaggtcaagcttgggttgtcttcgaagatgtcgcatcagctactgaggctctgaagaggatgcagggctttcccttctatgacaaaactatgagaattcaatatgccaagaccaaatcagatattatagcaaaggctgatggcacctttgtacctcgagaaagaagaaagaggactgatgaaaaatctgaaaagaagcagaagcgcgagcatcaccatgatgctggtgctagtcaaattggcatgggtgtaactgcttaccctggtgtttatggggctccacagctcacccagatacctatagcaggaggacaaagggtcatgatgccagagattatcgtaccaaacaacatcttgtttgtccaaaacttgccacacgagacgacgcccatgatgctccagatgctcttctgccagtaccctggcttcaaggaggttcggatgatcgaggcgaagcctgggattgctttcgtggagtatggagacgagacccaggtcactgctgccatgaacaaccttcaaagcttcaaaattacaaaagaaaaccagatggtcatcacatatgcgaagaagtaatgagctcccgagcaatgtttacctgatgtgtgagatgttgtattccgagttttacacaactggtaaatttccttcatgtgttaggtagacagcatcctgaacaacctgttaattgtacccactgggctgcagctatgtgcacttcaggaacggagatgaaatgcaaactgttattatttggtctgctcttgtattc

SEQ ID NO: 17698 - protein, 254 aa, Zea mays subsp. mays
  peptide (1)..(254): Ceres Seq. ID no. 12364644
MSGEAAAVGGGEGEANGIPPNVTIYINNLNEKIKLEELKKSLTAVFSQFGKILDVLAFKTLKHKGQAWVVFEDVASATEALKRMQGFPFYDKTMRIQYAKTKSDIIAKADGTFVPRERRKRTDEKSEKKQKREHHHDAGASQIGMGVTAYPGVYGAPQLTQIPIAGGQRVMMPEIIVPNNILFVQNLPHETTPMMLQMLFCQYPGFKEVRMIEAKPGIAFVEYGDETQVTAAMNNLQSFKITKENQMVITYAKK

SEQ ID NO: 17699 - protein, 171 aa, Zea mays subsp. mays
  peptide (1)..(171): Ceres Seq. ID no. 12364645
MQGFPFYDKTMRIQYAKTKSDIIAKADGTFVPRERRKRTDEKSEKKQKREHHHDAGASQIGMGVTAYPGVYGAPQLTQIPIAGGQRVMMPEIIVPNNILFVQNLPHETTPMMLQMLFCQYPGFKEVRMIEAKPGIAFVEYGDETQVTAAMNNLQSFKITKENQMVITYAKK

SEQ ID NO: 17700 - protein, 161 aa, Zea mays subsp. mays
  peptide (1)..(161): Ceres Seq. ID no. 12364646
MRIQYAKTKSDIIAKADGTFVPRERRKRTDEKSEKKQKREHHHDAGASQIGMGVTAYPGVYGAPQLTQIPIAGGQRVMMPEIIVPNNILFVQNLPHETTPMMLQMLFCQYPGFKEVRMIEAKPGIAFVEYGDETQVTAAMNNLQSFKITKENQMVITYAKK

SEQ ID NO: 17701 - DNA, 2408 bp, Zea mays subsp. mays
  misc_feature (1)..(2408): Ceres Seq. ID no. 12375257
  misc_feature (1)..(2408): Ortholog of  Ceres SEQ ID NO 15178310 as cited in SEQ ID NO 1089
  misc_feature (1)..(2408): Ortholog of  Ceres SEQ ID NO 14307164 as cited in SEQ ID NO 54775
  misc_feature (1)..(2408): Ortholog of  Ceres SEQ ID NO 12583314 as cited in SEQ ID NO 56435
  misc_feature (1)..(2408): Ortholog of  Ceres SEQ ID NO 15226720 as cited in SEQ ID NO 58707
  misc_feature (1)..(2408): Ortholog of  Ceres SEQ ID NO 15168378 as cited in SEQ ID NO 59129
  misc_feature (1)..(2408): Ortholog of  Ceres SEQ ID NO 13584744 as cited in SEQ ID NO 69137
gcacgagaccattacctagaacatcctaatcgaaaagatcgatgacgcaccggaacagtgcaggtgcagcgaaagaggagcgcgccgtcgctgtcgacggccgtgccgagcgccagcagacaagcggcgacgctacaaaacaacgcgccaaccaaccgccccactgctgaccctttccaacctccaagctccctgccttctgccggccggtcggcagcggtggtagcggccaccaccccagggtatggccgcccgctccctcctcctctacgcgctgctgctcctggccctcgccaccgccgcaccgtcccacggcctcactcaagcggatgttgcgaagcgattgaaggaggtgctgtcggagaggaaccgagggcatgagatgctcgattcgtggaatggggatggggacccgtgttctccgtctacctgggaaggcttctcttgcgaacccaaggatggtgcccaggtcgtcgtcaagttgaacttttcttcgaagaaattgcaagggccgattcctgcagagattgctaacttgacggagctaaatgaaatacatctgcagtataataacttcactggatctattccggcatccttttctgctctcagacacctgctgaagctgtcggtgatttgcaaccccttgttgaacaataagcagcctgatggattttctagcggtgtaaatttcagctatggaggatgtgccgcccaagagtactatagctcaccagctgaagagtaccaaagcccacctgcagttgccagtcagaaagtatatgttattggtggtgtcgccggaggatctttggcatgtactgttgcactcggatcgttctttgtttgttttaacaaacgtgaacggcgttctccaaaaaaggactgctcttctacaacaaatcctgtttttcaagaatgcagcatccataacactacaaatcctgcagtacaacagttctccctcaaagcaatccagactgcaataagcaactacaaaactacgataggagagggtgggtttggagcagtttatcgaggtgcattagcaaatgggcaagaagttgcagtaaaagtccgctcaagttcatcgacacagggaacacgtgagtttaacaatgagctaagacttctttctgctgtgtggcatgagaatttagtcccacttatcggctattgctgtgaaaaagatcaacagatattggtctatccgttcatgtccaatggctcactacaagatcgtctttacggtgaggcatcaaaaaggaaagttcttgattggcccacaagactatctgtttgcattggtgctgctagagggctagtatatctgcacaattttgccgggcgttgtatcatacacagagatattaaatcgagcaacatacttctggatcacagcatgtgtggcaaggtagccgactttgggttttccaagtatgcaccacaggaaggtgacagcaatccatcaatggaagtgaggggaactgctgggtatttggaccctgaatactattccactcaggtgttatcaaccagaagcgacgtcttcagtttcggagtagtcctgttagaaattgtgacaggaagagaacctcttgatgtcaaaaggcctcgtcatgaatggagcttagttgagtgggcaaaaccatacatcagggagtacaagatcgaggagatggtggaccctggcataaaagggcagtattgctcagaggccatgtggagagtgctcgaggtcgcatctgtgtgcaccgagcccttctcaaccttcaggccgaccatggaggacgtcctgagggagctggaggacgctctgatcatcgagaacaacgcgtccgagtacatgaggtccatcgagagcacagggactctggggtccaaccgctatctgtccatcgacaggaagatgttcgcgtcagggtcagcgcgaatcgagtcgacgaaggggaatctgcaagcaatgccctcgcttccgcggtaactagacgccgcattgtgatttcgtagcgggcgtcgtcagggtgtgatccatgctcaaggcacatctaaccacgctgaggcctgactgagcacctgagatgggcatagacatgaagggatagtctgtactctgtaccatgtacagagcccattcagtggtgagagcacagatcagcgatacctacactgggaaatgccttctgaagccaatgtgctagttttgcctgttgaatttcccaaaagcaggcgaatgtgcgggcacaaactattctttggaccattataaacacgtaaaatgtgtcgagggaatccctcaagaaatcgaatattcagatctgtaccgtcacttcattatgtgaactattgctcgcttgttgtaattgtcattcttgcctaataaaccgatcaacagatgaattttcttc

SEQ ID NO: 17702 - protein, 579 aa, Zea mays subsp. mays
  peptide (1)..(579): Ceres Seq. ID no. 12375258
MAARSLLLYALLLLALATAAPSHGLTQADVAKRLKEVLSERNRGHEMLDSWNGDGDPCSPSTWEGFSCEPKDGAQVVVKLNFSSKKLQGPIPAEIANLTELNEIHLQYNNFTGSIPASFSALRHLLKLSVICNPLLNNKQPDGFSSGVNFSYGGCAAQEYYSSPAEEYQSPPAVASQKVYVIGGVAGGSLACTVALGSFFVCFNKRERRSPKKDCSSTTNPVFQECSIHNTTNPAVQQFSLKAIQTAISNYKTTIGEGGFGAVYRGALANGQEVAVKVRSSSSTQGTREFNNELRLLSAVWHENLVPLIGYCCEKDQQILVYPFMSNGSLQDRLYGEASKRKVLDWPTRLSVCIGAARGLVYLHNFAGRCIIHRDIKSSNILLDHSMCGKVADFGFSKYAPQEGDSNPSMEVRGTAGYLDPEYYSTQVLSTRSDVFSFGVVLLEIVTGREPLDVKRPRHEWSLVEWAKPYIREYKIEEMVDPGIKGQYCSEAMWRVLEVASVCTEPFSTFRPTMEDVLRELEDALIIENNASEYMRSIESTGTLGSNRYLSIDRKMFASGSARIESTKGNLQAMPSLPR

SEQ ID NO: 17703 - protein, 533 aa, Zea mays subsp. mays
  peptide (1)..(533): Ceres Seq. ID no. 12375259
MLDSWNGDGDPCSPSTWEGFSCEPKDGAQVVVKLNFSSKKLQGPIPAEIANLTELNEIHLQYNNFTGSIPASFSALRHLLKLSVICNPLLNNKQPDGFSSGVNFSYGGCAAQEYYSSPAEEYQSPPAVASQKVYVIGGVAGGSLACTVALGSFFVCFNKRERRSPKKDCSSTTNPVFQECSIHNTTNPAVQQFSLKAIQTAISNYKTTIGEGGFGAVYRGALANGQEVAVKVRSSSSTQGTREFNNELRLLSAVWHENLVPLIGYCCEKDQQILVYPFMSNGSLQDRLYGEASKRKVLDWPTRLSVCIGAARGLVYLHNFAGRCIIHRDIKSSNILLDHSMCGKVADFGFSKYAPQEGDSNPSMEVRGTAGYLDPEYYSTQVLSTRSDVFSFGVVLLEIVTGREPLDVKRPRHEWSLVEWAKPYIREYKIEEMVDPGIKGQYCSEAMWRVLEVASVCTEPFSTFRPTMEDVLRELEDALIIENNASEYMRSIESTGTLGSNRYLSIDRKMFASGSARIESTKGNLQAMPSLPR

SEQ ID NO: 17704 - DNA, 1315 bp, Zea mays subsp. mays
  misc_feature (1)..(1315): Ceres Seq. ID no. 12417755
  misc_feature (1)..(1315): Ortholog of  Ceres SEQ ID NO 13596436 as cited in SEQ ID NO 68754
  misc_feature (1)..(1315): Ortholog of  Ceres SEQ ID NO 15180160 as cited in SEQ ID NO 0
gcacgagaccattacctagaacatcctaatcgaaaaacctcccgtcgtcactccaccgccgtccccttgagcgctcgccccaacctggggacgctcgccccagccgatctgatccgtctcaactccattaaaaaaatctctcctttccccctccctatccaggaaaaggagaaggtaccacctcggtcgatcttccctccatttactcctccgggcgaggtcccgattcgatcgaaggcggcggagagagatgaggaagcgtgagcgagagaacccgtgcgggatctgcgggcactaccacaagtacgaggagggggaggtgtgcggcgtctgcggtcaccgcccacctgcagcgtcaccagtaggggccaggcagcaagactcggcgttcccgtccgagatcctcaaggagttcctcttcctcggcagctacgacaacgcctcccgctcggagctcctcaagaccatcggcgtctcgcacatcctcaatactgtacctttgtgccaaaacctttaccggaattcattcacttatcactgccttcaagaggacaagactctgcagtttgatgatgcaaaccagtttctagagcaatgtgagagggagaaagcacgagtcctagtccattgcatgtctgggaaaagtagatcggcagcttttgtaatagccttcttgatgaagtcgagaggttggagattggcacaatcttttcagtgggtgaaagagcggagaccacaagtgcaactgtctgatgcagcacagcagcagctgattgagtatgaaaagaagctttttggttctaatgatggcagcataccagctcaaccttttgctccagtggattcgctcccttctcttggatttggttttccaaaaccaccaggcgacatccaagcgcctacctttaatcagcaggctccagcatctatctttgagcgcgttaccccgaacagcttccctagtaatttcatattcggagccgaaagaactagtgatagtgatgcgaaacttccagatagcaacaatttcggcgtggtaaactcgtctgggagtgatagcatgatggacagctcctaggatggttttgccttcaccaaggctatctccagcagcttaatcctcaattcctcatctctcgtttcaaatttcacttccactcttgtacaactatagcctgatatacaaaagaaatgactcagtcgcaaatttagtcaggtttctcgggatgtttttttatttctgagaaggaaacgcatttttgtaatagtatgttgtaatatttgccagtattactaaattgctgctgtgcatttc

SEQ ID NO: 17705 - protein, 275 aa, Zea mays subsp. mays
  peptide (1)..(275): Ceres Seq. ID no. 12417756
MRKRERENPCGICGHYHKYEEGEVCGVCGHRPPAASPVGARQQDSAFPSEILKEFLFLGSYDNASRSELLKTIGVSHILNTVPLCQNLYRNSFTYHCLQEDKTLQFDDANQFLEQCEREKARVLVHCMSGKSRSAAFVIAFLMKSRGWRLAQSFQWVKERRPQVQLSDAAQQQLIEYEKKLFGSNDGSIPAQPFAPVDSLPSLGFGFPKPPGDIQAPTFNQQAPASIFERVTPNSFPSNFIFGAERTSDSDAKLPDSNNFGVVNSSGSDSMMDSS

SEQ ID NO: 17706 - protein, 148 aa, Zea mays subsp. mays
  peptide (1)..(148): Ceres Seq. ID no. 12417757
MSGKSRSAAFVIAFLMKSRGWRLAQSFQWVKERRPQVQLSDAAQQQLIEYEKKLFGSNDGSIPAQPFAPVDSLPSLGFGFPKPPGDIQAPTFNQQAPASIFERVTPNSFPSNFIFGAERTSDSDAKLPDSNNFGVVNSSGSDSMMDSS

SEQ ID NO: 17707 - DNA, 2634 bp, Zea mays subsp. mays
  misc_feature (1)..(2634): Ceres Seq. ID no. 12361141
  misc_feature (1)..(2634): Ortholog of  Ceres SEQ ID NO 15171224 as cited in SEQ ID NO 52348
gcacgagaccattacctagaacatcctaatcgaaaaagcctacacgcccccgcctcctgccctctgtccacatcctcgcctctccccactagttcgctcgcgtgatggtggtgcgggagcagcggaacaagggttcgtcgtcggccaccctgtgacaccccgcccacgcccccgcggcggaacctgcaaacccggaggccggagctccgacttcgtcggccatcgaccgcgtctgatcggcgctgggacctgccgtccggacgaaatcggtcagcatgacggggcccaatgagaaggcggcggcgggaggcgggggtggcgagaggcgcaagtacccgatccacgtggaggactacgagctgtacgaggagatcgggcagggcgtcagcgccatcgtgtaccgcgcactctgcaagccactcgacgagatcgtcgccgtcaaggtggtcgacttcgagcgcaccaacagcgacctgaacaacatcgttcgtgaagctcagacaatgattttgatagaccatcctaacgttgtcaaggcgcattgttcatttgcaaaagaccaaacgttatgggtggttatgccgtatatggctggggggtcctgtcttcacataatgaaatcagtgcatcctactggattcgaggaacccatcatcgcgactatacttcgtgaagtcctgaaaggtttagagtatcttcaccatcatggctctatacatcgagatgtgaaggcaggaaatattctagtcgattctcggggtggaattaaacttggggactttggagtctctgcttgcctttttgattctggtgatagacagagggccaggaatacttttgtgggaacaccttgctggatggcgcccgaggttatggagcaactacatggatatgatttcagagcagacatatggtcctttggaattactgcacttgaaacttgctcatggtcatgctcctttctctaagtaccctcccatgaaggtcttgctcatgacacttcagaatgctcctccaggtcttgactatgaaagagataagaaattcacgaggaacttcaagcaaatggttgctatgtgtttggtaaaagacccttcaaagaggccttcggcaaaaaagttgttgaagcaaccatttttcaagcaagctcgttccactgattttattgcacgaaagcttttagaaggattgcctggccttggtgttagatatcaagctttgaaggaaaaggatcaacatttaatggctcaaaagaaaatgtctgatggaaagaaagaagaaatctcgcaggatgaatacaaaaggggtatcagcagctggacctttgacatggatgacctgagatctcaagcttcattgggcacagaatgtgaagacagtaccttatgcaaagattcagatatatctttctatgacttggacagtttacaggatcaagcaccagaagggccacacttgttgagagatttctcaacgaagtatgatgctgacattgaaaatgatatgacaaccaaagataagtcagccgtttcatctcctgatcagcctgctagcttagtgaggaatgcttctatgcgtgggatgcccataaacggttctttcaggaaagacaactctacagaaagcttcgatttggaatgtcaagagaaacatctggacattgttccgactagctcatcccctgaaaggaagttttcttttagttcttgctcatcaaatgggctccttttgtccaaagagagctctaaacagcaaactagcatccacaaccttgacaagtgtaatggagggcatttgcatgtatcagatgaaacatcttctgaagctgctcctaagacacataaatcagcagaggaccatgatgatagatccaaacctccacttataagaggtcgatttagagttatacctgggcatgttgactcaaaggctcaaccacctggcctacagaagtgtcacagcatgcagacaatttctcgccttccatcattaagtataccctcttccgcagaagttgcatcaaccattattggtggctccttctacatgcagctatatagtattctacagacaaatatgcttcagagggaccaaatacttaacgcgatgaagcaggtgagtggttgtgctatggcttcaccaggcgtaccttctatggcttcaccgtgtatcccttccacaagtcgctcgacatctccatcaggtgtaccatcagttgacagatccatgctggaagctgcacaagaaagggagaaagagctgctgaatgaggtcttggagctgcaatggcggttattgtgcacacaagatgaggttcagaagcttaaagcaaaggcagcgcagatctgatgctgaagctgttaagggagcattaagggcgcgtcatgataagatgatctgttcatgcggttttcaaatggctatttagcataggagagagatacaaaattaaggattggtgtatatttaaaaaggtgctagtgatgctcgagtgtccaatcctgtctaagcaggacattaatttcgtacaatctgtgtgtttgtgtttatgggtggcatggcgctgtgtttttgttggagcgcaattcccaggttgggacttgggaaagatagcttaacatgcctatgggtttt

SEQ ID NO: 17708 - protein, 487 aa, Zea mays subsp. mays
  peptide (1)..(487): Ceres Seq. ID no. 12361142
MDMISEQTYGPLELLHLKLAHGHAPFSKYPPMKVLLMTLQNAPPGLDYERDKKFTRNFKQMVAMCLVKDPSKRPSAKKLLKQPFFKQARSTDFIARKLLEGLPGLGVRYQALKEKDQHLMAQKKMSDGKKEEISQDEYKRGISSWTFDMDDLRSQASLGTECEDSTLCKDSDISFYDLDSLQDQAPEGPHLLRDFSTKYDADIENDMTTKDKSAVSSPDQPASLVRNASMRGMPINGSFRKDNSTESFDLECQEKHLDIVPTSSSPERKFSFSSCSSNGLLLSKESSKQQTSIHNLDKCNGGHLHVSDETSSEAAPKTHKSAEDHDDRSKPPLIRGRFRVIPGHVDSKAQPPGLQKCHSMQTISRLPSLSIPSSAEVASTIIGGSFYMQLYSILQTNMLQRDQILNAMKQVSGCAMASPGVPSMASPCIPSTSRSTSPSGVPSVDRSMLEAAQEREKELLNEVLELQWRLLCTQDEVQKLKAKAAQI

SEQ ID NO: 17709 - protein, 485 aa, Zea mays subsp. mays
  peptide (1)..(485): Ceres Seq. ID no. 12361143
MISEQTYGPLELLHLKLAHGHAPFSKYPPMKVLLMTLQNAPPGLDYERDKKFTRNFKQMVAMCLVKDPSKRPSAKKLLKQPFFKQARSTDFIARKLLEGLPGLGVRYQALKEKDQHLMAQKKMSDGKKEEISQDEYKRGISSWTFDMDDLRSQASLGTECEDSTLCKDSDISFYDLDSLQDQAPEGPHLLRDFSTKYDADIENDMTTKDKSAVSSPDQPASLVRNASMRGMPINGSFRKDNSTESFDLECQEKHLDIVPTSSSPERKFSFSSCSSNGLLLSKESSKQQTSIHNLDKCNGGHLHVSDETSSEAAPKTHKSAEDHDDRSKPPLIRGRFRVIPGHVDSKAQPPGLQKCHSMQTISRLPSLSIPSSAEVASTIIGGSFYMQLYSILQTNMLQRDQILNAMKQVSGCAMASPGVPSMASPCIPSTSRSTSPSGVPSVDRSMLEAAQEREKELLNEVLELQWRLLCTQDEVQKLKAKAAQI

SEQ ID NO: 17710 - protein, 456 aa, Zea mays subsp. mays
  peptide (1)..(456): Ceres Seq. ID no. 12361144
MKVLLMTLQNAPPGLDYERDKKFTRNFKQMVAMCLVKDPSKRPSAKKLLKQPFFKQARSTDFIARKLLEGLPGLGVRYQALKEKDQHLMAQKKMSDGKKEEISQDEYKRGISSWTFDMDDLRSQASLGTECEDSTLCKDSDISFYDLDSLQDQAPEGPHLLRDFSTKYDADIENDMTTKDKSAVSSPDQPASLVRNASMRGMPINGSFRKDNSTESFDLECQEKHLDIVPTSSSPERKFSFSSCSSNGLLLSKESSKQQTSIHNLDKCNGGHLHVSDETSSEAAPKTHKSAEDHDDRSKPPLIRGRFRVIPGHVDSKAQPPGLQKCHSMQTISRLPSLSIPSSAEVASTIIGGSFYMQLYSILQTNMLQRDQILNAMKQVSGCAMASPGVPSMASPCIPSTSRSTSPSGVPSVDRSMLEAAQEREKELLNEVLELQWRLLCTQDEVQKLKAKAAQI

SEQ ID NO: 17711 - DNA, 1503 bp, Zea mays subsp. mays
  misc_feature (1)..(1503): Ceres Seq. ID no. 12361279
  misc_feature (1)..(1503): Ortholog of  Ceres SEQ ID NO 13597581 as cited in SEQ ID NO 65344
gcacgagaccattacctagaacatcctaatcaaaaaagcagcgtccgctccaaaacgcaacggtcgaatctcctcgaattcgaattgcagccggtgccacccacctcacatggcggcggcggaagagatgatggcggtgctggacaaggagacgctggcgctgatgggtctgggcaacgccgccgccgcggtggttgtcgagtgcgagaagttcaaggagaacgcgaggccgctcaagcgcgggcgcgacgtgtccaaactcaaccacgcgctcaaggcacacgccgatcccgcccagcgcgccactcttctcgaagcccgaaagaagatgattgaggcaatctacgagtaccaaggcgaggatccgctccaaccgtggctggactgcatcaagtgggtgcaggagtattttccgaccggcggcgagtgctcagggttggtggtgttgtacgagcagtgcgtgcggaccttattggatgacgagcgctacaaggacgacctccgcttcctcaaagtgtggctggaatacgcggggaactgtgctgatgctgaggtaatatacaggttcctggaggccaaccagattgggcagggccatgcgatctactacatgtcttacgcatcgttgatggagtcaaagaacaagttgaggaaagctaatgagatctttgtccttggtatagctagaaaagcgaagcctctggagaagttggaagctgtatacagggcatttcttcgaagatcaatcaaaaagagggaacaagagcaggatgatacagtagatgatgatctgccaaaacgcagtttcgggaataacttgaaacgagatgaaaacagaaatcagcaagcagggaactcccacctggggagaccaagggcactgcagaggccgctttcagtttacaaagatgaaagtccattaccaaatcagggccttgacagagtgaggagcaaagaaaataacacaagttggcgcaccctcggaacacgagcagaacggaacaaggaaaataacatgatgcctgctaaatggacgtctcacaagattccacagaagttaggagcaagaggagcggttcaatcaacccgagccagttgttccattgaagtcttcgtcgaggaagactgcacacatgaacctgctcggccggtgccaaagagcccaaatccttctgttctgaagctcaggcaaacaacaagcaaaagccttaagaaggagactgaattgctcaaggagaacccgctgcgcaacttccccctgagcaggcttaggtaatcagcatcttgctggttctgagaaacatctcgtacgttatgatttggtcgtatgtatggttgctgtgaggtgttgtgcccaaaaaaaaggctttattagcctctaaagcttagacgagcaatgtatgcctatggcattacccaagtgctgtaaggttctgcattatattgacacggcgtgcttattattgatagacctgcagatctcgtgcgtgcctatgtgaatcg

SEQ ID NO: 17712 - protein, 388 aa, Zea mays subsp. mays
  peptide (1)..(388): Ceres Seq. ID no. 12361280
MAAAEEMMAVLDKETLALMGLGNAAAAVVVECEKFKENARPLKRGRDVSKLNHALKAHADPAQRATLLEARKKMIEAIYEYQGEDPLQPWLDCIKWVQEYFPTGGECSGLVVLYEQCVRTLLDDERYKDDLRFLKVWLEYAGNCADAEVIYRFLEANQIGQGHAIYYMSYASLMESKNKLRKANEIFVLGIARKAKPLEKLEAVYRAFLRRSIKKREQEQDDTVDDDLPKRSFGNNLKRDENRNQQAGNSHLGRPRALQRPLSVYKDESPLPNQGLDRVRSKENNTSWRTLGTRAERNKENNMMPAKWTSHKIPQKLGARGAVQSTRASCSIEVFVEEDCTHEPARPVPKSPNPSVLKLRQTTSKSLKKETELLKENPLRNFPLSRLR

SEQ ID NO: 17713 - protein, 382 aa, Zea mays subsp. mays
  peptide (1)..(382): Ceres Seq. ID no. 12361281
MMAVLDKETLALMGLGNAAAAVVVECEKFKENARPLKRGRDVSKLNHALKAHADPAQRATLLEARKKMIEAIYEYQGEDPLQPWLDCIKWVQEYFPTGGECSGLVVLYEQCVRTLLDDERYKDDLRFLKVWLEYAGNCADAEVIYRFLEANQIGQGHAIYYMSYASLMESKNKLRKANEIFVLGIARKAKPLEKLEAVYRAFLRRSIKKREQEQDDTVDDDLPKRSFGNNLKRDENRNQQAGNSHLGRPRALQRPLSVYKDESPLPNQGLDRVRSKENNTSWRTLGTRAERNKENNMMPAKWTSHKIPQKLGARGAVQSTRASCSIEVFVEEDCTHEPARPVPKSPNPSVLKLRQTTSKSLKKETELLKENPLRNFPLSRLR

SEQ ID NO: 17714 - protein, 381 aa, Zea mays subsp. mays
  peptide (1)..(381): Ceres Seq. ID no. 12361282
MAVLDKETLALMGLGNAAAAVVVECEKFKENARPLKRGRDVSKLNHALKAHADPAQRATLLEARKKMIEAIYEYQGEDPLQPWLDCIKWVQEYFPTGGECSGLVVLYEQCVRTLLDDERYKDDLRFLKVWLEYAGNCADAEVIYRFLEANQIGQGHAIYYMSYASLMESKNKLRKANEIFVLGIARKAKPLEKLEAVYRAFLRRSIKKREQEQDDTVDDDLPKRSFGNNLKRDENRNQQAGNSHLGRPRALQRPLSVYKDESPLPNQGLDRVRSKENNTSWRTLGTRAERNKENNMMPAKWTSHKIPQKLGARGAVQSTRASCSIEVFVEEDCTHEPARPVPKSPNPSVLKLRQTTSKSLKKETELLKENPLRNFPLSRLR

SEQ ID NO: 17715 - DNA, 980 bp, Zea mays subsp. mays; identical to SEQ ID NO: 13583
  misc_feature (1)..(980): Ceres Seq. ID no. 13637386
  misc_feature (1)..(980): Ortholog of  Ceres SEQ ID NO 15176155 as cited in SEQ ID NO 0

SEQ ID NO: 17716 - protein, 326 aa, Zea mays subsp. mays; identical to SEQ ID NO: 13584
  peptide (1)..(326): Ceres Seq. ID no. 13637387
  misc_feature (256)..(256): Xaa is any aa, unknown or other
  misc_feature (303)..(303): Xaa is any aa, unknown or other
  misc_feature (322)..(322): Xaa is any aa, unknown or other

SEQ ID NO: 17717 - protein, 296 aa, Zea mays subsp. mays; identical to SEQ ID NO: 13585
  peptide (1)..(296): Ceres Seq. ID no. 13637388
  misc_feature (226)..(226): Xaa is any aa, unknown or other
  misc_feature (273)..(273): Xaa is any aa, unknown or other
  misc_feature (292)..(292): Xaa is any aa, unknown or other

SEQ ID NO: 17718 - protein, 255 aa, Zea mays subsp. mays; identical to SEQ ID NO: 13586
  peptide (1)..(255): Ceres Seq. ID no. 13637389
  misc_feature (185)..(185): Xaa is any aa, unknown or other
  misc_feature (232)..(232): Xaa is any aa, unknown or other
  misc_feature (251)..(251): Xaa is any aa, unknown or other

SEQ ID NO: 17719 - DNA, 1553 bp, Zea mays subsp. mays; identical to SEQ ID NO: 5519
  misc_feature (1)..(1553): Ceres Seq. ID no. 12350501
  misc_feature (1)..(1553): Ortholog of  Ceres SEQ ID NO 15175507 as cited in SEQ ID NO 20619
  misc_feature (1)..(1553): Ortholog of  Ceres SEQ ID NO 13639663 as cited in SEQ ID NO 57850
  misc_feature (1)..(1553): Ortholog of  Ceres SEQ ID NO 15224330 as cited in SEQ ID NO 58808
  misc_feature (1)..(1553): Ortholog of  Ceres SEQ ID NO 14302150 as cited in SEQ ID NO 0

SEQ ID NO: 17720 - protein, 336 aa, Zea mays subsp. mays; identical to SEQ ID NO: 5520
  peptide (1)..(336): Ceres Seq. ID no. 12350502

SEQ ID NO: 17721 - protein, 330 aa, Zea mays subsp. mays; identical to SEQ ID NO: 5521
  peptide (1)..(330): Ceres Seq. ID no. 12350503

SEQ ID NO: 17722 - protein, 235 aa, Zea mays subsp. mays; identical to SEQ ID NO: 5522
  peptide (1)..(235): Ceres Seq. ID no. 12350504

SEQ ID NO: 17723 - DNA, 1508 bp, Zea mays subsp. mays
  misc_feature (1)..(1508): Ceres Seq. ID no. 12362611
  misc_feature (1)..(1508): Ortholog of  Ceres SEQ ID NO 13662164 as cited in SEQ ID NO 67158
  misc_feature (1)..(1508): Ortholog of  Ceres SEQ ID NO 15179123 as cited in SEQ ID NO 0
gcacgagaccattacctagaacatcctaatcaaaaaggccgctctctctgccacactcgggtgcctccaccaccaccagtagcagcagcagcaggatcaaaaggccaatgggggcgcacgccaccgcggccgcggccgccgtcctgctcgtcgccacctgcgttgcggcggtggcggcggcggcggcggcggcgctgctgcagcacgagcccggcaggatctcaggggacgcggtgggcgtgctggacgacgaccccgtggggaagctgaaggtgttcgtgtacgagatgccgcgcaagtacaacaggatgctgctggacaaggacagccggtgcctgcaccacatgttcgcggcggagatcttcatgcaccagttcctgctgtcgagcgcggtgcggacgctggacccggaggaggccgactggttctacacgcccgcgtacaccacctgcgacctcacgccgcagggcttcccgctgccgttccgggcgccgcggatcatgcgcagcgccatccgctacgtggccaccacgtggccnttctggaaccgcaccgacggcgccgaccacttcttcctcacgccgcacgacttcggcgcctgcttccactaccaggaggagcgcgccatggagcggggcatcctgccgctgctccgccgcgccacgctggtgcagacgttcggccagcgcaaccacgtgtgcctgcaggacggctccatcaccgtcccgccctacgccgacccgcgcaagatgcaggcgcacctcatcagccccggcacgccgcgctccatcttcgtctacttcaggggcctcttctacgacatgggcaacgaccccgagggcggctactacgccaggggcgctcgcgcgtcggtgtgggagaacttcaaggacaacccgctgttcgacatctcgacggagcacccgtcgacgtactacgaggacatgcagcgcgccatcttctgcctgtgcccgctggggtgggcgccctggagcccccggctggtggaggcggtggtgttcgggtgcatccccgtcatcatcgccgacgacatcgtgctgccgttcgcggacgccatcccctgggaggacatcagcgtgttcgtggcggagcgggacgtgccgcgcctcgactccatcctcacctccatcccgctgcccgacatcctgcggaggcagcgcctgctggcgcgggactccgtcaagcaggcgctgctgttccaccagcccgccaggcccggggacgccttccaccaggtgctcaacgggctggcgcggaagctgccgcacggcgagggcgtgttcctgcagcccggggagaaggcgctcgactgggacgccggactccagagcgacctcaagccctggtagtggactggactcgttgtacatctcttcgtgttcctttgtactctttcatttgacatgacatggatggatcacgcattagtttttgtaccacggcccgtttacatgcagcagcaatatactaatatatagtgtatttcc

SEQ ID NO: 17724 - protein, 420 aa, Zea mays subsp. mays
  peptide (1)..(420): Ceres Seq. ID no. 12362612
  misc_feature (144)..(144): Xaa is any aa, unknown or other
MGAHATAAAAAVLLVATCVAAVAAAAAAALLQHEPGRISGDAVGVLDDDPVGKLKVFVYEMPRKYNRMLLDKDSRCLHHMFAAEIFMHQFLLSSAVRTLDPEEADWFYTPAYTTCDLTPQGFPLPFRAPRIMRSAIRYVATTWXFWNRTDGADHFFLTPHDFGACFHYQEERAMERGILPLLRRATLVQTFGQRNHVCLQDGSITVPPYADPRKMQAHLISPGTPRSIFVYFRGLFYDMGNDPEGGYYARGARASVWENFKDNPLFDISTEHPSTYYEDMQRAIFCLCPLGWAPWSPRLVEAVVFGCIPVIIADDIVLPFADAIPWEDISVFVAERDVPRLDSILTSIPLPDILRRQRLLARDSVKQALLFHQPARPGDAFHQVLNGLARKLPHGEGVFLQPGEKALDWDAGLQSDLKPW

SEQ ID NO: 17725 - protein, 360 aa, Zea mays subsp. mays
  peptide (1)..(360): Ceres Seq. ID no. 12362613
  misc_feature (84)..(84): Xaa is any aa, unknown or other
MPRKYNRMLLDKDSRCLHHMFAAEIFMHQFLLSSAVRTLDPEEADWFYTPAYTTCDLTPQGFPLPFRAPRIMRSAIRYVATTWXFWNRTDGADHFFLTPHDFGACFHYQEERAMERGILPLLRRATLVQTFGQRNHVCLQDGSITVPPYADPRKMQAHLISPGTPRSIFVYFRGLFYDMGNDPEGGYYARGARASVWENFKDNPLFDISTEHPSTYYEDMQRAIFCLCPLGWAPWSPRLVEAVVFGCIPVIIADDIVLPFADAIPWEDISVFVAERDVPRLDSILTSIPLPDILRRQRLLARDSVKQALLFHQPARPGDAFHQVLNGLARKLPHGEGVFLQPGEKALDWDAGLQSDLKPW

SEQ ID NO: 17726 - protein, 353 aa, Zea mays subsp. mays
  peptide (1)..(353): Ceres Seq. ID no. 12362614
  misc_feature (77)..(77): Xaa is any aa, unknown or other
MLLDKDSRCLHHMFAAEIFMHQFLLSSAVRTLDPEEADWFYTPAYTTCDLTPQGFPLPFRAPRIMRSAIRYVATTWXFWNRTDGADHFFLTPHDFGACFHYQEERAMERGILPLLRRATLVQTFGQRNHVCLQDGSITVPPYADPRKMQAHLISPGTPRSIFVYFRGLFYDMGNDPEGGYYARGARASVWENFKDNPLFDISTEHPSTYYEDMQRAIFCLCPLGWAPWSPRLVEAVVFGCIPVIIADDIVLPFADAIPWEDISVFVAERDVPRLDSILTSIPLPDILRRQRLLARDSVKQALLFHQPARPGDAFHQVLNGLARKLPHGEGVFLQPGEKALDWDAGLQSDLKPW

SEQ ID NO: 17727 - DNA, 494 bp, Zea mays subsp. mays
  misc_feature (1)..(494): Ceres Seq. ID no. 11030852
  misc_feature (1)..(494): Ortholog of  Ceres SEQ ID NO 12465083 as cited in SEQ ID NO 68239
atcaagatgcgtgagatcgctgaagcttaccttggcagcacgatcaagaatgctgttgtcacggtccctgcctacttcaacgactcacagaggcaggccacgaaggatgctggggtgattgctggcctcaatgtgctgcgtatcatcaatgagccaaccgctgctgctattgcctatggtcttgacaagaaggcaaccagcgtcggtgagaagaatgtcctcatctttgaccttggaggtggtaccttcgatgtctccctccttactattgaggaaggtatctttgaggtcaaggccacagctggcgacacccatcttgggggtgaggactttgacaacaggatggtcaaccactttgtccaggagttcaagaggaagaacaagaaggatatcactggcaacccgagggctctccggaggctgaggacctcttgtgagagggccaagagaactctgtcttccactgcccagaccaccattgagattgactcgct

SEQ ID NO: 17728 - protein, 164 aa, Zea mays subsp. mays
  peptide (1)..(164): Ceres Seq. ID no. 11030853
IKMREIAEAYLGSTIKNAVVTVPAYFNDSQRQATKDAGVIAGLNVLRIINEPTAAAIAYGLDKKATSVGEKNVLIFDLGGGTFDVSLLTIEEGIFEVKATAGDTHLGGEDFDNRMVNHFVQEFKRKNKKDITGNPRALRRLRTSCERAKRTLSSTAQTTIEIDS

SEQ ID NO: 17729 - protein, 162 aa, Zea mays subsp. mays
  peptide (1)..(162): Ceres Seq. ID no. 11030854
MREIAEAYLGSTIKNAVVTVPAYFNDSQRQATKDAGVIAGLNVLRIINEPTAAAIAYGLDKKATSVGEKNVLIFDLGGGTFDVSLLTIEEGIFEVKATAGDTHLGGEDFDNRMVNHFVQEFKRKNKKDITGNPRALRRLRTSCERAKRTLSSTAQTTIEIDS

SEQ ID NO: 17730 - protein, 97 aa, Zea mays subsp. mays
  peptide (1)..(97): Ceres Seq. ID no. 11030855
MCCVSSMSQPLLLLPMVLTRRQPASVRRMSSSLTLEVVPSMSPSLLLRKVSLRSRPQLATPILGVRTLTTGWSTTLSRSSRGRTRRISLATRGLSGG

SEQ ID NO: 17731 - DNA, 1275 bp, Zea mays subsp. mays; identical to SEQ ID NO: 7199
  misc_feature (1)..(1275): Ceres Seq. ID no. 12366288
  misc_feature (1)..(1275): Ortholog of  Ceres SEQ ID NO 13659644 as cited in SEQ ID NO 67118
  misc_feature (1)..(1275): Ortholog of  Ceres SEQ ID NO 14302856 as cited in SEQ ID NO 68824

SEQ ID NO: 17732 - protein, 337 aa, Zea mays subsp. mays; identical to SEQ ID NO: 7200
  peptide (1)..(337): Ceres Seq. ID no. 12366289

SEQ ID NO: 17733 - protein, 329 aa, Zea mays subsp. mays; identical to SEQ ID NO: 7201
  peptide (1)..(329): Ceres Seq. ID no. 12366290

SEQ ID NO: 17734 - protein, 326 aa, Zea mays subsp. mays; identical to SEQ ID NO: 7202
  peptide (1)..(326): Ceres Seq. ID no. 12366291

SEQ ID NO: 17735 - DNA, 490 bp, Zea mays subsp. mays
  misc_feature (1)..(490): Ceres Seq. ID no. 5006152
  misc_feature (1)..(490): Ortholog of  Ceres SEQ ID NO 13594809 as cited in SEQ ID NO 51847
  misc_feature (1)..(490): Ortholog of  Ceres SEQ ID NO 15226273 as cited in SEQ ID NO 64934
  misc_feature (1)..(490): Ortholog of  Ceres SEQ ID NO 12617639 as cited in SEQ ID NO 65219
  misc_feature (1)..(490): Ortholog of  Ceres SEQ ID NO 15173998 as cited in SEQ ID NO 0
  misc_feature (1)..(490): Ortholog of  Ceres SEQ ID NO 15178333 as cited in SEQ ID NO 0
atcacccgcgtccgccaccgccgccgcctttcgtaccgcggcccctaaacccctttcctcgttcccctccgtctctcagttaggcacaatgatgctagctaataagcttggtggtttgctcaagaatgctacgagttcaaagagttcaaatatgtctgtctaccaagcaatcagatgcatgtcatcatccaagctttttgttggagggctttcttatggaaccgatgatcacagtctcagagacgagtttgccaaatatggacaagttattgaagctaagattatccttgatcgtgagtctgggaggtccagaggttttggctttataacttacacgtcttctgaggaggcttcggctgccatcactgccatggatggaaagactctggatggacggaacatacgggttaatcatgctaacgagaggacaggtggcttcccgcagcagcggtggttatggtggtggcggctatggtggtggcaytacggc

SEQ ID NO: 17736 - protein, 163 aa, Zea mays subsp. mays
  peptide (1)..(163): Ceres Seq. ID no. 5006153
  misc_feature (161)..(161): Xaa is any aa, unknown or other
SPASATAAAFRTAAPKPLSSFPSVSQLGTMMLANKLGGLLKNATSSKSSNMSVYQAIRCMSSSKLFVGGLSYGTDDHSLRDEFAKYGQVIEAKIILDRESGRSRGFGFITYTSSEEASAAITAMDGKTLDGRNIRVNHANERTGGFPQQRWLWWWRLWWWXYG

SEQ ID NO: 17737 - protein, 134 aa, Zea mays subsp. mays
  peptide (1)..(134): Ceres Seq. ID no. 5006154
  misc_feature (132)..(132): Xaa is any aa, unknown or other
MMLANKLGGLLKNATSSKSSNMSVYQAIRCMSSSKLFVGGLSYGTDDHSLRDEFAKYGQVIEAKIILDRESGRSRGFGFITYTSSEEASAAITAMDGKTLDGRNIRVNHANERTGGFPQQRWLWWWRLWWWXYG

SEQ ID NO: 17738 - protein, 133 aa, Zea mays subsp. mays
  peptide (1)..(133): Ceres Seq. ID no. 5006155
  misc_feature (131)..(131): Xaa is any aa, unknown or other
MLANKLGGLLKNATSSKSSNMSVYQAIRCMSSSKLFVGGLSYGTDDHSLRDEFAKYGQVIEAKIILDRESGRSRGFGFITYTSSEEASAAITAMDGKTLDGRNIRVNHANERTGGFPQQRWLWWWRLWWWXYG

SEQ ID NO: 17739 - DNA, 933 bp, Zea mays subsp. mays
  misc_feature (1)..(933): Ceres Seq. ID no. 12417671
  misc_feature (1)..(933): Ortholog of  Ceres SEQ ID NO 13638441 as cited in SEQ ID NO 58066
gcacgagaccattacctagaacatcctaatcgaaaaaagatccagcaaaccagagttctccaaagcgcgaagctccagctcaagctccaggcaaccgtcaccgtcagggaacgcgcgcgcagcaatggccttttactacggcgtgggcggacagtcgtcggcgtgggcggcgccgggcggcagcaggccatggaccaaggcggaggacaaggtgttcgagggcgcgctggtgatgttcccggagcacttgccgaaccggtgggcgctggtggcgtcccggctgtacgaccgcacgccgcaggaggcctgggaccactaccaggcgctggtgaccgacgtcgacctcatcgagcgcggcatggtggaggccccggactcctgggacgacgacgcggccgccgccggagggggacgctcgggccgcggccgcgggggcggcagcggcagcggcancgnagaggagcgccgccgcggggtnccgtggaccgaggacgagcacaggctgtttctggaggggcttgagaagtacgggcgcggcgactggcggaacatctcgcgctggtcggtgaagacgcggacgcccacgcaggtggccagccacgcgcagaagtacttcatccgccaggccagcgccgccagccgcggcgacaccaagcgcaagagcatccacgacatcaccaccccgtgatggctcctgctcgtggaggacaaagctagcaccgagagatccagacctggctactgctgctacctgcattttatctttacctttgcgagacgggaacaaaaaaaaacaaacagccgtccctgtggttgtagaaatgtaggcaaagctaagttagcctggctggaatctggggtccggtataactgtattaagcggcactacaatgactatcgaataaataagttttgcaagtttgtctggatttc

SEQ ID NO: 17740 - protein, 187 aa, Zea mays subsp. mays
  peptide (1)..(187): Ceres Seq. ID no. 12417672
  misc_feature (110)..(110): Xaa is any aa, unknown or other
  misc_feature (111)..(111): Xaa is any aa, unknown or other
  misc_feature (118)..(118): Xaa is any aa, unknown or other
MAFYYGVGGQSSAWAAPGGSRPWTKAEDKVFEGALVMFPEHLPNRWALVASRLYDRTPQEAWDHYQALVTDVDLIERGMVEAPDSWDDDAAAAGGGRSGRGRGGGSGSGXXEERRRGXPWTEDEHRLFLEGLEKYGRGDWRNISRWSVKTRTPTQVASHAQKYFIRQASAASRGDTKRKSIHDITTP

SEQ ID NO: 17741 - protein, 173 aa, Zea mays subsp. mays
  peptide (1)..(173): Ceres Seq. ID no. 12417673
  misc_feature (151)..(151): Xaa is any aa, unknown or other
  misc_feature (152)..(152): Xaa is any aa, unknown or other
  misc_feature (160)..(160): Xaa is any aa, unknown or other
ARDHYLEHPNRKKIQQTRVLQSAKLQLKLQATVTVRERARSNGLLLRRGRTVVGVGGAGRQQAMDQGGGQGVRGRAGDVPGALAEPVGAGGVPAVRPHAAGGLGPLPGAGDRRRPHRARHGGGPGLLGRRRGRRRRGTLGPRPRGRQRQRXXRGAPPRGXVDRGRAQAVSGGA

SEQ ID NO: 17742 - protein, 151 aa, Zea mays subsp. mays
  peptide (1)..(151): Ceres Seq. ID no. 12417674
  misc_feature (74)..(74): Xaa is any aa, unknown or other
  misc_feature (75)..(75): Xaa is any aa, unknown or other
  misc_feature (82)..(82): Xaa is any aa, unknown or other
MFPEHLPNRWALVASRLYDRTPQEAWDHYQALVTDVDLIERGMVEAPDSWDDDAAAAGGGRSGRGRGGGSGSGXXEERRRGXPWTEDEHRLFLEGLEKYGRGDWRNISRWSVKTRTPTQVASHAQKYFIRQASAASRGDTKRKSIHDITTP

SEQ ID NO: 17743 - DNA, 1534 bp, Zea mays subsp. mays; identical to SEQ ID NO: 11228
  misc_feature (1)..(1534): Ceres Seq. ID no. 13492041
  misc_feature (1)..(1534): Ortholog of  Ceres SEQ ID NO 13656138 as cited in SEQ ID NO 65492
  misc_feature (1)..(1534): Ortholog of  Ceres SEQ ID NO 13656435 as cited in SEQ ID NO 65853

SEQ ID NO: 17744 - protein, 418 aa, Zea mays subsp. mays; identical to SEQ ID NO: 11229
  peptide (1)..(418): Ceres Seq. ID no. 13492042

SEQ ID NO: 17745 - protein, 414 aa, Zea mays subsp. mays; identical to SEQ ID NO: 11230
  peptide (1)..(414): Ceres Seq. ID no. 13492043

SEQ ID NO: 17746 - protein, 355 aa, Zea mays subsp. mays; identical to SEQ ID NO: 11231
  peptide (1)..(355): Ceres Seq. ID no. 13492044

SEQ ID NO: 17747 - DNA, 1070 bp, Zea mays subsp. mays
  misc_feature (1)..(1070): Ceres Seq. ID no. 12364063
  misc_feature (1)..(1070): Ortholog of  Ceres SEQ ID NO 12622531 as cited in SEQ ID NO 67076
gcacgagaccattacctagaacatcctaatcgaaaaactagcagccctcgctcgcattctctcctcccagtcccctagtccttactccttaccatcccatatatccctagctagcgctctcggccgcatcgccggacgtctattaaaccgccgccgctcctcctcggcatgcgcggttctgctcgcctgcgacatggcgcctgcagcttccatcctctcggccaccgccgccgcctccgccaagcgcccggccacttccgacgctgatgagctcccgcacgacgactcctccgcgccccaccagcaggtgcagggcgacgagcccgcgcgcaagggccagcaaccgcggcagcagcagctggagtgcccgcgctgccgctccaccaacaccaagttctgctactacaacaactacagcacggcgcagccgcgccacttctgccgcgcgtgccgccgctactggacgcacgggggcacgctgcgcgacgtccccgtcggcggcgcctcgcgccgcgccgccactggcagcggcggcaagcggcgcagggtctccgccgagccctcatccccgccgccgtcggtcgcggacgcgtgcctgccgtccgccttcccgttcctcagcgacggcagcttcttcccgcagctcgacctcgtcggcggcgttgcgcttgcacccccggccttctcctcctcgtggcagtcggtgctggtcccggacttgtacgacgggctcgcgccgtgggacgacggagcaacggcgggcacgtggggcgacatcggtggcctcgacctcagctggacactgccggggaactgagtgccagccgccgtcgcgcgtcttgaggggctccggttttagcagtgcggcctcgtcaggttcagttcagttcagttcctagcatgcagagctctcacaattctcctatgtcgcctccactgtttcttctcgtccttactgcgaatgaaatggtggggctgctagttagatcagtgcatcttgatctgtagctagagccagagtgtaagatctgtgcagtgatttatcgtgacaataaaattaagtttgtgcc

SEQ ID NO: 17748 - protein, 210 aa, Zea mays subsp. mays
  peptide (1)..(210): Ceres Seq. ID no. 12364064
MSSRTTTPPRPTSRCRATSPRARASNRGSSSWSARAAAPPTPSSATTTTTARRSRATSAARAAATGRTGARCATSPSAAPRAAPPLAAAASGAGSPPSPHPRRRRSRTRACRPPSRSSATAASSRSSTSSAALRLHPRPSPPRGSRCWSRTCTTGSRRGTTEQRRARGATSVASTSAGHCRGTECQPPSRVLRGSGFSSAASSGSVQFSS

SEQ ID NO: 17749 - protein, 207 aa, Zea mays subsp. mays
  peptide (1)..(207): Ceres Seq. ID no. 12364065
MAPAASILSATAAASAKRPATSDADELPHDDSSAPHQQVQGDEPARKGQQPRQQQLECPRCRSTNTKFCYYNNYSTAQPRHFCRACRRYWTHGGTLRDVPVGGASRRAATGSGGKRRRVSAEPSSPPPSVADACLPSAFPFLSDGSFFPQLDLVGGVALAPPAFSSSWQSVLVPDLYDGLAPWDDGATAGTWGDIGGLDLSWTLPGN

SEQ ID NO: 17750 - DNA, 2141 bp, Zea mays subsp. mays
  misc_feature (1)..(2141): Ceres Seq. ID no. 12435299
  misc_feature (1)..(2141): Ortholog of  Ceres SEQ ID NO 13654166 as cited in SEQ ID NO 68381
  misc_feature (1)..(2141): Ortholog of  Ceres SEQ ID NO 13599720 as cited in SEQ ID NO 0
gcacgagaccattacctagaacatcctaatcaaaatcgcctcgccgtcgccgtcgtcatctcagctttaattcgcagcaggcgggcagtggcaggccaggccacggcgtccagcaccagctacgcctgtgcgcgcgcttgtgcagtacctacgttggtgggtgggtaggtagctagtgcggcggagcatcgatcgcgcggtactctcagttccatccgtcgagagatcgaccggtcgtcgatcgacatggcgggccggggaggagcctcggcggcggcgccgttgctggagaagacagcggcggcggcggagtcgggcggcgggtgctgctacgtggacgggtgccccgggtgcgccgtggaccggcacaaggcggcgaacccgggcattccctacggcaacttcatctacgtctggatcgtcaccctctgcacagccttaccgatatcgtcgctcttccccttcttgtatttcatgataagagacctgaatgtcgctaaaagaacagaagacatcgggttctacgctggttttgtaggtgcctcattcatgtttggtagatgcttgacttcaacagtatggggcatagcggcagaccgcgttgggaggaaacctgttgtcgtgttcggcatttcctctgtagttgtgttcaacacattgtttggtctgagtgtcaactactggatggcaatagctacccggtttctgcttggtgccttgaatggtttgcttggaccgataaaggcttatgccattgaagtttgccgacctgaacatgaagccctagcactatcacttgtcagcacagcatggggaataggtctcattattggtcctgctcttggaggctaccttgcactgcctgcagaaaattttccaactgtcttttcacctgactcaatctttggaaggttcccatatttcttaccatgcttatgcacgtcaatcttcgctgcggttgttctcataagctgcatatggatgccggagactttgcacaagcacaaagtccatgaaaatagaagtcggaacattgaagctttggaggcccgtctgattgattcaaatgaaaaggttgaagaaagtggtagtttagatagtaagaagagcctattcaggaattggccattgatgtcatcaataattgtctattgtgtcttctccttccatgacatggcttacacagaggtgttctctctatgggctgaaagcgacaagaagtatggtgggctgagtttatcatctgaggatgttggtcaagtgcttgcagtcacaggtgccagtcttcttgtataccaactctttctataccccagtatcaataaggttcttgggcctatcaaatcttctcgagttgcagctatcctgtgcatacccatcctctttgcctacccctacatgacgtacctgtcggaacctggattatcaatcgttttgaatattgcgtcagtgataaagaataatctcggtgtcaccatcattacaggcactttcatccttcaaaacaatgccgtgcctcaggaccagcgaggcgctgcgaatggactgtccatgactgggatgtcctttttcaaggcacttgctccagcaggagcaggcattgtgttctcatgggcgcagaaacgccagcatgcgtttttcttcccaggtgaccagatggtattcttcctcctgaacgccgtcgagctggtcgggcttctcctcacgttcaagcccttcctggcagtaccagagcagtacgatacgagatagttagacgatctatctatctatacaagttctggaacgttcaagacgattcatcgtgtgcggctgtaccagtgaaggagaagcgccaaagcgtgtgccctttacgccgcggaaggtctacaaacagggacatactcctatataggaagatgcaatgcaagagctgtggtgtacttttaattgtaggtgatgtagtagtgtatggtagtatcagcattttctgcattcatgaaatgcacacgcaggtggtgggaaatgtgggcatggatcgagagtcgctgcgctgttaagtagcaataaatgttaaggttcagtgactcgctgttatttgttgggaatgaaattactgggcatctgtaccctcgttgttttatatctggctgttggattct

SEQ ID NO: 17751 - protein, 501 aa, Zea mays subsp. mays
  peptide (1)..(501): Ceres Seq. ID no. 12435300
MAGRGGASAAAPLLEKTAAAAESGGGCCYVDGCPGCAVDRHKAANPGIPYGNFIYVWIVTLCTALPISSLFPFLYFMIRDLNVAKRTEDIGFYAGFVGASFMFGRCLTSTVWGIAADRVGRKPVVVFGISSVVVFNTLFGLSVNYWMAIATRFLLGALNGLLGPIKAYAIEVCRPEHEALALSLVSTAWGIGLIIGPALGGYLALPAENFPTVFSPDSIFGRFPYFLPCLCTSIFAAVVLISCIWMPETLHKHKVHENRSRNIEALEARLIDSNEKVEESGSLDSKKSLFRNWPLMSSIIVYCVFSFHDMAYTEVFSLWAESDKKYGGLSLSSEDVGQVLAVTGASLLVYQLFLYPSINKVLGPIKSSRVAAILCIPILFAYPYMTYLSEPGLSIVLNIASVIKNNLGVTIITGTFILQNNAVPQDQRGAANGLSMTGMSFFKALAPAGAGIVFSWAQKRQHAFFFPGDQMVFFLLNAVELVGLLLTFKPFLAVPEQYDTR

SEQ ID NO: 17752 - protein, 425 aa, Zea mays subsp. mays
  peptide (1)..(425): Ceres Seq. ID no. 12435301
MIRDLNVAKRTEDIGFYAGFVGASFMFGRCLTSTVWGIAADRVGRKPVVVFGISSVVVFNTLFGLSVNYWMAIATRFLLGALNGLLGPIKAYAIEVCRPEHEALALSLVSTAWGIGLIIGPALGGYLALPAENFPTVFSPDSIFGRFPYFLPCLCTSIFAAVVLISCIWMPETLHKHKVHENRSRNIEALEARLIDSNEKVEESGSLDSKKSLFRNWPLMSSIIVYCVFSFHDMAYTEVFSLWAESDKKYGGLSLSSEDVGQVLAVTGASLLVYQLFLYPSINKVLGPIKSSRVAAILCIPILFAYPYMTYLSEPGLSIVLNIASVIKNNLGVTIITGTFILQNNAVPQDQRGAANGLSMTGMSFFKALAPAGAGIVFSWAQKRQHAFFFPGDQMVFFLLNAVELVGLLLTFKPFLAVPEQYDTR

SEQ ID NO: 17753 - protein, 400 aa, Zea mays subsp. mays
  peptide (1)..(400): Ceres Seq. ID no. 12435302
MFGRCLTSTVWGIAADRVGRKPVVVFGISSVVVFNTLFGLSVNYWMAIATRFLLGALNGLLGPIKAYAIEVCRPEHEALALSLVSTAWGIGLIIGPALGGYLALPAENFPTVFSPDSIFGRFPYFLPCLCTSIFAAVVLISCIWMPETLHKHKVHENRSRNIEALEARLIDSNEKVEESGSLDSKKSLFRNWPLMSSIIVYCVFSFHDMAYTEVFSLWAESDKKYGGLSLSSEDVGQVLAVTGASLLVYQLFLYPSINKVLGPIKSSRVAAILCIPILFAYPYMTYLSEPGLSIVLNIASVIKNNLGVTIITGTFILQNNAVPQDQRGAANGLSMTGMSFFKALAPAGAGIVFSWAQKRQHAFFFPGDQMVFFLLNAVELVGLLLTFKPFLAVPEQYDTR

SEQ ID NO: 17754 - DNA, 789 bp, Zea mays subsp. mays; identical to SEQ ID NO: 1699
  misc_feature (1)..(789): Ceres Seq. ID no. 12355957
  misc_feature (1)..(789): Ortholog of  Ceres SEQ ID NO 13587131 as cited in SEQ ID NO 331
  misc_feature (1)..(789): Ortholog of  Ceres SEQ ID NO 13661176 as cited in SEQ ID NO 61114

SEQ ID NO: 17755 - protein, 161 aa, Zea mays subsp. mays; identical to SEQ ID NO: 1700
  peptide (1)..(161): Ceres Seq. ID no. 12355958

SEQ ID NO: 17756 - protein, 106 aa, Zea mays subsp. mays; identical to SEQ ID NO: 1701
  peptide (1)..(106): Ceres Seq. ID no. 12355959

SEQ ID NO: 17757 - DNA, 2101 bp, Zea mays subsp. mays
  misc_feature (1)..(2101): Ceres Seq. ID no. 12435356
  misc_feature (1)..(2101): Ortholog of  Ceres SEQ ID NO 15178310 as cited in SEQ ID NO 1089
  misc_feature (1)..(2101): Ortholog of  Ceres SEQ ID NO 14303870 as cited in SEQ ID NO 53632
  misc_feature (1)..(2101): Ortholog of  Ceres SEQ ID NO 15226720 as cited in SEQ ID NO 58707
  misc_feature (1)..(2101): Ortholog of  Ceres SEQ ID NO 13656662 as cited in SEQ ID NO 65594
  misc_feature (1)..(2101): Ortholog of  Ceres SEQ ID NO 14303173 as cited in SEQ ID NO 66550
  misc_feature (1)..(2101): Ortholog of  Ceres SEQ ID NO 15179672 as cited in SEQ ID NO 0
acaaccacccccgccgcaatggacaagattgagacgacgacgaggaggaggaggaaagggagaagcagcagcagccgccgccgccagggggcacggggaccggcgggcctcgtagccacggccttggccctcctctgcgcctgcgccttctccacgcctgccgccacggctctcaccccggacggcgaggcgttgctggagctcaagctggccttcaacgccaccgtgcatcatcggctcaccagctggcggcgcagcgaccccaacccctgtgtctgggagggcatctcctgctccgtccccgacctcagggtacaatccataaatctcccatacatgcagcttgggggcatcatttcgcccagcatcgggaggctggacaagctgcagagactagctctgcaccagaacagcttgcacggcccaatccccgcagagatcaagaactgcaccgagctcagggcaatttacctgagagccaactacctgcaaggaggtatcccttcggagattggcgagctcgtgcacctcaccatcttggacctgtcaagcaatctgttgaggggaacgataccggcctccatcggaagcctcactcaccttcgcttcctgaacctgtctactaatttcttctccggagagatcccaaatgtcggtgtcctcggagccttcaaaagcagctcgttcgttggaaatctggagctctgtggcctgtccatccagaaagcttgccgtggaaccctcggctttcctgccgtgctgccccactccgatccgctctcttcagctggcggtgtctctccaatcagtaacaacaagaagaagacatcgcgctttctgaatggcgtcgtgatcggctcgatgtcaaccttggctcttgccctgatcgctgtgctcggattcctgtggatctgcttgctgtccaggaagaagagcgtcggtggaaactacgtaaagatggacaagaaaactgttcctgacggcgcgaagcttgtgacgtaccagtggaaccttccgtactcgtcgagtgagatcattagaaggctggagctgcttgacgaagaggatgtggttggctgcgggggcttcggcacggtgtacagaatggtgatggacgatggcacgtcgttcgccgtcaagaggattgatctcagccgccaaagccgcgacaggaccatggagaaggagctcgagttcctgggcagcatcaggcacataaatcttgtcactttgcgaggctactgccggctgctccctgcagcaaagctactcgtatacgatttcgttgagctgggcagcttggactgctaccttcatggagatggacaagaggaccagccgttgaactggaacgcgcgtatgaagatcgcccttggctcggctcgaggcctggcatatctgcaccatgattgctcgcctgggatcgtgcacagggacatcaaggccagcaatatcctgctggacagaagcttggagcctcgtgtctctgattttggacttgcaaagctgcttgtagacaatgccgccgcccatgttaccactgttgtggcgggcacctttggatacctagcaccagagtacttgcaaaacgggcatgctactgagaaatcagacgtgtatagctttggagtgcttttgctggagctagtgacgggaaagaggccaaccgattcatgcttcatcaagaagggactgaacattgttggctggctgaacaccctgacgggggagcaccggctggaggatatcgttgacgagcgatgcggcgacgtcgaggtggaagccgtggaagccatcctggacatcgcagcgatgtgcaccgacgcagacccggcgcagcggccgtccatgagcgctgtcctcaagatgctggaggaagagatcctgtccccctgcatgagcgagctgtgctacgagcagcacctggagctctgagccgaggaagcctgacctgactacgatgcagtgcatgatggatgagactgtgtaggaaacaaaagttttgtagatatgacgatgatgaaccgcgtacgtagtgtaggtgtttgtgagcagctcaaaagtaggacaagtgcagaaccaacaacctgatcggcacgtt

SEQ ID NO: 17758 - protein, 644 aa, Zea mays subsp. mays
  peptide (1)..(644): Ceres Seq. ID no. 12435357
TTTPAAMDKIETTTRRRRKGRSSSSRRRQGARGPAGLVATALALLCACAFSTPAATALTPDGEALLELKLAFNATVHHRLTSWRRSDPNPCVWEGISCSVPDLRVQSINLPYMQLGGIISPSIGRLDKLQRLALHQNSLHGPIPAEIKNCTELRAIYLRANYLQGGIPSEIGELVHLTILDLSSNLLRGTIPASIGSLTHLRFLNLSTNFFSGEIPNVGVLGAFKSSSFVGNLELCGLSIQKACRGTLGFPAVLPHSDPLSSAGGVSPISNNKKKTSRFLNGVVIGSMSTLALALIAVLGFLWICLLSRKKSVGGNYVKMDKKTVPDGAKLVTYQWNLPYSSSEIIRRLELLDEEDVVGCGGFGTVYRMVMDDGTSFAVKRIDLSRQSRDRTMEKELEFLGSIRHINLVTLRGYCRLLPAAKLLVYDFVELGSLDCYLHGDGQEDQPLNWNARMKIALGSARGLAYLHHDCSPGIVHRDIKASNILLDRSLEPRVSDFGLAKLLVDNAAAHVTTVVAGTFGYLAPEYLQNGHATEKSDVYSFGVLLLELVTGKRPTDSCFIKKGLNIVGWLNTLTGEHRLEDIVDERCGDVEVEAVEAILDIAAMCTDADPAQRPSMSAVLKMLEEEILSPCMSELCYEQHLEL

SEQ ID NO: 17759 - protein, 638 aa, Zea mays subsp. mays
  peptide (1)..(638): Ceres Seq. ID no. 12435358
MDKIETTTRRRRKGRSSSSRRRQGARGPAGLVATALALLCACAFSTPAATALTPDGEALLELKLAFNATVHHRLTSWRRSDPNPCVWEGISCSVPDLRVQSINLPYMQLGGIISPSIGRLDKLQRLALHQNSLHGPIPAEIKNCTELRAIYLRANYLQGGIPSEIGELVHLTILDLSSNLLRGTIPASIGSLTHLRFLNLSTNFFSGEIPNVGVLGAFKSSSFVGNLELCGLSIQKACRGTLGFPAVLPHSDPLSSAGGVSPISNNKKKTSRFLNGVVIGSMSTLALALIAVLGFLWICLLSRKKSVGGNYVKMDKKTVPDGAKLVTYQWNLPYSSSEIIRRLELLDEEDVVGCGGFGTVYRMVMDDGTSFAVKRIDLSRQSRDRTMEKELEFLGSIRHINLVTLRGYCRLLPAAKLLVYDFVELGSLDCYLHGDGQEDQPLNWNARMKIALGSARGLAYLHHDCSPGIVHRDIKASNILLDRSLEPRVSDFGLAKLLVDNAAAHVTTVVAGTFGYLAPEYLQNGHATEKSDVYSFGVLLLELVTGKRPTDSCFIKKGLNIVGWLNTLTGEHRLEDIVDERCGDVEVEAVEAILDIAAMCTDADPAQRPSMSAVLKMLEEEILSPCMSELCYEQHLEL

SEQ ID NO: 17760 - protein, 532 aa, Zea mays subsp. mays
  peptide (1)..(532): Ceres Seq. ID no. 12435359
MQLGGIISPSIGRLDKLQRLALHQNSLHGPIPAEIKNCTELRAIYLRANYLQGGIPSEIGELVHLTILDLSSNLLRGTIPASIGSLTHLRFLNLSTNFFSGEIPNVGVLGAFKSSSFVGNLELCGLSIQKACRGTLGFPAVLPHSDPLSSAGGVSPISNNKKKTSRFLNGVVIGSMSTLALALIAVLGFLWICLLSRKKSVGGNYVKMDKKTVPDGAKLVTYQWNLPYSSSEIIRRLELLDEEDVVGCGGFGTVYRMVMDDGTSFAVKRIDLSRQSRDRTMEKELEFLGSIRHINLVTLRGYCRLLPAAKLLVYDFVELGSLDCYLHGDGQEDQPLNWNARMKIALGSARGLAYLHHDCSPGIVHRDIKASNILLDRSLEPRVSDFGLAKLLVDNAAAHVTTVVAGTFGYLAPEYLQNGHATEKSDVYSFGVLLLELVTGKRPTDSCFIKKGLNIVGWLNTLTGEHRLEDIVDERCGDVEVEAVEAILDIAAMCTDADPAQRPSMSAVLKMLEEEILSPCMSELCYEQHLEL

SEQ ID NO: 17761 - DNA, 1062 bp, Zea mays subsp. mays
  misc_feature (1)..(1062): Ceres Seq. ID no. 12364415
  misc_feature (1)..(1062): Ortholog of  Ceres SEQ ID NO 12619787 as cited in SEQ ID NO 65954
aacttgccgaccgcaggaatccagccgacccagcacttcccccggttcctcccagcagagtcttctctgcatccgttccgttccacggcctctcgcacatccaccgccaccgagccgcgtgcgtcttccatgaaggacccgttcgaggcggacgtcgaggagcaggactcgccgccggagtcgccggcgccgcccgaggatgaacccggcgccgcgggccccgcggaggaccccgaggactacgacggcggcccgcccccgcgccagccgtcggccccggcgtcgcacgcagtcacagccggtgccaaggccaaggcccgtatccatagggagcagcaggaggatgacgacgaggacgaggaccagattgaggtcgacctcgagaagcttcccagcagcactggcgacccagacaagctcgctaagatgaatgctatactgtcccaatttacacaacagcagatgaaccgttatgagtcattccgaagatctggatttcagaaatctaacatgaaaaggctgttggcaagcatcactggaagtcagaagatttctatccctacttcaattgtggtatcgggaatcgccaaaatatttgttggtgagctaattgaaacagcaagagtggtcatgagcgagaggaaggattcaggacccattaggccttgccacatcagggaggcatacagaagattgaagcttgaagggaagatcccacggcgatctgttcctaggctcttccgctagaattgaagcatgtatattacacatgtgtctggagtcctgacagatgtgtgccatgaggtgaggagtttctagtaccagcttgttgcagtttctggacagaaacctgaccagactctcacagcttctgttgagaaatcctgtcaaatgtcatatcatctttaagatggaattagaaagagttaaaacgtccctaccacggggcctaaaatcgcctggggttgttatttgtactgagggctactttgaaaacctcaaatccccttcgggattggaggggattgaggtggaaatgaactaattttctcttgagtttcc

SEQ ID NO: 17762 - protein, 248 aa, Zea mays subsp. mays
  peptide (1)..(248): Ceres Seq. ID no. 12364416
NLPTAGIQPTQHFPRFLPAESSLHPFRSTASRTSTATEPRASSMKDPFEADVEEQDSPPESPAPPEDEPGAAGPAEDPEDYDGGPPPRQPSAPASHAVTAGAKAKARIHREQQEDDDEDEDQIEVDLEKLPSSTGDPDKLAKMNAILSQFTQQQMNRYESFRRSGFQKSNMKRLLASITGSQKISIPTSIVVSGIAKIFVGELIETARVVMSERKDSGPIRPCHIREAYRRLKLEGKIPRRSVPRLFR

SEQ ID NO: 17763 - protein, 205 aa, Zea mays subsp. mays
  peptide (1)..(205): Ceres Seq. ID no. 12364417
MKDPFEADVEEQDSPPESPAPPEDEPGAAGPAEDPEDYDGGPPPRQPSAPASHAVTAGAKAKARIHREQQEDDDEDEDQIEVDLEKLPSSTGDPDKLAKMNAILSQFTQQQMNRYESFRRSGFQKSNMKRLLASITGSQKISIPTSIVVSGIAKIFVGELIETARVVMSERKDSGPIRPCHIREAYRRLKLEGKIPRRSVPRLFR

SEQ ID NO: 17764 - DNA, 1063 bp, Zea mays subsp. mays
  misc_feature (1)..(1063): Ceres Seq. ID no. 12417560
  misc_feature (1)..(1063): Ortholog of  Ceres SEQ ID NO 13594560 as cited in SEQ ID NO 51329
  misc_feature (1)..(1063): Ortholog of  Ceres SEQ ID NO 12613701 as cited in SEQ ID NO 67983
aggaaggtaggaggagaaccgtcagcagagagacatggcgccccaccaccagcagcgggcgctgctcctgttcccactcgtcttcctcctcctcctccttgccccgcccctcgccggcgcgtggggaaaggagggccacatcatggtctgcaagatcgccgagaagtacctgtcggagaaggcggcggcggcggtgcaggcgctgctgccggagtcggcgggcggggagctgtcgacggtgtgcccgtgggcgtaccaggtgcgctggcactaccactgggccagcccgctccactacgccaacaccccccaagtctgcaacttcaagtattctcgggactgccacaattctcggggccagcaagggatgtgcgtcgtcggggctatcaacaactacacggaccagctctacagctacggccagaagacttcgtataacctgacggaaagcctgatgttcctggcacacttcgtcggcgacgtccaccagccgctgcacgtaggcttcgaagatgacgagggcggtaacaccatcaccgtccactggtaccggaggaaagcaaacctccatcacgtgtgggatgtcagcattattgatacggcaatcaaggacttctacaacaagagcatggataccatggtagaggctctcaagatgaatcttacagatggatggtctgacgacatcgtccactgggaaaattgcaagaacaaacacgcgacctgcgcgaacgactatgcgattgagagcatccattattcctgcaactacgcctacaaagatgtggagcaagacatcactctaggagatgattattttttcagtaggtacccgattgtggagaagaggttagcgcaggctggaatcagattggcgttggtacttaatcggatatttggtggaggtgaagcggatgatataccactaaaagtacagtaacagctgtaataaaaggaagcatagctattacaaggatttgtccattacgtcgtctatacatcaataaattggcatgaatttgtaactccattgctatacatcaataaattggcatgaatttgt

SEQ ID NO: 17765 - protein, 301 aa, Zea mays subsp. mays
  peptide (1)..(301): Ceres Seq. ID no. 12417561
MAPHHQQRALLLFPLVFLLLLLAPPLAGAWGKEGHIMVCKIAEKYLSEKAAAAVQALLPESAGGELSTVCPWAYQVRWHYHWASPLHYANTPQVCNFKYSRDCHNSRGQQGMCVVGAINNYTDQLYSYGQKTSYNLTESLMFLAHFVGDVHQPLHVGFEDDEGGNTITVHWYRRKANLHHVWDVSIIDTAIKDFYNKSMDTMVEALKMNLTDGWSDDIVHWENCKNKHATCANDYAIESIHYSCNYAYKDVEQDITLGDDYFFSRYPIVEKRLAQAGIRLALVLNRIFGGGEADDIPLKVQ

SEQ ID NO: 17766 - protein, 265 aa, Zea mays subsp. mays
  peptide (1)..(265): Ceres Seq. ID no. 12417562
MVCKIAEKYLSEKAAAAVQALLPESAGGELSTVCPWAYQVRWHYHWASPLHYANTPQVCNFKYSRDCHNSRGQQGMCVVGAINNYTDQLYSYGQKTSYNLTESLMFLAHFVGDVHQPLHVGFEDDEGGNTITVHWYRRKANLHHVWDVSIIDTAIKDFYNKSMDTMVEALKMNLTDGWSDDIVHWENCKNKHATCANDYAIESIHYSCNYAYKDVEQDITLGDDYFFSRYPIVEKRLAQAGIRLALVLNRIFGGGEADDIPLKVQ

SEQ ID NO: 17767 - protein, 190 aa, Zea mays subsp. mays
  peptide (1)..(190): Ceres Seq. ID no. 12417563
MCVVGAINNYTDQLYSYGQKTSYNLTESLMFLAHFVGDVHQPLHVGFEDDEGGNTITVHWYRRKANLHHVWDVSIIDTAIKDFYNKSMDTMVEALKMNLTDGWSDDIVHWENCKNKHATCANDYAIESIHYSCNYAYKDVEQDITLGDDYFFSRYPIVEKRLAQAGIRLALVLNRIFGGGEADDIPLKVQ

SEQ ID NO: 17768 - DNA, 2214 bp, Zea mays subsp. mays
  misc_feature (1)..(2214): Ceres Seq. ID no. 13494953
  misc_feature (1)..(2214): Ortholog of  Ceres SEQ ID NO 14315862 as cited in SEQ ID NO 60207
  misc_feature (1)..(2214): Ortholog of  Ceres SEQ ID NO 13660129 as cited in SEQ ID NO 67547
agaccattacctagaagatcctaatcgaaaaaaacgatccatcctcaccaccattcgactccacagctggaggctgaagctccgcagtcacagcattcaaatcaatctctctctttctctctctctctctcacaggagataagccatggcagagttgcctttggcagcggggctgatggaccttcgcaactgcaagctctctccgaagccagcgccgcccttgccactccccgcgctccgccgcatgcacacaagcgccacggctacgacggccccgtccccgcgccatgcggtccccgaactccactccactaccgagctggcggacgggagcatcgtcttccgtttcggccatcctaagtccaaggcgctggagccggagccggcgagcgtaaagaccagcccttactccagagttgcccctgcctcgggcgctgtgcccggcagccagatggagccggagattgactctgaacatggattagacggcgtgcgaataggcaccacggctggggttgagaagccgagcccgaatgccgcagccgaggcctggccgacacctccacctcctgacgccggcgcggtaaccggtgccacttccgctgcgctagaggaggcgccggagcaggaggcgggttccaatgctgccgttgaggaggtggacaccaggccatcatccgcagagtctcttgtcccgtcgagatcagaggatgggccaaagggcgacggcgtcgctgttgaggctggcatgccgaccagtggtgctgccatggatacgattgagactgctttggaggggcgcggggcaagcgaggatgactcagcagttgatgtgagtggtggcttggatgaggcggcgacttccggtttggaggactccgaagccgcatcggaaggctccactgcacaggatttctacaccgacgttgaaacggagtccagcggctccagcagcgacgagcagagagctgagttcggcttttccttaccaccaccggaacaagttagcaacaaggcggattggaaaaatgacacttcagaggtgaagagttctgataggatgattccaatagctcaacggacacgtgtgttatcgtcaggtgctgcaatattgcctcatccgtcaaaggtagcaacaggtggagaagatgcatatttcattgcagccaatggctggtttggtgtagcagatggagttggccagtggtcatttgaaggaatcaacgcagggctttatgcaagagaactaatggatggctgcaaaaagttcgttaccgagaatcaaggggatccagatcttagaccagagcagatcctttccaaagcagtagatgaagcatgttcacctggttcttgcactgtattagttgctcattttgatggccaggcccttcaagcatcaaatattggggactctgggtttatagtgataagaaatggagaagtgttcaaaaagtctaaacctacgctttatggtttcaatttcccactacaaattcagaagggagatgacccctcaaagtttgtacagaattatgctattgatctagaggacggcgatgcaattgtgacagcaaccgatggcctttttgataatgtatacgagcatgaaatagctggaattgtctccaaatcgttacaggcagatctagaaccagcggagattgcggaacacttggctgtgaaggcccaggaagtagggaggtctggggctgggagaagcccattttcagatgctgctctctcggctgggtaccttggctacagtgggggcaaactggatgacatagccgtcgttgtatcaattgtccggactgaaattcaagaggataggctaagatgactatgcagaaaagaagctcatgttttgtggaagctcaacaccaagcgaccacgcgggttgccctatcagtattctgtactgctagaactgcagctatgtggcgatttctggaaagttaagggcgtatgcatcagcatcatacaccgtgctcgatcatcaataggcgggccaataaccattggacatcagcattgtagcgaagccccttcctgttgcccttgccagtgcaccggcgccacattttgatttttggtttcgctataaaaatataaggcatttagatgttgcccttgccattaaaccaatgtcatgtactccttctgtcataaattaaaattcgttttggtttctaatggattcatataatactt

SEQ ID NO: 17769 - protein, 565 aa, Zea mays subsp. mays
  peptide (1)..(565): Ceres Seq. ID no. 13494954
MAELPLAAGLMDLRNCKLSPKPAPPLPLPALRRMHTSATATTAPSPRHAVPELHSTTELADGSIVFRFGHPKSKALEPEPASVKTSPYSRVAPASGAVPGSQMEPEIDSEHGLDGVRIGTTAGVEKPSPNAAAEAWPTPPPPDAGAVTGATSAALEEAPEQEAGSNAAVEEVDTRPSSAESLVPSRSEDGPKGDGVAVEAGMPTSGAAMDTIETALEGRGASEDDSAVDVSGGLDEAATSGLEDSEAASEGSTAQDFYTDVETESSGSSSDEQRAEFGFSLPPPEQVSNKADWKNDTSEVKSSDRMIPIAQRTRVLSSGAAILPHPSKVATGGEDAYFIAANGWFGVADGVGQWSFEGINAGLYARELMDGCKKFVTENQGDPDLRPEQILSKAVDEACSPGSCTVLVAHFDGQALQASNIGDSGFIVIRNGEVFKKSKPTLYGFNFPLQIQKGDDPSKFVQNYAIDLEDGDAIVTATDGLFDNVYEHEIAGIVSKSLQADLEPAEIAEHLAVKAQEVGRSGAGRSPFSDAALSAGYLGYSGGKLDDIAVVVSIVRTEIQEDRLR

SEQ ID NO: 17770 - protein, 555 aa, Zea mays subsp. mays
  peptide (1)..(555): Ceres Seq. ID no. 13494955
MDLRNCKLSPKPAPPLPLPALRRMHTSATATTAPSPRHAVPELHSTTELADGSIVFRFGHPKSKALEPEPASVKTSPYSRVAPASGAVPGSQMEPEIDSEHGLDGVRIGTTAGVEKPSPNAAAEAWPTPPPPDAGAVTGATSAALEEAPEQEAGSNAAVEEVDTRPSSAESLVPSRSEDGPKGDGVAVEAGMPTSGAAMDTIETALEGRGASEDDSAVDVSGGLDEAATSGLEDSEAASEGSTAQDFYTDVETESSGSSSDEQRAEFGFSLPPPEQVSNKADWKNDTSEVKSSDRMIPIAQRTRVLSSGAAILPHPSKVATGGEDAYFIAANGWFGVADGVGQWSFEGINAGLYARELMDGCKKFVTENQGDPDLRPEQILSKAVDEACSPGSCTVLVAHFDGQALQASNIGDSGFIVIRNGEVFKKSKPTLYGFNFPLQIQKGDDPSKFVQNYAIDLEDGDAIVTATDGLFDNVYEHEIAGIVSKSLQADLEPAEIAEHLAVKAQEVGRSGAGRSPFSDAALSAGYLGYSGGKLDDIAVVVSIVRTEIQEDRLR

SEQ ID NO: 17771 - protein, 532 aa, Zea mays subsp. mays
  peptide (1)..(532): Ceres Seq. ID no. 13494956
MHTSATATTAPSPRHAVPELHSTTELADGSIVFRFGHPKSKALEPEPASVKTSPYSRVAPASGAVPGSQMEPEIDSEHGLDGVRIGTTAGVEKPSPNAAAEAWPTPPPPDAGAVTGATSAALEEAPEQEAGSNAAVEEVDTRPSSAESLVPSRSEDGPKGDGVAVEAGMPTSGAAMDTIETALEGRGASEDDSAVDVSGGLDEAATSGLEDSEAASEGSTAQDFYTDVETESSGSSSDEQRAEFGFSLPPPEQVSNKADWKNDTSEVKSSDRMIPIAQRTRVLSSGAAILPHPSKVATGGEDAYFIAANGWFGVADGVGQWSFEGINAGLYARELMDGCKKFVTENQGDPDLRPEQILSKAVDEACSPGSCTVLVAHFDGQALQASNIGDSGFIVIRNGEVFKKSKPTLYGFNFPLQIQKGDDPSKFVQNYAIDLEDGDAIVTATDGLFDNVYEHEIAGIVSKSLQADLEPAEIAEHLAVKAQEVGRSGAGRSPFSDAALSAGYLGYSGGKLDDIAVVVSIVRTEIQEDRLR

SEQ ID NO: 17772 - DNA, 2028 bp, Zea mays subsp. mays
  misc_feature (1)..(2028): Ceres Seq. ID no. 12382545
  misc_feature (1)..(2028): Ortholog of  Ceres SEQ ID NO 15176922 as cited in SEQ ID NO 55251
aggtcgtgaaattgattgaaatacctggggcttgagcgtgatatatagagggtggtagagaccaagcgacgttgggcgagcggcgccgccagggctgcgttggtcccttcaccggtgatgagcatccaccagatacaggaatgaacaacattgtgtaggcacctcatccagacatctaaggcgaaaaatgctgcgcctgcaccaccatagtgcacctgtctctccgcacgctgcgatttgtccaccgagtaggcttgcttgttcttgcatatgtaacaagccaaacagcagaatcaccgcttcccaggggtggtcttccataaggcggcgaatcaccactgttgccagtggccagtcagtaccaggatacacacctgatgatggcgatcaatgccttgaaacaggcaacaagctctcttttgctactgtgaaggaggctttcatcagccctgaactctgtgggtgtcagaagtgagctaattcttctagctctaccagcagtcttgggtcaagctattgatccaatagcacaacttatggagactgcatacatcggtagattaggtgcactggaattggcatcggctggtattggtatatcgatttttaatattgtgtcaaagatcttcaacataccactgttgagcattgcaacctcatttgtggcagaggatatttctaggagtgctaccaagcatcctagttcaggcaaattggagctgacatctgtatcatctgccctgatcttagctgctggaattggtataatggaagcattagcattgttcctaggatcaggattgtttcttaaactaatgggcgtgtcacctgtatctccaatgcacagacctgctaaactctttctttcattgagagctctcggagcacctgcaaatgtgattatgttggcagtccaaggtatctttcggggattcaaggatacaaagactccggtgttttatataggtttgggcaatctttctgctgtagcccttcttcctctacttatatatggctttaagcttggcataactggtgctgcaatttctacagttgtgtcccagtacattattacagttcttcttatttggtctctaagtaaaagagctgttttgcttcctccgcgaatagatcaattagagtttggtggatatctaaaatctggtggaatgctgttgggaagaactctttcaattctgctaactatgaccattggtacatcaatggctgctcggcaaggcccaacagcgatggctgctcatcagatttgtttgcaagtatggcttgctgtatccttgcttgcagatgcattagctgtttctgcccaggcgctgatagcaagctcttatgcaatattggactacaaaaaagttcaaaagacagcaatgtttgcgttgcagataggagtgtttagtgggttagctttggccattggattgtatgcctcatttggcaatatatctagactgtttaccagtgacccagaggtcctaacggttgtcaaatcttgtgcactgtcagcccatcaatgccctggccttcatctttgacggtctacattatggtgtatcagattttgaatatgtggctcaagctactatcgtggtgggtgttacgtcttcactcgtcctgttatgggctccgtctgtatttggcttggctggagtttgggctggtttgactacactcatggggttgcgtatggctgcaggcatcctgaggttgctacagaaagcgggcccttggtcgtttatgcacgaggagccataagctgaggtgtatcaactaccagcctgcgcagtttggagctgctaacttacttctgggagtttacatcactgcaaagattatccgagtgtcatggactcgctgaagatgttacccctgttactcctccggctcagaacaaaatctgacttcattgaatttcttaaaatcagtctgctagatggcatggtttggtttggattggtttggtgaaggcgtgaggcccatctgaacatcggtgcggcctctattttttttggc

SEQ ID NO: 17773 - protein, 337 aa, Zea mays subsp. mays
  peptide (1)..(337): Ceres Seq. ID no. 12382546
METAYIGRLGALELASAGIGISIFNIVSKIFNIPLLSIATSFVAEDISRSATKHPSSGKLELTSVSSALILAAGIGIMEALALFLGSGLFLKLMGVSPVSPMHRPAKLFLSLRALGAPANVIMLAVQGIFRGFKDTKTPVFYIGLGNLSAVALLPLLIYGFKLGITGAAISTVVSQYIITVLLIWSLSKRAVLLPPRIDQLEFGGYLKSGGMLLGRTLSILLTMTIGTSMAARQGPTAMAAHQICLQVWLAVSLLADALAVSAQALIASSYAILDYKKVQKTAMFALQIGVFSGLALAIGLYASFGNISRLFTSDPEVLTVVKSCALSAHQCPGLHL

SEQ ID NO: 17774 - protein, 260 aa, Zea mays subsp. mays
  peptide (1)..(260): Ceres Seq. ID no. 12382547
MEALALFLGSGLFLKLMGVSPVSPMHRPAKLFLSLRALGAPANVIMLAVQGIFRGFKDTKTPVFYIGLGNLSAVALLPLLIYGFKLGITGAAISTVVSQYIITVLLIWSLSKRAVLLPPRIDQLEFGGYLKSGGMLLGRTLSILLTMTIGTSMAARQGPTAMAAHQICLQVWLAVSLLADALAVSAQALIASSYAILDYKKVQKTAMFALQIGVFSGLALAIGLYASFGNISRLFTSDPEVLTVVKSCALSAHQCPGLHL

SEQ ID NO: 17775 - protein, 244 aa, Zea mays subsp. mays
  peptide (1)..(244): Ceres Seq. ID no. 12382548
MGVSPVSPMHRPAKLFLSLRALGAPANVIMLAVQGIFRGFKDTKTPVFYIGLGNLSAVALLPLLIYGFKLGITGAAISTVVSQYIITVLLIWSLSKRAVLLPPRIDQLEFGGYLKSGGMLLGRTLSILLTMTIGTSMAARQGPTAMAAHQICLQVWLAVSLLADALAVSAQALIASSYAILDYKKVQKTAMFALQIGVFSGLALAIGLYASFGNISRLFTSDPEVLTVVKSCALSAHQCPGLHL

SEQ ID NO: 17776 - DNA, 2013 bp, Zea mays subsp. mays; identical to SEQ ID NO: 15420
  misc_feature (1)..(2013): Ceres Seq. ID no. 12417337
  misc_feature (1)..(2013): Ortholog of  Ceres SEQ ID NO 15175923 as cited in SEQ ID NO 54037
  misc_feature (1)..(2013): Ortholog of  Ceres SEQ ID NO 14303366 as cited in SEQ ID NO 54418
  misc_feature (1)..(2013): Ortholog of  Ceres SEQ ID NO 13503610 as cited in SEQ ID NO 62416
  misc_feature (1)..(2013): Ortholog of  Ceres SEQ ID NO 13657610 as cited in SEQ ID NO 66165
  misc_feature (1)..(2013): Ortholog of  Ceres SEQ ID NO 13598312 as cited in SEQ ID NO 68448
  misc_feature (1)..(2013): Ortholog of  Ceres SEQ ID NO 13596100 as cited in SEQ ID NO 68573

SEQ ID NO: 17777 - protein, 536 aa, Zea mays subsp. mays; identical to SEQ ID NO: 15421
  peptide (1)..(536): Ceres Seq. ID no. 12417338

SEQ ID NO: 17778 - protein, 534 aa, Zea mays subsp. mays; identical to SEQ ID NO: 15422
  peptide (1)..(534): Ceres Seq. ID no. 12417339

SEQ ID NO: 17779 - protein, 466 aa, Zea mays subsp. mays; identical to SEQ ID NO: 15423
  peptide (1)..(466): Ceres Seq. ID no. 12417340

SEQ ID NO: 17780 - DNA, 2195 bp, Zea mays subsp. mays
  misc_feature (1)..(2195): Ceres Seq. ID no. 12368028
  misc_feature (1)..(2195): Ortholog of  Ceres SEQ ID NO 12780298 as cited in SEQ ID NO 65880
  misc_feature (1)..(2195): Ortholog of  Ceres SEQ ID NO 13654539 as cited in SEQ ID NO 68015
taatcgaaaagcacacgcacggacggccccgagggtttagagcccaacttctctcttcacatcgccgcgaagccagctccccgatgcgatctggccgagggaagatggcgactccgccgccgccaatccgccccgccgccgcgctcctcctcctcgtcctcgctggcgtcctcgcctccgccgcgagcgccgatctcgtcatctccaaggcagatcggagggttgatctgacctcgcatatcgttcgcgtcctcgcttccctcaaggctgaaaatgttggaccagaccctgtctctcaagttttactgccttttcccaatattcaagccaagaacttggcagctattagagcattcggcagtgaagggaaagtgaagggtcaaagtactgttctgccaattgaagttgttcaaccttctggagctcccccggagctgacattcttttcagcattgttgcccaaacctttggaaaaaggaaagactctgtacttggatgttctgactgtgttcacacactctcttcaaccattcccagaagaaatcactcaagccgaagcacaacttgttgtctatcaggatagtgctcactatctgtcaccttaccctgttaaggctcagacacttgctatcagattgcctggtggaagggttgaatcatacacaaggcatccaaacgcaaaacttgtggattcagaactgaaatatggaccatttcatgaccttcccccgttctcctacttacctgtgattgtgcattttgagaacaacaatccttttgcagttgcaaaggaagttataagggagattgagatatctcactggggaaatgtacagattacggaacactacaacattgctcatggtggtgccagactcaagggtgaattttccaggattgattatcaatctagaccttacgtaaggggtgtttcatcttttagacatcttattgcaaaactgcctccaagggcacactctatttattaccgagatgagattggtaatatttccacatcacatttgtggagtgattctatgaagacccaactggaaatagaaccaaggtttccattgtttggtgggtggcaaacaaccttcactgttggttatggtttaccacttgaagactttgttttctattctgatggaaagagatttctcaatatcacatttggttctccattggaggaaattctcattgaaaagcttatcgtaaaggttgttctacctgaagggtcaaaggatatcgaagtttcagctccctttccaacacagcagcagcaagaggttaagtattcacaccttgacattgtcggaagaccagttgttgtcttggagaaacctgatgttattccagagcataatttgtatttccaggtttactacagattcaacaacatatccttgctcagagagccgttgatgctgattactggtttcttcctcctgtttgtggcctgtattgtttacatgcgtactgatatgtcaatatccaagagctctccttcctacttggccaagctgcaatgggatgaggtgcaagcaactgttcagaaaatccagggtatctttgagcaatgcttagcagttcatgataaactggaggcctcattgcgggatttgtctaggacaggagacattcagtcttgcaaggcagctcgtaaagctgctgacacgcagtttaaggagctatcgaaagatctgaagccactgttggcgactctacagtcatctccccagtcttatcagatattgccaaaggtagaggacttgatcgtaaaggagagagagatgcaggagaagctcatgacaaggcattccaccgttgtcgacagctttgagaagaagctgcgcgggcaagatgtagagaacaggattgctttgcagcagcagaaaattgctgccctgaggcaggaggttgaatctcttttagagtacattagtgagatttgagcaaatgagtgctgctgtggcgtgatacatctttagcgattagactgcctttgtttggtttagggtttaccccaatattgaaatctactactctgagattgtgtcggtaaccatctagtttcccagttgagagacctggaagttgcaatgaccttgtaacatgataatcagtgtaattctggagctgactaaatttttgcatttaatatcaatatcacaggaaccgtcatcttttggacc

SEQ ID NO: 17781 - protein, 650 aa, Zea mays subsp. mays
  peptide (1)..(650): Ceres Seq. ID no. 12368029
IEKHTHGRPRGFRAQLLSSHRREASSPMRSGRGKMATPPPPIRPAAALLLLVLAGVLASAASADLVISKADRRVDLTSHIVRVLASLKAENVGPDPVSQVLLPFPNIQAKNLAAIRAFGSEGKVKGQSTVLPIEVVQPSGAPPELTFFSALLPKPLEKGKTLYLDVLTVFTHSLQPFPEEITQAEAQLVVYQDSAHYLSPYPVKAQTLAIRLPGGRVESYTRHPNAKLVDSELKYGPFHDLPPFSYLPVIVHFENNNPFAVAKEVIREIEISHWGNVQITEHYNIAHGGARLKGEFSRIDYQSRPYVRGVSSFRHLIAKLPPRAHSIYYRDEIGNISTSHLWSDSMKTQLEIEPRFPLFGGWQTTFTVGYGLPLEDFVFYSDGKRFLNITFGSPLEEILIEKLIVKVVLPEGSKDIEVSAPFPTQQQQEVKYSHLDIVGRPVVVLEKPDVIPEHNLYFQVYYRFNNISLLREPLMLITGFFLLFVACIVYMRTDMSISKSSPSYLAKLQWDEVQATVQKIQGIFEQCLAVHDKLEASLRDLSRTGDIQSCKAARKAADTQFKELSKDLKPLLATLQSSPQSYQILPKVEDLIVKEREMQEKLMTRHSTVVDSFEKKLRGQDVENRIALQQQKIAALRQEVESLLEYISEI

SEQ ID NO: 17782 - protein, 623 aa, Zea mays subsp. mays
  peptide (1)..(623): Ceres Seq. ID no. 12368030
MRSGRGKMATPPPPIRPAAALLLLVLAGVLASAASADLVISKADRRVDLTSHIVRVLASLKAENVGPDPVSQVLLPFPNIQAKNLAAIRAFGSEGKVKGQSTVLPIEVVQPSGAPPELTFFSALLPKPLEKGKTLYLDVLTVFTHSLQPFPEEITQAEAQLVVYQDSAHYLSPYPVKAQTLAIRLPGGRVESYTRHPNAKLVDSELKYGPFHDLPPFSYLPVIVHFENNNPFAVAKEVIREIEISHWGNVQITEHYNIAHGGARLKGEFSRIDYQSRPYVRGVSSFRHLIAKLPPRAHSIYYRDEIGNISTSHLWSDSMKTQLEIEPRFPLFGGWQTTFTVGYGLPLEDFVFYSDGKRFLNITFGSPLEEILIEKLIVKVVLPEGSKDIEVSAPFPTQQQQEVKYSHLDIVGRPVVVLEKPDVIPEHNLYFQVYYRFNNISLLREPLMLITGFFLLFVACIVYMRTDMSISKSSPSYLAKLQWDEVQATVQKIQGIFEQCLAVHDKLEASLRDLSRTGDIQSCKAARKAADTQFKELSKDLKPLLATLQSSPQSYQILPKVEDLIVKEREMQEKLMTRHSTVVDSFEKKLRGQDVENRIALQQQKIAALRQEVESLLEYISEI

SEQ ID NO: 17783 - protein, 616 aa, Zea mays subsp. mays
  peptide (1)..(616): Ceres Seq. ID no. 12368031
MATPPPPIRPAAALLLLVLAGVLASAASADLVISKADRRVDLTSHIVRVLASLKAENVGPDPVSQVLLPFPNIQAKNLAAIRAFGSEGKVKGQSTVLPIEVVQPSGAPPELTFFSALLPKPLEKGKTLYLDVLTVFTHSLQPFPEEITQAEAQLVVYQDSAHYLSPYPVKAQTLAIRLPGGRVESYTRHPNAKLVDSELKYGPFHDLPPFSYLPVIVHFENNNPFAVAKEVIREIEISHWGNVQITEHYNIAHGGARLKGEFSRIDYQSRPYVRGVSSFRHLIAKLPPRAHSIYYRDEIGNISTSHLWSDSMKTQLEIEPRFPLFGGWQTTFTVGYGLPLEDFVFYSDGKRFLNITFGSPLEEILIEKLIVKVVLPEGSKDIEVSAPFPTQQQQEVKYSHLDIVGRPVVVLEKPDVIPEHNLYFQVYYRFNNISLLREPLMLITGFFLLFVACIVYMRTDMSISKSSPSYLAKLQWDEVQATVQKIQGIFEQCLAVHDKLEASLRDLSRTGDIQSCKAARKAADTQFKELSKDLKPLLATLQSSPQSYQILPKVEDLIVKEREMQEKLMTRHSTVVDSFEKKLRGQDVENRIALQQQKIAALRQEVESLLEYISEI

SEQ ID NO: 17784 - DNA, 485 bp, Zea mays subsp. mays
  misc_feature (1)..(485): Ceres Seq. ID no. 4612700
  misc_feature (1)..(485): Ortholog of  Ceres SEQ ID NO 13587131 as cited in SEQ ID NO 331
  misc_feature (1)..(485): Ortholog of  Ceres SEQ ID NO 13661176 as cited in SEQ ID NO 61114
agtcgcctccttcctgcgccgccgccgccgccgccgctaccaccgcctcgcggccgcctgcggctccgcgtttccgcacggagaggtgattaggtgtgactgtagtcactgtcatgcagttggtgaaggtttcttgaggctgagaacatggtgctgaagacggaactttgccgcttcagcggccagaagatttatcctgggaaaggcattagatttatccgtgctgattctcaggtcttcctttttgccaactcgaaatgcaagcgctacttccacaactgcctgaagcctgcaaagcttacctggacagcaatgtacaggaagcagcacaagaaggatatccatgctgaagcggtaaagaagaggcgccgcgccaccaagaagccatactccaggtcaattgtgggtgcttccttggaagtaatccagaagaagagagctgagaagccagaggtccgcgatgctgctagagaagctgctcttcg

SEQ ID NO: 17785 - protein, 112 aa, Zea mays subsp. mays
  peptide (1)..(112): Ceres Seq. ID no. 4612701
MVLKTELCRFSGQKIYPGKGIRFIRADSQVFLFANSKCKRYFHNCLKPAKLTWTAMYRKQHKKDIHAEAVKKRRRATKKPYSRSIVGASLEVIQKKRAEKPEVRDAAREAAL

SEQ ID NO: 17786 - protein, 57 aa, Zea mays subsp. mays
  peptide (1)..(57): Ceres Seq. ID no. 4612702
MYRKQHKKDIHAEAVKKRRRATKKPYSRSIVGASLEVIQKKRAEKPEVRDAAREAAL

SEQ ID NO: 17787 - DNA, 1295 bp, Zea mays subsp. mays
  misc_feature (1)..(1295): Ceres Seq. ID no. 12417381
  misc_feature (1)..(1295): Ortholog of  Ceres SEQ ID NO 12585656 as cited in SEQ ID NO 68874
gcacgagaccattacctagaacattaatcgaaaaaaccacctccaattacttcacagcagcgcggcgccgagaagatggcttccccctcgtacaggcttgcggcggcgatcacggccccctctaccggcgagttcctcgtcgtccggcagccgcgcccgccatccccacccgaggaggaagaggattaccggcgcttcgtcgacagcgatctctacgacctcccgtccgcgcccctcgggccactcgagggggcaccccggtcggaggtggccatcggcggcgcggactctgtcgccagccgcctcgacctctcgcgcctcgacgtgtccgccgcccttgatcagatttttcaccaatttggcttgccggttgggatgagtggggagtggaggctcctgaagtatgtggaggaagcagaatttggcccggatgctggcgttaacacggtgtacattgtcggatctcttgagttgagattggatgatctgccagagtcatgtaaatggatgtccaaggagtgtgcattgaggttgctttcggaagcgaaaccaggtaatgatcgcataggacagtatgcatatattggacttctgaattcggagctgtcatcaaactgcacagcttctcctgcattgcccttccccccgcctccactaccccactcccaggagccgcccaggtacgtcgccggcggcgatgacgacgcgcttcaagaagaaccgcaagaagcgcggccacgtgtccgccgggcacggccgcatcggcaagcaccggaagcatcccggaggtcgcggtaacgccggtggcatgcaccaccaccgcatcctcttcgacaagtaccatcccggctacttcggtaaggtcggcatgcgctacttccacaagctccgcaacaagttctactgccccgcggtcaacatcgagcgcctctggtcgatggtgcccgccgaaaaggcggcggaagccggcggcgacaaggccccgcagatcgacgtcacgcagttcggcttcttcaaggtgctcgggaagggggtgctgccgcccaagcccatcgtcgtcaaggccaagctcatctccaaggtcgccgagaagaagatcaaggccgccggcggcgccgtcgtgctcaccgcctagttttcagtccttattcgcctcttggttttgagatctatatctgaactagcagtctttcttgtctcacctatttgtgttaagaagacgtagtttttaaatccatggctccttcctgtttggacagtgctttcatatcaaatatttcaggtatattagagcg

SEQ ID NO: 17788 - protein, 240 aa, Zea mays subsp. mays
  peptide (1)..(240): Ceres Seq. ID no. 12417382
MASPSYRLAAAITAPSTGEFLVVRQPRPPSPPEEEEDYRRFVDSDLYDLPSAPLGPLEGAPRSEVAIGGADSVASRLDLSRLDVSAALDQIFHQFGLPVGMSGEWRLLKYVEEAEFGPDAGVNTVYIVGSLELRLDDLPESCKWMSKECALRLLSEAKPGNDRIGQYAYIGLLNSELSSNCTASPALPFPPPPLPHSQEPPRYVAGGDDDALQEEPQEARPRVRRARPHRQAPEASRRSR

SEQ ID NO: 17789 - protein, 145 aa, Zea mays subsp. mays
  peptide (1)..(145): Ceres Seq. ID no. 12417383
MTTRFKKNRKKRGHVSAGHGRIGKHRKHPGGRGNAGGMHHHRILFDKYHPGYFGKVGMRYFHKLRNKFYCPAVNIERLWSMVPAEKAAEAGGDKAPQIDVTQFGFFKVLGKGVLPPKPIVVKAKLISKVAEKKIKAAGGAVVLTA

SEQ ID NO: 17790 - protein, 140 aa, Zea mays subsp. mays
  peptide (1)..(140): Ceres Seq. ID no. 12417384
MSGEWRLLKYVEEAEFGPDAGVNTVYIVGSLELRLDDLPESCKWMSKECALRLLSEAKPGNDRIGQYAYIGLLNSELSSNCTASPALPFPPPPLPHSQEPPRYVAGGDDDALQEEPQEARPRVRRARPHRQAPEASRRSR

SEQ ID NO: 17791 - DNA, 2397 bp, Zea mays subsp. mays
  misc_feature (1)..(2397): Ceres Seq. ID no. 12363062
  misc_feature (1)..(2397): Ortholog of  Ceres SEQ ID NO 15177870 as cited in SEQ ID NO 52373
  misc_feature (1)..(2397): Ortholog of  Ceres SEQ ID NO 13582380 as cited in SEQ ID NO 56782
gcacgagaccattacctagaacatcctaatcaaaaaattccatttcttcttcgtcctcgcaccagtccctcctccttggaagcgagggaggagagtggagggagagggaggagcgaggcaccggtgagctcgggaggcggcgtggggcttgcacgccggccctacccccagctcactcaccacgctcttgtctgaccaactctctctctctcttatctccttccaagattcccccatttttttgttgttgtccccccattcttgctaggatcattccttgatctttcgctcgctccagtacgcctgttttccagctccggagatcccatctcggccacctcctgcggtctccaagctccaagaggccagattccagcacaaatttgaggtcaatttgcccgctgagctcgaatcaatccgctcggcaacaagtgtcatttgttcccccgatccccgggcttcgattcgatcgaatccgacctaattttattgtgtgtgtgtgtgtttaaccttctctcgctgcacttttcctttctcctccctgtcgcaaacgcaaagtgggttccatcgcgtcacccgcacggctcctctgatcgggcggagaaagaaagcgcataaaaggcgagctcttgatgcggtcttggtcgtagcaacagcagctccactgctcccggcatcgcctgctgttgtttatccatatacggacggagcagcgggcgctccggcagaggcagtggcagcgcgctccccccgtcagcgcgtgctgatgcttgcccccctgctcgccgccttcgctgtcgtcttcctgctcctcctgtccaggccatgcgcccgtgacatgagactgttcctcgcctccctgtgccagcagctcgtgctgtccctgctcgggttcctggcaggcctccgcctgctcagcggcgtcgcggccgcctccgcggccacagagaccatgccgctcatgccctccttcaagaggaagcgggcctcggccacggtggagaatgcggaggaggcggccgccacggccggcggcggcgagacgtcggtgctcgacctgccggagctggccatcgattgcattctggagaagctgcggccggcggagctgcggagcatggccgccgtctgccgctccatgcgcgagcgctgccgcggcgaccacctctgggagcgccacatgacaaacaggtggggccgtgtcctgggccgcgccgccagggacgaatggaggacgcacctggcgtccgccagcgagtcccgcgcggcgggcggcggcggcggcggcggcaagcgccggaggtggctcgccgcgctgtcctgcgtttgcccggtggtgtcctggatgcggcccagggccgacggtggcaagtcgtccgcccccgtgctggacgattccatcatgtcgtggtacctgtccgtggagagcggcaagttctggttcccggctcaggtctacaaccgcgagcatgggcatgttgggttcatgatgtcatgctacgatgcagcgctcagttacgatttgcataccgacacattccgtgcaaggtacccaccacacggtcgacgaaccgtggtgttggaggatggcgtgcaatgggacagggtgagggcaccgcctgttgacacccttgcgcattacctgcacacctctgactgcctgcatgagctccggcccggcgaccacatcgagattcagtggagaaggaacaaagaattcccatacggctggtggtatggagttgttgggcacttggagtcatgtgatggaagcgaacacttttgtcggtgccatcttagtgataccgtggtgctggagtttaatcagtacacgccgggctcaaggtggaggcaagccgttggtgaaacggaaggagcatagggaggagggcaacgagggcgacgggttctacggcggcataaggaagctccgcggcaacgatgacatctccaagtggaggcagctgtggccaacagacgtcctggagtaagcaggaaccgcatcccttctcacaccgacattgatccatcgctcaaatgacacgcctttctttcatcatcatattgaccaaattcgtcgtctctgtcgcgctgttgtaaacgggttagtagaagaacaaatcccgtagctggacaagggtgtaacacttactctctccgtttcgttttagttgtcgctggatagtgcaaaattgaactatccagctacaactaaaaagaaacggatggagtatttgttaggcgtaccaggcgcagactgcttcctatttgttcgtggggctgtaactgtaagccttgtttgtgacccctaagcagtctgcgtcttgtgcctgctgctgtagcggtagagcagagagagatcaaatgtaaattacatttttttagctcaaattcacg

SEQ ID NO: 17792 - protein, 371 aa, Zea mays subsp. mays
  peptide (1)..(371): Ceres Seq. ID no. 12363063
MLAPLLAAFAVVFLLLLSRPCARDMRLFLASLCQQLVLSLLGFLAGLRLLSGVAAASAATETMPLMPSFKRKRASATVENAEEAAATAGGGETSVLDLPELAIDCILEKLRPAELRSMAAVCRSMRERCRGDHLWERHMTNRWGRVLGRAARDEWRTHLASASESRAAGGGGGGGKRRRWLAALSCVCPVVSWMRPRADGGKSSAPVLDDSIMSWYLSVESGKFWFPAQVYNREHGHVGFMMSCYDAALSYDLHTDTFRARYPPHGRRTVVLEDGVQWDRVRAPPVDTLAHYLHTSDCLHELRPGDHIEIQWRRNKEFPYGWWYGVVGHLESCDGSEHFCRCHLSDTVVLEFNQYTPGSRWRQAVGETEGA

SEQ ID NO: 17793 - protein, 347 aa, Zea mays subsp. mays
  peptide (1)..(347): Ceres Seq. ID no. 12363064
MRLFLASLCQQLVLSLLGFLAGLRLLSGVAAASAATETMPLMPSFKRKRASATVENAEEAAATAGGGETSVLDLPELAIDCILEKLRPAELRSMAAVCRSMRERCRGDHLWERHMTNRWGRVLGRAARDEWRTHLASASESRAAGGGGGGGKRRRWLAALSCVCPVVSWMRPRADGGKSSAPVLDDSIMSWYLSVESGKFWFPAQVYNREHGHVGFMMSCYDAALSYDLHTDTFRARYPPHGRRTVVLEDGVQWDRVRAPPVDTLAHYLHTSDCLHELRPGDHIEIQWRRNKEFPYGWWYGVVGHLESCDGSEHFCRCHLSDTVVLEFNQYTPGSRWRQAVGETEGA

SEQ ID NO: 17794 - protein, 309 aa, Zea mays subsp. mays
  peptide (1)..(309): Ceres Seq. ID no. 12363065
MPLMPSFKRKRASATVENAEEAAATAGGGETSVLDLPELAIDCILEKLRPAELRSMAAVCRSMRERCRGDHLWERHMTNRWGRVLGRAARDEWRTHLASASESRAAGGGGGGGKRRRWLAALSCVCPVVSWMRPRADGGKSSAPVLDDSIMSWYLSVESGKFWFPAQVYNREHGHVGFMMSCYDAALSYDLHTDTFRARYPPHGRRTVVLEDGVQWDRVRAPPVDTLAHYLHTSDCLHELRPGDHIEIQWRRNKEFPYGWWYGVVGHLESCDGSEHFCRCHLSDTVVLEFNQYTPGSRWRQAVGETEGA

SEQ ID NO: 17795 - DNA, 418 bp, Zea mays subsp. mays
  misc_feature (1)..(418): Ceres Seq. ID no. 5754401
  misc_feature (1)..(418): Ortholog of  Ceres SEQ ID NO 14306355 as cited in SEQ ID NO 1268
cccacagtgagcgaggttcccctcccgactcggtgatggcggctacggtggcggcggcggctacggtggtggtggcggcggctacggcggtggcaaccgtggcggcggctacggcaactccgacgggaactggaggaactgagcggtggggcccgcgcggccaagttatcctgttcgctaccgtgttgtttaccctagtccagagggtttatcttcgttcgtctcatgtttgttgttgcccatctgtgtttttgattgcaaggtcgctttgtgtcagttgttagtgctgtgttcatcctcggctccagcagacccatgcatcaaccagcatggactgcggatcgatggatgctgttacccccgtcaggctttatcctaagttaatcttcaaggaaaaaatggtgcttcttggtgctgc

SEQ ID NO: 17796 - protein, 93 aa, Zea mays subsp. mays
  peptide (1)..(93): Ceres Seq. ID no. 5754402
HSERGSPPDSVMAATVAAAATVVVAAATAVATVAAATATPTGTGGTERWGPRGQVILFATVLFTLVQRVYLRSSHVCCCPSVFLIARSLCVSC

SEQ ID NO: 17797 - protein, 82 aa, Zea mays subsp. mays
  peptide (1)..(82): Ceres Seq. ID no. 5754403
MAATVAAAATVVVAAATAVATVAAATATPTGTGGTERWGPRGQVILFATVLFTLVQRVYLRSSHVCCCPSVFLIARSLCVSC

SEQ ID NO: 17798 - DNA, 991 bp, Zea mays subsp. mays
  misc_feature (1)..(991): Ceres Seq. ID no. 12359848
  misc_feature (1)..(991): Ortholog of  Ceres SEQ ID NO 13582388 as cited in SEQ ID NO 56812
  misc_feature (1)..(991): Ortholog of  Ceres SEQ ID NO 14305353 as cited in SEQ ID NO 57710
gtccgcccctgcggtgcgggtgctttctccagcgacagcgacagcgagaggggaggggaaccagcaagctcctcctcctctacccctcgcctcgtccgcgccagatctatctgtcccttcctcttgtagttgcaggcagacgcgccatgcggatgcgggtgcttcccgcgtcctggtcatcttcctccgccaagcatagcagcggcagctccgagtcgcaggagcacccttcttcctcctctgctacggccgcggtgtacctcaacatctacgacatctcccccctcaaccactacctctactggttcggactcggcatcttccactccgggatccaagtccatggcatggagtatggctttggagctcatgaataccccaccagcggagtcttccaagtagaacccaaaagctgccccgggtttatcttcaggcgctctgtgtgtgtgggtgtaactcacatgtcccgttcccaagtccgcacttccatagaggatctcgccgaggattatcatggggacacttatcatttgattctcaagaactgcaatcatttcacagcagatgtctgcgagcgtttgaccgggaagccagtacctggatgggtgaatcgactcgccagattaggttccttcttcaattgtgtattgcctgacagcatcaaggtttcagcagtcagagatgtaaatgcacatccagatttttctgatgatggcttggggtccaatgcctcgatccttgagggaagtgatgacgatgatttagaccaactcctaagaacacctaacagcgacactgtgtcttcaagggacaagacattaactcctggcagggatagtctctaattgttctcctttgatagcaaaatagaggcaagtgctttgatgttcacgtctcatggtggtatggggttggcctgatcatatcatcatctgctgtcaaaatttggtggcgcgctagtctggggtgatgaangattgtttgatattgt

SEQ ID NO: 17799 - protein, 280 aa, Zea mays subsp. mays
  peptide (1)..(280): Ceres Seq. ID no. 12359849
PPLRCGCFLQRQRQREGRGTSKLLLLYPSPRPRQIYLSLPLVVAGRRAMRMRVLPASWSSSSAKHSSGSSESQEHPSSSSATAAVYLNIYDISPLNHYLYWFGLGIFHSGIQVHGMEYGFGAHEYPTSGVFQVEPKSCPGFIFRRSVCVGVTHMSRSQVRTSIEDLAEDYHGDTYHLILKNCNHFTADVCERLTGKPVPGWVNRLARLGSFFNCVLPDSIKVSAVRDVNAHPDFSDDGLGSNASILEGSDDDDLDQLLRTPNSDTVSSRDKTLTPGRDSL

SEQ ID NO: 17800 - protein, 232 aa, Zea mays subsp. mays
  peptide (1)..(232): Ceres Seq. ID no. 12359850
MRMRVLPASWSSSSAKHSSGSSESQEHPSSSSATAAVYLNIYDISPLNHYLYWFGLGIFHSGIQVHGMEYGFGAHEYPTSGVFQVEPKSCPGFIFRRSVCVGVTHMSRSQVRTSIEDLAEDYHGDTYHLILKNCNHFTADVCERLTGKPVPGWVNRLARLGSFFNCVLPDSIKVSAVRDVNAHPDFSDDGLGSNASILEGSDDDDLDQLLRTPNSDTVSSRDKTLTPGRDSL

SEQ ID NO: 17801 - protein, 230 aa, Zea mays subsp. mays
  peptide (1)..(230): Ceres Seq. ID no. 12359851
MRVLPASWSSSSAKHSSGSSESQEHPSSSSATAAVYLNIYDISPLNHYLYWFGLGIFHSGIQVHGMEYGFGAHEYPTSGVFQVEPKSCPGFIFRRSVCVGVTHMSRSQVRTSIEDLAEDYHGDTYHLILKNCNHFTADVCERLTGKPVPGWVNRLARLGSFFNCVLPDSIKVSAVRDVNAHPDFSDDGLGSNASILEGSDDDDLDQLLRTPNSDTVSSRDKTLTPGRDSL

SEQ ID NO: 17802 - DNA, 495 bp, Zea mays subsp. mays
  misc_feature (1)..(495): Ceres Seq. ID no. 11414813
  misc_feature (1)..(495): Ortholog of  Ceres SEQ ID NO 15171239 as cited in SEQ ID NO 52298
atctctcactccctcgctccgtctaccagtaccaccacgtccctcctcgtcgacgatctcgtagcggcggcgcacatggcgagcgacggcgcggcggctacgccagcgaaggttaccccaaagaaggccaatctcctcgacccgcactccatcaagcaccttctcgacgagaccatctccgaggtcgtgaagagtaagggctacaccgaggacacgcggctgggcaactggaagctggggatcggagccgccgtgattgctgtcgccctcctcgctcagttttaccccaagaagttcccgcagaaccgcgatttcctccttggctgcatcgccctgyatgtggtgctgaatgtggtgctgctgatccttagctacaccaaggagaaggatgccatcctattcacgcaccctcctatgaatacttgccatcaggtgccaaggagaagatgcgtttgtcttcaatattaggctgctgcacaatgacagaaagagcat

SEQ ID NO: 17803 - protein, 155 aa, Zea mays subsp. mays
  peptide (1)..(155): Ceres Seq. ID no. 11414814
  misc_feature (113)..(113): Xaa is any aa, unknown or other
ISHSLAPSTSTTTSLLVDDLVAAAHMASDGAAATPAKVTPKKANLLDPHSIKHLLDETISEVVKSKGYTEDTRLGNWKLGIGAAVIAVALLAQFYPKKFPQNRDFLLGCIALXVVLNVVLLILSYTKEKDAILFTHPPMNTCHQVPRRRCVCLQY

SEQ ID NO: 17804 - protein, 130 aa, Zea mays subsp. mays
  peptide (1)..(130): Ceres Seq. ID no. 11414815
  misc_feature (88)..(88): Xaa is any aa, unknown or other
MASDGAAATPAKVTPKKANLLDPHSIKHLLDETISEVVKSKGYTEDTRLGNWKLGIGAAVIAVALLAQFYPKKFPQNRDFLLGCIALXVVLNVVLLILSYTKEKDAILFTHPPMNTCHQVPRRRCVCLQY

SEQ ID NO: 17805 - DNA, 1343 bp, Zea mays subsp. mays
  misc_feature (1)..(1343): Ceres Seq. ID no. 13491323
  misc_feature (1)..(1343): Ortholog of  Ceres SEQ ID NO 15170881 as cited in SEQ ID NO 54654
aaaaaaacccaaacgtccatctcatcgacaccccctccgatctccttatcccttcccgtcgcataaacccccgccgccgtgacctcgcagcgaccctgccctcgttctaggctttcactgcaggcatcgcgtctccagtagcagggcaagagaaaggagaggatggcgtcgccgataccgcgcgagtgggtcgggctgcagcagtttccggcggctacacagaccaagctgcacgaactcctcggcaaactcaaggaggaggatgtgagcacattaacaattctggtgatggggaaaggtggagtggggaagtcatccactgttaactccatcgttggggagagggttgcctctgtcagcgctttccagtctgagggtctgagaccaatgatgtgctcgcgcacaagggcagggttcactttgaacattatcgacactcctgggcttattgaaggtggatacattaatgagcaggccgttgacatcattaagagatttcttctaggcaagactatcgatgttctcctgtacgtggatcgtttggatgcgtatagaatggatacactggatgaacaggttataagagccatcaccaattcatttggaaaagatatttggcgaagatcattggttgtgttgacccatgctcaactctcaccacctgatggaatcgactataatgatttctttacaagaagatcagaggcacttttgcgatacatccactcaggagcaggaatcaacaaacgagaatatggggatttccccttgccaatagcattggtggagaacagtggaaggtgcaagactaatgagcatggggagaagatacttccggacggaactctgtgggttccaaacctgatgaaagaaattactgttgtcatctcaaacgggagcagtcccattcatgttgatcagaagttaattgatggtccaaaccctaacaatcgccgaaagttgttcataccacttatccttgctgtggagtacttcttggtggtaaaaggaatccggagggcgatccatgcagatatcgcaaacgggaaggtagatgactgggagcagcgttaccgggacttggtgggaagcagggacctcgtagagcagaaaggttctacctcccggaaccgcaaagcctaagttggtgtaccagaaaggattctattcgtgttgagacccacccactcgatctgctgctccttttcctaaatctgtgctgggagctttatagagttcgctggtactacttgaaaaaaaatgctcctgttgcagttgataagattatgtttcccattttatgacgattggccgtcttcgcaattttgaagatgttatcgaat

SEQ ID NO: 17806 - protein, 326 aa, Zea mays subsp. mays
  peptide (1)..(326): Ceres Seq. ID no. 13491324
MASPIPREWVGLQQFPAATQTKLHELLGKLKEEDVSTLTILVMGKGGVGKSSTVNSIVGERVASVSAFQSEGLRPMMCSRTRAGFTLNIIDTPGLIEGGYINEQAVDIIKRFLLGKTIDVLLYVDRLDAYRMDTLDEQVIRAITNSFGKDIWRRSLVVLTHAQLSPPDGIDYNDFFTRRSEALLRYIHSGAGINKREYGDFPLPIALVENSGRCKTNEHGEKILPDGTLWVPNLMKEITVVISNGSSPIHVDQKLIDGPNPNNRRKLFIPLILAVEYFLVVKGIRRAIHADIANGKVDDWEQRYRDLVGSRDLVEQKGSTSRNRKA

SEQ ID NO: 17807 - protein, 284 aa, Zea mays subsp. mays
  peptide (1)..(284): Ceres Seq. ID no. 13491325
MGKGGVGKSSTVNSIVGERVASVSAFQSEGLRPMMCSRTRAGFTLNIIDTPGLIEGGYINEQAVDIIKRFLLGKTIDVLLYVDRLDAYRMDTLDEQVIRAITNSFGKDIWRRSLVVLTHAQLSPPDGIDYNDFFTRRSEALLRYIHSGAGINKREYGDFPLPIALVENSGRCKTNEHGEKILPDGTLWVPNLMKEITVVISNGSSPIHVDQKLIDGPNPNNRRKLFIPLILAVEYFLVVKGIRRAIHADIANGKVDDWEQRYRDLVGSRDLVEQKGSTSRNRKA

SEQ ID NO: 17808 - protein, 251 aa, Zea mays subsp. mays
  peptide (1)..(251): Ceres Seq. ID no. 13491326
MMCSRTRAGFTLNIIDTPGLIEGGYINEQAVDIIKRFLLGKTIDVLLYVDRLDAYRMDTLDEQVIRAITNSFGKDIWRRSLVVLTHAQLSPPDGIDYNDFFTRRSEALLRYIHSGAGINKREYGDFPLPIALVENSGRCKTNEHGEKILPDGTLWVPNLMKEITVVISNGSSPIHVDQKLIDGPNPNNRRKLFIPLILAVEYFLVVKGIRRAIHADIANGKVDDWEQRYRDLVGSRDLVEQKGSTSRNRKA

SEQ ID NO: 17809 - DNA, 1241 bp, Zea mays subsp. mays
  misc_feature (1)..(1241): Ceres Seq. ID no. 12417443
  misc_feature (1)..(1241): Ortholog of  Ceres SEQ ID NO 15169248 as cited in SEQ ID NO 55022
  misc_feature (1)..(1241): Ortholog of  Ceres SEQ ID NO 14315042 as cited in SEQ ID NO 56959
  misc_feature (1)..(1241): Ortholog of  Ceres SEQ ID NO 15173077 as cited in SEQ ID NO 64566
  misc_feature (1)..(1241): Ortholog of  Ceres SEQ ID NO 13662898 as cited in SEQ ID NO 66199
aaagcagcacgggcaacacgccgagcaaaacagcgaaatcctcaaatccccaccccggctggtgacggcgccgcccccgctgctgcctgcggtcctgcttctgctaatagtaataggtattcagattcgagcagagcactcccgtgctgcaggcaagggaggacgcaccaccatggattgggatgctccggcattgacgagcttcgtcgccgacttgtccttccgccacctctgctgctacggggccggaatcgcagggaacgccttcgccttcgtgctcttcgtctccccgctccccacattcaagaggatcgtccgcaacggatccacggagcagttctcgtgcacgccgtacatctactcgctgctcaactgcctcatctgcatgtggtacggcctccccttcgtctcctacggcgtcgtcctcgtcgccaccgtcaactccatcggcgccgtgttccagctcgcctacaccgccgtgttcatcgccttcgccgacgccaagcagaggctcaaggtctctgctctcctggccgctgtcttcctggtgttcggactgattgtgtttgttagtctggctttgttggatcacaaagcccggcaggtgttcgtcggatatctcagcgtcgcgtccctcgtatgcatgttcgcgtcccccatgtcaatcgtcaatctggtcatccggacgaagagcgtggaatacatgcccttctacttgtcattatccatgtttctgatgagtgcatccttcgtcatatacggagtgctgcttggtgatggcttcatatatattccaaatgcattggaaccatattgggtatcgtacagttgctgctgtatgcctacatcagaaagggatcaagcgaggaagccaagctgcccttactaatcacacatacatgagcatgccaaaaggaaaaaaaaacaaggttcgctgataggctttcccgaaatcctgtctctggtcaaacttccaggtcgatgtacttgtccgaattgttttgctcctgtgaaaaaagcatgccgttctttcgttttgtttacacgcgacggggatcgtagtttcgctgtatattccatggtagatgctccaagttgttgctggagtcattcgtttatgagtgagcgaagctttgtatataatatagtagtagtaatgtggttccgtgaacttcatcaacagagaggaccagctgtatacacaaagaaaagcaataaaaggatgttactatatcattacc

SEQ ID NO: 17810 - protein, 295 aa, Zea mays subsp. mays
  peptide (1)..(295): Ceres Seq. ID no. 12417444
KQHGQHAEQNSEILKSPPRLVTAPPPLLPAVLLLLIVIGIQIRAEHSRAAGKGGRTTMDWDAPALTSFVADLSFRHLCCYGAGIAGNAFAFVLFVSPLPTFKRIVRNGSTEQFSCTPYIYSLLNCLICMWYGLPFVSYGVVLVATVNSIGAVFQLAYTAVFIAFADAKQRLKVSALLAAVFLVFGLIVFVSLALLDHKARQVFVGYLSVASLVCMFASPMSIVNLVIRTKSVEYMPFYLSLSMFLMSASFVIYGVLLGDGFIYIPNALEPYWVSYSCCCMPTSERDQARKPSCPY

SEQ ID NO: 17811 - protein, 238 aa, Zea mays subsp. mays
  peptide (1)..(238): Ceres Seq. ID no. 12417445
MDWDAPALTSFVADLSFRHLCCYGAGIAGNAFAFVLFVSPLPTFKRIVRNGSTEQFSCTPYIYSLLNCLICMWYGLPFVSYGVVLVATVNSIGAVFQLAYTAVFIAFADAKQRLKVSALLAAVFLVFGLIVFVSLALLDHKARQVFVGYLSVASLVCMFASPMSIVNLVIRTKSVEYMPFYLSLSMFLMSASFVIYGVLLGDGFIYIPNALEPYWVSYSCCCMPTSERDQARKPSCPY

SEQ ID NO: 17812 - protein, 190 aa, Zea mays subsp. mays
  peptide (1)..(190): Ceres Seq. ID no. 12417446
KAARATRRAKQRNPQIPTPAGDGAAPAAACGPASANSNRYSDSSRALPCCRQGRTHHHGLGCSGIDELRRRLVLPPPLLLRGRNRRERLRLRALRLPAPHIQEDRPQRIHGAVLVHAVHLLAAQLPHLHVVRPPLRLLRRRPRRHRQLHRRRVPARLHRRVHRLRRRQAEAQGLCSPGRCLPGVRTDCVC

SEQ ID NO: 17813 - DNA, 1163 bp, Zea mays subsp. mays
  misc_feature (1)..(1163): Ceres Seq. ID no. 12391908
  misc_feature (1)..(1163): Ortholog of  Ceres SEQ ID NO 15171634 as cited in SEQ ID NO 57593
  misc_feature (1)..(1163): Ortholog of  Ceres SEQ ID NO 14301936 as cited in SEQ ID NO 67361
acaggctcccagcagctcgattcgctcgcctagtcgccttctcgaattctcccgcaaacttgacgctgaagcctgcacgagaggacatggccatggccacgcgtgtcacggcagcagcggtcgtcctccgggttctctcgttgctgatcctgctgcgcacgggcacgtgcgccgacgactactcggcgttcgtgtacgcggggtgctcgcagggccgctacagcgccgattcgcagtacgcgtcgggggtggactccgtgctcacctcggtcgccagcagcgcgccgtacgccccctacgacaacttcacctcgccgaccgactcgtccgtggtcggcctctaccagtgccgctccgacctccccgcctccgtctgcagcggctgcgtccgctccgccatctccaggctctcctctctctgcgcctgggcggtcggcggcgcggtgcagctgcgggcctgcttcgtgcgatacgggaacgactcgttcctggggaagcaggacacgncggtgctgttcaagaaatgcggcggcacgcccggggacgccggcggggtggccatgagggactcggcgctcggcgcgctcgtggccgcgncggcgccggcgggcggagggttccgcaccggagggtccggcgccgtgcaggccatgtcgcagtgcgtgggggacctcggcgccaagccctgctccgantgcgtctcggccgcgnccgcacagctcaaggccgggtgcggttacgccacggccggcgaggtctacctcggcaagtgctacgcgcgcttctgggccaacggtggcggaggtttcagtagcagcagcagcagcgccggccggcatggatttcgtctagtccacgtggtcgccgccggtttattcttcccctccttggcttatgcctcacttgccatataggtattgttgcaccgtgcggtgatgttgagactggagcagtagctatgctgtgttttgtcatcatgcttgagatttacagctcagtttttgctcttgtgctcaaactcaaatggtgttcatgtagcttaactctgtctctttctttctcaagtcttataactgtaaatttcttacgtcgtatgcatgcaaactatgctaaatcatgtataagtaatctttttactacagcttaccaccattattaatctt

SEQ ID NO: 17814 - protein, 303 aa, Zea mays subsp. mays
  peptide (1)..(303): Ceres Seq. ID no. 12391909
  misc_feature (169)..(169): Xaa is any aa, unknown or other
  misc_feature (199)..(199): Xaa is any aa, unknown or other
  misc_feature (231)..(231): Xaa is any aa, unknown or other
  misc_feature (237)..(237): Xaa is any aa, unknown or other
RLPAARFARLVAFSNSPANLTLKPAREDMAMATRVTAAAVVLRVLSLLILLRTGTCADDYSAFVYAGCSQGRYSADSQYASGVDSVLTSVASSAPYAPYDNFTSPTDSSVVGLYQCRSDLPASVCSGCVRSAISRLSSLCAWAVGGAVQLRACFVRYGNDSFLGKQDTXVLFKKCGGTPGDAGGVAMRDSALGALVAAXAPAGGGFRTGGSGAVQAMSQCVGDLGAKPCSXCVSAAXAQLKAGCGYATAGEVYLGKCYARFWANGGGGFSSSSSSAGRHGFRLVHVVAAGLFFPSLAYASLAI

SEQ ID NO: 17815 - protein, 275 aa, Zea mays subsp. mays
  peptide (1)..(275): Ceres Seq. ID no. 12391910
  misc_feature (141)..(141): Xaa is any aa, unknown or other
  misc_feature (171)..(171): Xaa is any aa, unknown or other
  misc_feature (203)..(203): Xaa is any aa, unknown or other
  misc_feature (209)..(209): Xaa is any aa, unknown or other
MAMATRVTAAAVVLRVLSLLILLRTGTCADDYSAFVYAGCSQGRYSADSQYASGVDSVLTSVASSAPYAPYDNFTSPTDSSVVGLYQCRSDLPASVCSGCVRSAISRLSSLCAWAVGGAVQLRACFVRYGNDSFLGKQDTXVLFKKCGGTPGDAGGVAMRDSALGALVAAXAPAGGGFRTGGSGAVQAMSQCVGDLGAKPCSXCVSAAXAQLKAGCGYATAGEVYLGKCYARFWANGGGGFSSSSSSAGRHGFRLVHVVAAGLFFPSLAYASLAI

SEQ ID NO: 17816 - protein, 273 aa, Zea mays subsp. mays
  peptide (1)..(273): Ceres Seq. ID no. 12391911
  misc_feature (139)..(139): Xaa is any aa, unknown or other
  misc_feature (169)..(169): Xaa is any aa, unknown or other
  misc_feature (201)..(201): Xaa is any aa, unknown or other
  misc_feature (207)..(207): Xaa is any aa, unknown or other
MATRVTAAAVVLRVLSLLILLRTGTCADDYSAFVYAGCSQGRYSADSQYASGVDSVLTSVASSAPYAPYDNFTSPTDSSVVGLYQCRSDLPASVCSGCVRSAISRLSSLCAWAVGGAVQLRACFVRYGNDSFLGKQDTXVLFKKCGGTPGDAGGVAMRDSALGALVAAXAPAGGGFRTGGSGAVQAMSQCVGDLGAKPCSXCVSAAXAQLKAGCGYATAGEVYLGKCYARFWANGGGGFSSSSSSAGRHGFRLVHVVAAGLFFPSLAYASLAI

SEQ ID NO: 17817 - DNA, 1268 bp, Zea mays subsp. mays
  misc_feature (1)..(1268): Ceres Seq. ID no. 12361287
  misc_feature (1)..(1268): Ortholog of  Ceres SEQ ID NO 13654989 as cited in SEQ ID NO 63117
  misc_feature (1)..(1268): Ortholog of  Ceres SEQ ID NO 13584744 as cited in SEQ ID NO 69137
gcacgagaccattacctagaacatcctaatcaaaaaattaaaccatcgaacattctccttggcgaaggctatcatgcaaaattgtccgactttggacttgctaagcttggtcctgtaggcgacaagactcatgtgacaacacgcgttatggggacacatggttattgtgctcctgaatatgccttagctggacagctgacagtgaagtctgacatctatagttttggcgtcgttttccttgagctaattacaggtcgaagaccacaagacactgatcggcctcctgaggaacaagacctagttgcatgggctcgtccattgttcaaagaccaaaagaagtttcgcaagatggctgatccttcgttgtgtggccgcttcccaaagaggggtttattccaggcactagctattgcagcaatgtgtttgcaggagaaggcaaaaagccgacctcccatgagggaagttgccgcagctctctcttatttagcatcacaagcatacgacaggaacaacaacgctgctgctcatcgtaatcgtgccgggccttcaacaccgagagttctggacgaccagattggccaggacacctgcacattggctaatcaacagggagctcagatgtccatgcatgtcgggacagaccacgccatgcctgaagtgaaggaagcttcctgtagtggttcacatcgtggaggacggggcagggttaccccgaatggcgctgatagggagcgtgcacttgcggacgccaacgtgtgggccgaggcttggaggcgccaggagaaggcaagcaagatgcgatagcgaccagagcctgactgcatgagttttgacatgtcactgcaaagatgcttactttgcatacattttgaaagagaactgtgggctacacgaagggttgttagaatagaaagaggaataatgcgcagtggaaatgtagagcttcaccagagtgagcgcttcgaagatttcaccggtgaatctacagtactcagacttgtttcagtgcgtacatggatttagcttactttatacacagacacttcacactccatagatgcatgtaatagctcaataataggcacagtagactacacaatctgtctgtagttcagcggttttggaaaattaataacataggatccgccgttaggttgcatgaaatgctatgatccgttggcgggtcttgcattctctattgggtcaacgtctacatatttgtacatcgttcaaccatttacatgatgaaatatacaattaagacttct

SEQ ID NO: 17818 - protein, 267 aa, Zea mays subsp. mays
  peptide (1)..(267): Ceres Seq. ID no. 12361288
ARDHYLEHPNQKIKPSNILLGEGYHAKLSDFGLAKLGPVGDKTHVTTRVMGTHGYCAPEYALAGQLTVKSDIYSFGVVFLELITGRRPQDTDRPPEEQDLVAWARPLFKDQKKFRKMADPSLCGRFPKRGLFQALAIAAMCLQEKAKSRPPMREVAAALSYLASQAYDRNNNAAAHRNRAGPSTPRVLDDQIGQDTCTLANQQGAQMSMHVGTDHAMPEVKEASCSGSHRGGRGRVTPNGADRERALADANVWAEAWRRQEKASKMR

SEQ ID NO: 17819 - protein, 218 aa, Zea mays subsp. mays
  peptide (1)..(218): Ceres Seq. ID no. 12361289
MGTHGYCAPEYALAGQLTVKSDIYSFGVVFLELITGRRPQDTDRPPEEQDLVAWARPLFKDQKKFRKMADPSLCGRFPKRGLFQALAIAAMCLQEKAKSRPPMREVAAALSYLASQAYDRNNNAAAHRNRAGPSTPRVLDDQIGQDTCTLANQQGAQMSMHVGTDHAMPEVKEASCSGSHRGGRGRVTPNGADRERALADANVWAEAWRRQEKASKMR

SEQ ID NO: 17820 - protein, 151 aa, Zea mays subsp. mays
  peptide (1)..(151): Ceres Seq. ID no. 12361290
MADPSLCGRFPKRGLFQALAIAAMCLQEKAKSRPPMREVAAALSYLASQAYDRNNNAAAHRNRAGPSTPRVLDDQIGQDTCTLANQQGAQMSMHVGTDHAMPEVKEASCSGSHRGGRGRVTPNGADRERALADANVWAEAWRRQEKASKMR

SEQ ID NO: 17821 - DNA, 1045 bp, Zea mays subsp. mays
  misc_feature (1)..(1045): Ceres Seq. ID no. 15180507
  misc_feature (1)..(1045): Ortholog of  Ceres SEQ ID NO 14305657 as cited in SEQ ID NO 52544
acccaatgtcgcgtgcggccactagatttttcctgacgcggtgtctgctcccacttcccctcctctcccccaggtggcggcagcggcggcggggtagcatttgtgctacgagggcttttgcaatggcggcttcggggttcggcggcggcgaggcgttccggctctcggccgcaccaggggccggcttactgaagctgcacaagggcgacatcaccctctggtccgtcgactgcgccaccgacgccatcgttaatgctgctaatgagcgaatgttaggtggcggaggtgttgatggagctatacatcaagctgctggaccagagctagtgcaagcatgccggaaagttccagaggtcaaaccaggtaagcaggagcgtccaccccagccgccgccatgaagcgcaacccccgcgtcacgagctcccgccggaagtgccgcaaggcgcacttcacggccccgtcctccgtccgccgcgtgctcatgtccgcggcgctatcgacggagctccgccacaagtacaatgtgcgttccatcccgatccgcaaggacgacgaggtgcaggtcgtgcgcggcacctacaagggccgtgagggcaaagtggtgcaggtgtaccgccgtcgctgggtcatccacgtcgagcggatcacccgcgagaaggtgaacggctccaccgtgaacgtgggcatccacccttccaaggtgatggttacaaagctgaagcttgacaaggaccgcaaggctctcctcgaccgcaaggcccggggccgcgccgccgacaaggctaagggcaagtttactgccgacgacgtcgccgccgctgctggtggcgccgccgccactggcgcgtctctccaggagatcgactaggcgcttcgcggggatctgatggtggtcctaccgcctattactccttatcgctctagtttttgctatcaatgattatgtgctaggagttttatgttacttataaactgctttgagcctcgatgggagttgaacttaatgtggagtgtatctgagatatgaagaactcattatatggcc

SEQ ID NO: 17822 - protein, 157 aa, Zea mays subsp. mays
  peptide (1)..(157): Ceres Seq. ID no. 15180508
MKRNPRVTSSRRKCRKAHFTAPSSVRRVLMSAALSTELRHKYNVRSIPIRKDDEVQVVRGTYKGREGKVVQVYRRRWVIHVERITREKVNGSTVNVGIHPSKVMVTKLKLDKDRKALLDRKARGRAADKAKGKFTADDVAAAAGGAAATGASLQEID

SEQ ID NO: 17823 - protein, 131 aa, Zea mays subsp. mays
  peptide (1)..(131): Ceres Seq. ID no. 15180509
PMSRAATRFFLTRCLLPLPLLSPRWRQRRRGSICATRAFAMAASGFGGGEAFRLSAAPGAGLLKLHKGDITLWSVDCATDAIVNAANERMLGGGGVDGAIHQAAGPELVQACRKVPEVKPGKQERPPQPPP

SEQ ID NO: 17824 - protein, 130 aa, Zea mays subsp. mays
  peptide (1)..(130): Ceres Seq. ID no. 15180510
MSRAATRFFLTRCLLPLPLLSPRWRQRRRGSICATRAFAMAASGFGGGEAFRLSAAPGAGLLKLHKGDITLWSVDCATDAIVNAANERMLGGGGVDGAIHQAAGPELVQACRKVPEVKPGKQERPPQPPP

SEQ ID NO: 17825 - DNA, 1544 bp, Zea mays subsp. mays
  misc_feature (1)..(1544): Ceres Seq. ID no. 12435291
  misc_feature (1)..(1544): Ortholog of  Ceres SEQ ID NO 14308430 as cited in SEQ ID NO 55350
  misc_feature (1)..(1544): Ortholog of  Ceres SEQ ID NO 15177799 as cited in SEQ ID NO 59221
  misc_feature (1)..(1544): Ortholog of  Ceres SEQ ID NO 13662846 as cited in SEQ ID NO 65519
actttgtggcagacgaacagggaaagtgaaaaatcgctttcgcacaagtcgcggaacagaggcaagcgctgtgccacacagcgggagtcctccccgactccccgagagatttgctgcccagagccttcgaatcgggttcaatcccttcgatctttctgcccgccgccgccacgggactccagaagttgccttcgattcggccggggccgtggaagcggggatggggctcggagaggcggcggggcggctcctggcggccgtggactgggagcgcgaggcctaccctgcgtacgacgacttcctcgcgctccccgccttcgttctcttcttccctaccgtccgcttcctcctcgaccgcttcgtcttcaagtgggttgcaatgaggcttatacatgggcagggacatcagagagctaataatgaaacagaagaggcaaggaagaagataagaaaattcaaggaatcagcttggaaatgtgtttatttcctgtctggagagcttttatctttgtctgtcacatataatgagccttggttcaccaataccagatatttttgggtaggaccaggagaacaggtctggcctgaccaaaagataaaattgaaacttaaggctgtatatatgtatgctgctggattctacacatattccatatttgcacttatgttttgggaaacaaggcgttcagactttggagtgtcaatgtctcatcatgttgctactgttgttctgattgttctatcttacgtgttcagatttgctagagttggctctatagtattggcaattcatgatgcaagtgacgttttcctggaagtagggaagatgtccaagtacagccattgtgattggcttgccaatgtttcgtttctgttttttgttatttcgtgggttcttctccgcctcacatattttccgttctggattctgagaagtacaagctatgaggtcttgttgactttggacaaaaagaagcacaattttgatggtcctatatactattatgtgttcaattcccttctattttcactacttgttctccacatatattggtgggttttaatatatcggatgcttgtgagacaaatcaagacaagaaatgttggagatgatgttcgatctgattctgaaggagaagacgaccatgaagattgattgggggcatcatcttactttctgtgttataacggtgcttatacattcttttacttgattccaacattgttcctcacgagattcaccgaagccgggctacgggttacctgtgtcttggctgccaatttctgtgcattagaaacaacgctgcaatgcattagaaaaaagctggatgtcgaatataacattcttttcagtgttcacacaaagtgcagcggtaaatgtagcgccaatttagtattccggaaacaaaaggactggttgtaaatcaaagcctttctgccgacataccatgtacattctgtttgccaggatgacaccgcttggagttttgtgaacggtagcgctggccgccggtgaaacgcttctcttgagctcctgttgttcc

SEQ ID NO: 17826 - protein, 384 aa, Zea mays subsp. mays
  peptide (1)..(384): Ceres Seq. ID no. 12435292
LCGRRTGKVKNRFRTSRGTEASAVPHSGSPPRLPERFAAQSLRIGFNPFDLSARRRHGTPEVAFDSAGAVEAGMGLGEAAGRLLAAVDWEREAYPAYDDFLALPAFVLFFPTVRFLLDRFVFKWVAMRLIHGQGHQRANNETEEARKKIRKFKESAWKCVYFLSGELLSLSVTYNEPWFTNTRYFWVGPGEQVWPDQKIKLKLKAVYMYAAGFYTYSIFALMFWETRRSDFGVSMSHHVATVVLIVLSYVFRFARVGSIVLAIHDASDVFLEVGKMSKYSHCDWLANVSFLFFVISWVLLRLTYFPFWILRSTSYEVLLTLDKKKHNFDGPIYYYVFNSLLFSLLVLHIYWWVLIYRMLVRQIKTRNVGDDVRSDSEGEDDHED

SEQ ID NO: 17827 - protein, 311 aa, Zea mays subsp. mays
  peptide (1)..(311): Ceres Seq. ID no. 12435293
MGLGEAAGRLLAAVDWEREAYPAYDDFLALPAFVLFFPTVRFLLDRFVFKWVAMRLIHGQGHQRANNETEEARKKIRKFKESAWKCVYFLSGELLSLSVTYNEPWFTNTRYFWVGPGEQVWPDQKIKLKLKAVYMYAAGFYTYSIFALMFWETRRSDFGVSMSHHVATVVLIVLSYVFRFARVGSIVLAIHDASDVFLEVGKMSKYSHCDWLANVSFLFFVISWVLLRLTYFPFWILRSTSYEVLLTLDKKKHNFDGPIYYYVFNSLLFSLLVLHIYWWVLIYRMLVRQIKTRNVGDDVRSDSEGEDDHED

SEQ ID NO: 17828 - protein, 258 aa, Zea mays subsp. mays
  peptide (1)..(258): Ceres Seq. ID no. 12435294
MRLIHGQGHQRANNETEEARKKIRKFKESAWKCVYFLSGELLSLSVTYNEPWFTNTRYFWVGPGEQVWPDQKIKLKLKAVYMYAAGFYTYSIFALMFWETRRSDFGVSMSHHVATVVLIVLSYVFRFARVGSIVLAIHDASDVFLEVGKMSKYSHCDWLANVSFLFFVISWVLLRLTYFPFWILRSTSYEVLLTLDKKKHNFDGPIYYYVFNSLLFSLLVLHIYWWVLIYRMLVRQIKTRNVGDDVRSDSEGEDDHED

SEQ ID NO: 17829 - DNA, 2001 bp, Zea mays subsp. mays
  misc_feature (1)..(2001): Ceres Seq. ID no. 12387575
  misc_feature (1)..(2001): Ortholog of  Ceres SEQ ID NO 14303109 as cited in SEQ ID NO 66330
gcacgagaccattacctagaacatcctaatcgaaaaatcctggtgctgcacgccccacggtctcggcggccacgccccacactcctcgtcctcgtcctcctcctcgcacccctcctccccggcccgcgccgccgcccatcacatggacccgccgcccaccagctctaccgtggcctcctcctacgccactccgccccagccttcctacgcgccctcctaccctaccagctacaccaagttcaactccgcgctcaacgcggggttgctcaatcccatgtccccgccgccgctgccacttgacaagacgcgctccagccccacactcttcgacatgatggccaacgagcaggactaccacccccgcaccgccgccggcatccactccatccccgccccgccccagccgcaccagctcccgcccgcgcgctccatggacaggcagatgctgctccaggaccgcatcgccgacctcatcggcagctgtagccccgggaaccagttcaacgacgccgactcctccgacgtccgcctcaccctcagctccaaggacggcctctccgtcacgctctgcgttcaccgccacatactcgtcgcgcacagcaggttcttcgccgccaaactgtccgaccgctggtccaagcagcagcggacgctgccgcacatcgtcgagatctccgactgcgacgacgtcgaggtgtacgccgagacgctgcggctcatgtactgcaaggatctccgccggaggctgatgcgggaggatgtgaacaaggtccttggcatcctgaaggtgtccgcagccattgtattcgatgccggggtgttgtcttgcttggagtacttggaggctgcgccttgggctgaggacgatgatgagaaggtggctacgttgttgacgcagctgcatcttgagaactccggggctggggaggtgcttaagagggtgtcactggaattggccccttcgtcattggttgaagaggcagatgaaggaggcagctgcaacggtggcaattccagtggtggtgaggaggtattgctgaggctcctgcaggtcgtcctggaagggaaggacgaaaaggcaaggagggagatgaaggggctagtgtccaaaatgctcagggagaacagcacatcccgtggtggagcaattggtggcgaccttcgcaaggaatcgctctattctgcgtgcaatggatgcttgtccctgctgtgcgagcaatttgtgagggcttcagagggtgatcactcagaggtggcgcggatcgcaaggcaggctgacaacctgcattggatgcttgacatccttgttgagcgccagatcgcggaggatttcttgaggacatgggcaacgcagactgagttagcggcgatgcatcgtaaagtgccagcgatacaccgctacgaagtgagccgagtgacggcaagactctttgttggggttggcaagggtcagatcttggtgtccaaggaggcccgttgccagctcttgagcacctggctagagcccttttatgaggacttctgatggatgcggcgagcatgcaaggggcttgaccggcatttgatcgaggatggactggcaaacacaatcctgacgctgcctcttgcaactcagcaggagatccttctggcatggtttaatcggttcctcaactctggggaggattgcccaaacattcagagagggtttgaggtgtggtggcggcgggcattctggaaaaggaactctgaaccagaaccaccatcccgtttgaggattactgcgatctgcgagaactcttgatgacggcggttcatattcgacatggaatgtggcggatgctgtgatataattattgattttctgtgatatgtantantgtctanctgtttctcannttttttttttgntatgtctgattaggcagttagccaattacacatgtcatcttgatcctgtttcaatgcaatgtataccangtccaatgtactactatgccncaaccattttgattcnaagtg

SEQ ID NO: 17830 - protein, 460 aa, Zea mays subsp. mays
  peptide (1)..(460): Ceres Seq. ID no. 12387576
MDPPPTSSTVASSYATPPQPSYAPSYPTSYTKFNSALNAGLLNPMSPPPLPLDKTRSSPTLFDMMANEQDYHPRTAAGIHSIPAPPQPHQLPPARSMDRQMLLQDRIADLIGSCSPGNQFNDADSSDVRLTLSSKDGLSVTLCVHRHILVAHSRFFAAKLSDRWSKQQRTLPHIVEISDCDDVEVYAETLRLMYCKDLRRRLMREDVNKVLGILKVSAAIVFDAGVLSCLEYLEAAPWAEDDDEKVATLLTQLHLENSGAGEVLKRVSLELAPSSLVEEADEGGSCNGGNSSGGEEVLLRLLQVVLEGKDEKARREMKGLVSKMLRENSTSRGGAIGGDLRKESLYSACNGCLSLLCEQFVRASEGDHSEVARIARQADNLHWMLDILVERQIAEDFLRTWATQTELAAMHRKVPAIHRYEVSRVTARLFVGVGKGQILVSKEARCQLLSTWLEPFYEDF

SEQ ID NO: 17831 - protein, 416 aa, Zea mays subsp. mays
  peptide (1)..(416): Ceres Seq. ID no. 12387577
MSPPPLPLDKTRSSPTLFDMMANEQDYHPRTAAGIHSIPAPPQPHQLPPARSMDRQMLLQDRIADLIGSCSPGNQFNDADSSDVRLTLSSKDGLSVTLCVHRHILVAHSRFFAAKLSDRWSKQQRTLPHIVEISDCDDVEVYAETLRLMYCKDLRRRLMREDVNKVLGILKVSAAIVFDAGVLSCLEYLEAAPWAEDDDEKVATLLTQLHLENSGAGEVLKRVSLELAPSSLVEEADEGGSCNGGNSSGGEEVLLRLLQVVLEGKDEKARREMKGLVSKMLRENSTSRGGAIGGDLRKESLYSACNGCLSLLCEQFVRASEGDHSEVARIARQADNLHWMLDILVERQIAEDFLRTWATQTELAAMHRKVPAIHRYEVSRVTARLFVGVGKGQILVSKEARCQLLSTWLEPFYEDF

SEQ ID NO: 17832 - protein, 397 aa, Zea mays subsp. mays
  peptide (1)..(397): Ceres Seq. ID no. 12387578
MMANEQDYHPRTAAGIHSIPAPPQPHQLPPARSMDRQMLLQDRIADLIGSCSPGNQFNDADSSDVRLTLSSKDGLSVTLCVHRHILVAHSRFFAAKLSDRWSKQQRTLPHIVEISDCDDVEVYAETLRLMYCKDLRRRLMREDVNKVLGILKVSAAIVFDAGVLSCLEYLEAAPWAEDDDEKVATLLTQLHLENSGAGEVLKRVSLELAPSSLVEEADEGGSCNGGNSSGGEEVLLRLLQVVLEGKDEKARREMKGLVSKMLRENSTSRGGAIGGDLRKESLYSACNGCLSLLCEQFVRASEGDHSEVARIARQADNLHWMLDILVERQIAEDFLRTWATQTELAAMHRKVPAIHRYEVSRVTARLFVGVGKGQILVSKEARCQLLSTWLEPFYEDF

SEQ ID NO: 17833 - DNA, 1446 bp, Zea mays subsp. mays
  misc_feature (1)..(1446): Ceres Seq. ID no. 12415235
  misc_feature (1)..(1446): Ortholog of  Ceres SEQ ID NO 15227018 as cited in SEQ ID NO 0
gcacgagaccattacctagaacatcctaatccaaaaatatcaatcatccagaaggtcaaactctcccctgtttcgacttggttccctgctcctgccctgaaaggagttgtcttggttccctgcccctgccctgaaagcagcagttggagagtcgaatcgtccttcttctctccggcgggaggaggcgggcggtgggcggtgggcggcggcaggaccgtgatgacgagcagcagcaacaacggcggccggccagacgacggcggcgaggtggtcctggaccacgagtaccaagaggagtacgtgaggaactcgcgggggatgagcctcttcgcatgcagatggctgccggcagttgcaggcaagagggggagggctccagctccaaaggcgctcgtcttcctctgccacggctacgccgtggagtgcagcgtgacgatgcgcggcaccggcgagcgcctggcgcgtgccggctacgccgtctacggcctggactacgagggccacggccgctccgacgggctgcagggctacntgccggatttcgacgcgctggtgctggactgcgacgagtacttcacctcggtggtggcggcggcggcgcagtcgcagtccaaggacgcccaccaacttccccggttcctgctcggggagtccatgggcggcgccgtggctctcctcctccaccgccggcgccccgagtactggagcggcgccgtgctggtggcgcccatgtgcaagatcgccgacgacatgcggcctcacccgctggtggtcaacatcctcagggccatgaccaccatcatcccgacgtggaagatcgtgcccagcaacgacgtcatcgacgcggcgtacaggagccaggagaagagggacgagatccgcagcaacccttactgctacaaggacaagccgcgactcaagaccgcctacgagctgctcaaagtcagcttggacctcgagcacaacctcctccaccaggtgtcgttgccgttcctgatcgtgcacggcggggcagacaaggtgacggacccgtcggtgagcgagctgctgtaccaatcggcggcgagccaggacaagacgctcaagttctatccgggcatgtggcacgccctcacctccggcgagtcgcccgacaacatccaagccgttttccaagacatcatcgcctggctcgaccacaggtcacccgacacggaacaggaggagctggtgtcgtcggaggtggagcagaaggccaagcacgacgaccagcgccaccaggagcagctccaggacggcaacaaatagctagctgcttgcttgcctgctgctttcttctctttacagaacgaaccgtttcatttggtcatgcatggatacacatcatgtctcagtgatacgtaccgactaaattaaattattagatcgaccgcgcttacctagaaattaaacaatcagctgttcgac

SEQ ID NO: 17834 - protein, 428 aa, Zea mays subsp. mays
  peptide (1)..(428): Ceres Seq. ID no. 12415236
  misc_feature (178)..(178): Xaa is any aa, unknown or other
ARDHYLEHPNPKISIIQKVKLSPVSTWFPAPALKGVVLVPCPCPESSSWRVESSFFSPAGGGGRWAVGGGRTVMTSSSNNGGRPDDGGEVVLDHEYQEEYVRNSRGMSLFACRWLPAVAGKRGRAPAPKALVFLCHGYAVECSVTMRGTGERLARAGYAVYGLDYEGHGRSDGLQGYXPDFDALVLDCDEYFTSVVAAAAQSQSKDAHQLPRFLLGESMGGAVALLLHRRRPEYWSGAVLVAPMCKIADDMRPHPLVVNILRAMTTIIPTWKIVPSNDVIDAAYRSQEKRDEIRSNPYCYKDKPRLKTAYELLKVSLDLEHNLLHQVSLPFLIVHGGADKVTDPSVSELLYQSAASQDKTLKFYPGMWHALTSGESPDNIQAVFQDIIAWLDHRSPDTEQEELVSSEVEQKAKHDDQRHQEQLQDGNK

SEQ ID NO: 17835 - protein, 355 aa, Zea mays subsp. mays
  peptide (1)..(355): Ceres Seq. ID no. 12415237
  misc_feature (105)..(105): Xaa is any aa, unknown or other
MTSSSNNGGRPDDGGEVVLDHEYQEEYVRNSRGMSLFACRWLPAVAGKRGRAPAPKALVFLCHGYAVECSVTMRGTGERLARAGYAVYGLDYEGHGRSDGLQGYXPDFDALVLDCDEYFTSVVAAAAQSQSKDAHQLPRFLLGESMGGAVALLLHRRRPEYWSGAVLVAPMCKIADDMRPHPLVVNILRAMTTIIPTWKIVPSNDVIDAAYRSQEKRDEIRSNPYCYKDKPRLKTAYELLKVSLDLEHNLLHQVSLPFLIVHGGADKVTDPSVSELLYQSAASQDKTLKFYPGMWHALTSGESPDNIQAVFQDIIAWLDHRSPDTEQEELVSSEVEQKAKHDDQRHQEQLQDGNK

SEQ ID NO: 17836 - protein, 347 aa, Zea mays subsp. mays
  peptide (1)..(347): Ceres Seq. ID no. 12415238
  misc_feature (67)..(67): Xaa is any aa, unknown or other
MQMAAGSCRQEGEGSSSKGARLPLPRLRRGVQRDDARHRRAPGACRLRRLRPGLRGPRPLRRAAGLXAGFRRAGAGLRRVLHLGGGGGGAVAVQGRPPTSPVPARGVHGRRRGSPPPPPAPRVLERRRAGGAHVQDRRRHAASPAGGQHPQGHDHHHPDVEDRAQQRRHRRGVQEPGEEGRDPQQPLLLQGQAATQDRLRAAQSQLGPRAQPPPPGVVAVPDRARRGRQGDGPVGERAAVPIGGEPGQDAQVLSGHVARPHLRRVARQHPSRFPRHHRLARPQVTRHGTGGAGVVGGGAEGQARRPAPPGAAPGRQQIASCLLACCFLLFTERTVSFGHAWIHIMSQ

SEQ ID NO: 17837 - DNA, 447 bp, Zea mays subsp. mays
  misc_feature (1)..(447): Ceres Seq. ID no. 2120225
  misc_feature (1)..(447): Ortholog of  Ceres SEQ ID NO 13654451 as cited in SEQ ID NO 67881
cccctctgtcccagaacgcgccccagcctcccacctagaactccgcgcccagcgctttccgtaaccaccacaaccrcagcggraacagtgacaggttgaggagacggccgccatgggagaggaaaagaagacgggcaagggcggcggcggcggcggcggcgacnagaagaaggacgccggcgctggggccgcgccgcagcccatcgtgttgaaggtcgacttgcattgcgccggctgcgccaacaaggtccgcaaggccatcaagcgcgcaccaggcgtggagtcggtgacgccggacatggcggcgggcaaggtggtcgtgaccggtccggcggacgcggtgcagctcaaggagcgcatcgaggctagggccaagaagcccgtgcagatcgtctccgccggcgccggttcgccaagaaggacaaggagaagwawgctgacggcggc

SEQ ID NO: 17838 - protein, 111 aa, Zea mays subsp. mays
  peptide (1)..(111): Ceres Seq. ID no. 2120226
  misc_feature (18)..(18): Xaa is any aa, unknown or other
  misc_feature (107)..(107): Xaa is any aa, unknown or other
  misc_feature (108)..(108): Xaa is any aa, unknown or other
MGEEKKTGKGGGGGGGDXKKDAGAGAAPQPIVLKVDLHCAGCANKVRKAIKRAPGVESVTPDMAAGKVVVTGPADAVQLKERIEARAKKPVQIVSAGAGSPRRTRRXXLTA

SEQ ID NO: 17839 - DNA, 1026 bp, Zea mays subsp. mays
  misc_feature (1)..(1026): Ceres Seq. ID no. 12355072
  misc_feature (1)..(1026): Ortholog of  Ceres SEQ ID NO 13503610 as cited in SEQ ID NO 62416
  misc_feature (1)..(1026): Ortholog of  Ceres SEQ ID NO 13657610 as cited in SEQ ID NO 66165
  misc_feature (1)..(1026): Ortholog of  Ceres SEQ ID NO 13598312 as cited in SEQ ID NO 68448
  misc_feature (1)..(1026): Ortholog of  Ceres SEQ ID NO 13596100 as cited in SEQ ID NO 68573
atcgcccacacgtcgaagcaggtgattggcgatccctgtccgtcctcgctcgctagctgatcgacatggccgacgacgacccaagaacgacggcggcgagcagcatgccggacttcaagcagtcggtgaagctcaagtacgtgaagctggggtaccaccacctgatcagccacggcgcgtacctgctgctggccccgctgccggggctcgtggcggcgcacctctccaccttcacggcgcgggacctggcggagctgtggcagagcctgcagtacaacctggcgtccgtgctcgtcgcgaccacggcgctggtcacggccaccgcgtacgcgctgacgcggccgcggcccgtgtacctggtggacttcgcgtgctaccggccccgcgacgagcgcaggtgcagccgcgcgcggttcatgaactgcaccgagtcgctcggcaccttcacgccggagaacgtggagttccagcgccggatcatcgagcggtcggggctgggcgaggacacgtacctcccggaggcggtgctcaacatcccgcccaacccatccatggccagcgcacgggaggaggccgagatggtcatgttcggcgcgctggacgagctgttcgccaagaccggggtgcggcccaaggagatcggcgtgctggtggtgaactgcagcctcttcaacccgacgccgtcgctgtccgccatggtcgtcaaccactacaggctccggggcaacgtcgcgagctacaacctcggcggcatgggctgcagcgcggggatcatcgccgtggacctcgccagggacctgctgcagtgccaccggggcacctacgccgtggtggtcagcacggagaacatcaccctcaactggtacctgggcaacgaccgctccatgctggtgtccaactgcctgttccgcatgggcggcgcggcgctcctgctgtcgaaccgcggctcggcgcggcgccggtccaagtaccagctggtgcacacggtgcgcacgcacagggccgccgacgaccgctgcttcggct

SEQ ID NO: 17840 - protein, 320 aa, Zea mays subsp. mays
  peptide (1)..(320): Ceres Seq. ID no. 12355073
MADDDPRTTAASSMPDFKQSVKLKYVKLGYHHLISHGAYLLLAPLPGLVAAHLSTFTARDLAELWQSLQYNLASVLVATTALVTATAYALTRPRPVYLVDFACYRPRDERRCSRARFMNCTESLGTFTPENVEFQRRIIERSGLGEDTYLPEAVLNIPPNPSMASAREEAEMVMFGALDELFAKTGVRPKEIGVLVVNCSLFNPTPSLSAMVVNHYRLRGNVASYNLGGMGCSAGIIAVDLARDLLQCHRGTYAVVVSTENITLNWYLGNDRSMLVSNCLFRMGGAALLLSNRGSARRRSKYQLVHTVRTHRAADDRCFG

SEQ ID NO: 17841 - protein, 307 aa, Zea mays subsp. mays
  peptide (1)..(307): Ceres Seq. ID no. 12355074
MPDFKQSVKLKYVKLGYHHLISHGAYLLLAPLPGLVAAHLSTFTARDLAELWQSLQYNLASVLVATTALVTATAYALTRPRPVYLVDFACYRPRDERRCSRARFMNCTESLGTFTPENVEFQRRIIERSGLGEDTYLPEAVLNIPPNPSMASAREEAEMVMFGALDELFAKTGVRPKEIGVLVVNCSLFNPTPSLSAMVVNHYRLRGNVASYNLGGMGCSAGIIAVDLARDLLQCHRGTYAVVVSTENITLNWYLGNDRSMLVSNCLFRMGGAALLLSNRGSARRRSKYQLVHTVRTHRAADDRCFG

SEQ ID NO: 17842 - protein, 203 aa, Zea mays subsp. mays
  peptide (1)..(203): Ceres Seq. ID no. 12355075
MNCTESLGTFTPENVEFQRRIIERSGLGEDTYLPEAVLNIPPNPSMASAREEAEMVMFGALDELFAKTGVRPKEIGVLVVNCSLFNPTPSLSAMVVNHYRLRGNVASYNLGGMGCSAGIIAVDLARDLLQCHRGTYAVVVSTENITLNWYLGNDRSMLVSNCLFRMGGAALLLSNRGSARRRSKYQLVHTVRTHRAADDRCFG

SEQ ID NO: 17843 - DNA, 897 bp, Zea mays subsp. mays
  misc_feature (1)..(897): Ceres Seq. ID no. 12359231
  misc_feature (1)..(897): Ortholog of  Ceres SEQ ID NO 15173284 as cited in SEQ ID NO 61828
  misc_feature (1)..(897): Ortholog of  Ceres SEQ ID NO 15178906 as cited in SEQ ID NO 0
ataaacccaaacctcctcgtcctctgtcagactaccactctctccctcgcggactcgcggttgattcctcgcggcggattcgcatcttccgcgtcagggacagggagagtactccgtcggacggttggaggagaacagggagaggagctctgagatggagacggccgcctcggcagcgcgcctggtgaactacccgctcgtcgcggcgcttctcgcgttcgccgtcgcgcagtcctccaagttcttcaccacctggttcaaagatggccggtgggatgccagacagtttatagcttctggagggatgccatcatcccactcagctacagtgacagcactcgcagtggctgtggcgatacaagaaggctttcatagtgcaacctttgcaactgcactagtctttgcatgcgtggttatgcatgatgcttttggagttcggttacatgccggaaagcaggcagaggtgctgaatcaaattgtctatgagctaccagaagaacacccattatcagagacaaagccattgcgtgaaatccttggacatactgttcctcaggttgtggccggttgcatccttggagttctcatggctgccgttatgcacctgtctctcgggagttcttagtcaactgttgttcatggatgtcatgacagatgatcacctaatgtctcgctggtgatggctataaagcatgaagcatgatctccgcatggatctggttgtccaagtgtttggtagtacgaagttctaaccgatttagttctggacagtaggatataggttgtgtagcttgaatcggttactgtaaatctgaaaggttttgctttcaactccaactaccaatcacggtgtaatggaagctttgttatacaatcaacagcagtaaattcattctg

SEQ ID NO: 17844 - protein, 156 aa, Zea mays subsp. mays
  peptide (1)..(156): Ceres Seq. ID no. 12359232
METAASAARLVNYPLVAALLAFAVAQSSKFFTTWFKDGRWDARQFIASGGMPSSHSATVTALAVAVAIQEGFHSATFATALVFACVVMHDAFGVRLHAGKQAEVLNQIVYELPEEHPLSETKPLREILGHTVPQVVAGCILGVLMAAVMHLSLGSS

SEQ ID NO: 17845 - protein, 106 aa, Zea mays subsp. mays
  peptide (1)..(106): Ceres Seq. ID no. 12359233
MPSSHSATVTALAVAVAIQEGFHSATFATALVFACVVMHDAFGVRLHAGKQAEVLNQIVYELPEEHPLSETKPLREILGHTVPQVVAGCILGVLMAAVMHLSLGSS

SEQ ID NO: 17846 - DNA, 1688 bp, Zea mays subsp. mays
  misc_feature (1)..(1688): Ceres Seq. ID no. 12415179
  misc_feature (1)..(1688): Ortholog of  Ceres SEQ ID NO 14311001 as cited in SEQ ID NO 53717
  misc_feature (1)..(1688): Ortholog of  Ceres SEQ ID NO 14314945 as cited in SEQ ID NO 58031
  misc_feature (1)..(1688): Ortholog of  Ceres SEQ ID NO 13595833 as cited in SEQ ID NO 59877
  misc_feature (1)..(1688): Ortholog of  Ceres SEQ ID NO 13654452 as cited in SEQ ID NO 65792
  misc_feature (1)..(1688): Ortholog of  Ceres SEQ ID NO 13573778 as cited in SEQ ID NO 0
cccgcaccgcatcccattccgtgccaccgccgccgcgctgcgtctgcgtgcgtcgcccgcccgcccgcccgcagtgtccgcagccagagccagcgcacgcgctgctccgccgacgccgaagcctcgtccgcgagcgcgtggctaagcaagcactcgagtcgagctccctccagcggcgggcgcagtgcagccaggccgcgcgcgccgcagcatgaacggcgtcggcgacgcgcacgcggccgtggccgcggccgccatggtgcagcagacgctggggatgtcgctgccgatggcggcgttcgtgcccgagcattgcagcgccaataagctggccaggccgccggggctgccgccgctgccgcaggcgttcgtggcccagcagcgcggggacgtgtgcatggaggccgccgaccccgccgctggcccgcgcaaggcgcaccggcgctcccgcagcgacgtcccgttcggctacttcccgccggcgggccaccaccagctcccgccgcccaaggtggaggccggctggggcggccacctccccgccggcggcggcgacgacgacctgttcaacgcgtacctcaacctggaggggctggacgggctcaactcctccgacgaccgcctggacgacggggacagccgcggcagcagcatgaggaccaacggcgccgacagcagcgagaacgagtcggaggagtgcgccgccgacagccgcgccgggatccgcctctgcgccgccgctgccgacaggcgggaggggctcaagagggccgccgctgcgcccgtgccgcgccacgccaggagcctgtccatggacagcctcatcggcaagctcaacttctccgccggcgcgacgggcgccgccagcggcgtcattccggggcccaacaggttcagcctcgagttcggcagtgccgagttttcgccggtcgagatgaagaagatcatggccgacgagaagctggccgagatggcgctcgccgaccccaagcgcgtcaagagggtgctggccaacaggcagtcggcggcgcggtccaaggagcgcaagatgcgatacattggcgagctggagcacaaggtgcagatcctgcagacggaggccaccactctctccgcccagctcacgcttcttcagcgggactccgcggggatcgcgacgcagaacaacgagctcaagttccggctgcaggccatggagcagcaggcgcagctgcgtgacgcattgaatgaggcactgacagccgaggtccaacgcctgaagctcgcgaccgcagagctcggggattcttgctcgtccagcaacctagctcagcagatccaaatcagcgttcaggaccagatgtttcaactgcatcagcagcaggcaacgcctataccgttctaccagctgcagcaggcgcagcagaatggcgcagggaagaagcatgagccgacggaatgatctcagagctgccattatccaccgctgcgtgagcagggggaaaaaaggatcggtttcgatggactgaaagcatttcttttcctaactcattggttttaagtgtcgttaataagcaccgtgcatttttttttccaggtgatgaacctgctgcttgtacctgtttatttattctttggatgattcagttgcttgagttgccaaactgatcaaattgtagccggttaatattcttttatagttgtagtgc

SEQ ID NO: 17847 - protein, 409 aa, Zea mays subsp. mays
  peptide (1)..(409): Ceres Seq. ID no. 12415180
MNGVGDAHAAVAAAAMVQQTLGMSLPMAAFVPEHCSANKLARPPGLPPLPQAFVAQQRGDVCMEAADPAAGPRKAHRRSRSDVPFGYFPPAGHHQLPPPKVEAGWGGHLPAGGGDDDLFNAYLNLEGLDGLNSSDDRLDDGDSRGSSMRTNGADSSENESEECAADSRAGIRLCAAAADRREGLKRAAAAPVPRHARSLSMDSLIGKLNFSAGATGAASGVIPGPNRFSLEFGSAEFSPVEMKKIMADEKLAEMALADPKRVKRVLANRQSAARSKERKMRYIGELEHKVQILQTEATTLSAQLTLLQRDSAGIATQNNELKFRLQAMEQQAQLRDALNEALTAEVQRLKLATAELGDSCSSSNLAQQIQISVQDQMFQLHQQQATPIPFYQLQQAQQNGAGKKHEPTE

SEQ ID NO: 17848 - protein, 394 aa, Zea mays subsp. mays
  peptide (1)..(394): Ceres Seq. ID no. 12415181
MVQQTLGMSLPMAAFVPEHCSANKLARPPGLPPLPQAFVAQQRGDVCMEAADPAAGPRKAHRRSRSDVPFGYFPPAGHHQLPPPKVEAGWGGHLPAGGGDDDLFNAYLNLEGLDGLNSSDDRLDDGDSRGSSMRTNGADSSENESEECAADSRAGIRLCAAAADRREGLKRAAAAPVPRHARSLSMDSLIGKLNFSAGATGAASGVIPGPNRFSLEFGSAEFSPVEMKKIMADEKLAEMALADPKRVKRVLANRQSAARSKERKMRYIGELEHKVQILQTEATTLSAQLTLLQRDSAGIATQNNELKFRLQAMEQQAQLRDALNEALTAEVQRLKLATAELGDSCSSSNLAQQIQISVQDQMFQLHQQQATPIPFYQLQQAQQNGAGKKHEPTE

SEQ ID NO: 17849 - protein, 387 aa, Zea mays subsp. mays
  peptide (1)..(387): Ceres Seq. ID no. 12415182
MSLPMAAFVPEHCSANKLARPPGLPPLPQAFVAQQRGDVCMEAADPAAGPRKAHRRSRSDVPFGYFPPAGHHQLPPPKVEAGWGGHLPAGGGDDDLFNAYLNLEGLDGLNSSDDRLDDGDSRGSSMRTNGADSSENESEECAADSRAGIRLCAAAADRREGLKRAAAAPVPRHARSLSMDSLIGKLNFSAGATGAASGVIPGPNRFSLEFGSAEFSPVEMKKIMADEKLAEMALADPKRVKRVLANRQSAARSKERKMRYIGELEHKVQILQTEATTLSAQLTLLQRDSAGIATQNNELKFRLQAMEQQAQLRDALNEALTAEVQRLKLATAELGDSCSSSNLAQQIQISVQDQMFQLHQQQATPIPFYQLQQAQQNGAGKKHEPTE

SEQ ID NO: 17850 - DNA, 1570 bp, Zea mays subsp. mays
  misc_feature (1)..(1570): Ceres Seq. ID no. 12363375
  misc_feature (1)..(1570): Ortholog of  Ceres SEQ ID NO 14303487 as cited in SEQ ID NO 54521
  misc_feature (1)..(1570): Ortholog of  Ceres SEQ ID NO 14316302 as cited in SEQ ID NO 55232
  misc_feature (1)..(1570): Ortholog of  Ceres SEQ ID NO 14308274 as cited in SEQ ID NO 55597
  misc_feature (1)..(1570): Ortholog of  Ceres SEQ ID NO 13659710 as cited in SEQ ID NO 60808
gcacgagaccattacctagaacatcctaatcaaaaatatataaaataatgtcctactcctaccccgccaccacgccgcggcagcacaagcccctctccgcccccagccagccctcctcagatctcaatcccggcgctccctccctccctcctcgcctcgggacagcgagcgccgccgtccgccgtccatggagcacgacgccgaggcgcgccgcgggttcgccaggatgggcttcgggtgcaagcactaccggaggcggtgccggatccgcgcgccctgctgcggcgacgtcttccactgccgccattgccacaacgagtccacgaaagacgggcacgagctggatcggcacgacgtccaatcggttatctgcctcgtctgtgacaccgagcagccgatcgcgcaggtgtgctgcaactgcggcgtctgcatgggggagtacttctgcgcagcctgcaacttcttggacgatgacgttgacaaggagcagttccattgcgacgattgcggcatctgcaggtgcgtgcgtgcgtgtgtctgtccctcttttttttgtttcttgttttcttttcttccttccattgcggtcactgagttacaggatctgagtcgccgcgcacaaatcgcgattttagtaggaaccccccccctctgattaactaactaagctactactacctattgatgatgatccaacaaagctgacagaaactgtggtgcatttgcatttgttcgaacagagtaggaggaaaggagaacttcttccactgccaaaagtgtggtaaaaaaataaacaaatccatcaccagccatattcaccacccgaggatgttctggtttcccatcaccagccatacatcatcctgttgttttttttctttacacacgcaggatcctgctactcgacgacccttcgcgacaggcactgctgcatcgagaactcgatgaagaacaactgccccatctgctacgaggcagtacctgttcgattcgctgagggagacgtcggtgctccgctgcggccacaccatgcacctggagtgcttccacgagatgttgaagcacgacaagttctcgtgccccatatgcgccacgcccatcttcgacatggacaagttcttcaaggccctcgacgcagagatggaggcaagctacttgtacacgggaaagggatgggtcgtgtgcaacgactgcagggacacgacgcaggtcttctccggcgtggcgggccacaagtgctgccactgccagtcccacaacacctgccgggtggcaccccccgtccttccgtagccaccaccaacaccacatcattgttgttggaattggatgcagccagccaagatacccccccagcagctacgctattattaccagtagcgcctgcgcttttacacaccgctccgttccagtccatgatgaactgcataatttcgtgccatgcaggtatgtacgtacactgtttggagatcggaagatttatccgactcgggacgtattatttgtaccacaacaaaacacgtgttactattgtaataccagatccggatatatacgaaactatttttag

SEQ ID NO: 17851 - protein, 208 aa, Zea mays subsp. mays
  peptide (1)..(208): Ceres Seq. ID no. 12363376
MKNNCPICYEAVPVRFAEGDVGAPLRPHHAPGVLPRDVEARQVLVPHMRHAHLRHGQVLQGPRRRDGGKLLVHGKGMGRVQRLQGHDAGLLRRGGPQVLPLPVPQHLPGGTPRPSVATTNTTSLLLELDAASQDTPPAATLLLPVAPALLHTAPFQSMMNCIISCHAGMYVHCLEIGRFIRLGTYYLYHNKTRVTIVIPDPDIYETIF

SEQ ID NO: 17852 - protein, 186 aa, Zea mays subsp. mays
  peptide (1)..(186): Ceres Seq. ID no. 12363377
MSYSYPATTPRQHKPLSAPSQPSSDLNPGAPSLPPRLGTASAAVRRPWSTTPRRAAGSPGWASGASTTGGGAGSARPAAATSSTAAIATTSPRKTGTSWIGTTSNRLSASSVTPSSRSRRCAATAASAWGSTSAQPATSWTMTLTRSSSIATIAASAGACVRVSVPLFFVSCFLFFLPLRSLSYRI

SEQ ID NO: 17853 - protein, 161 aa, Zea mays subsp. mays
  peptide (1)..(161): Ceres Seq. ID no. 12363378
MRHAHLRHGQVLQGPRRRDGGKLLVHGKGMGRVQRLQGHDAGLLRRGGPQVLPLPVPQHLPGGTPRPSVATTNTTSLLLELDAASQDTPPAATLLLPVAPALLHTAPFQSMMNCIISCHAGMYVHCLEIGRFIRLGTYYLYHNKTRVTIVIPDPDIYETIF

SEQ ID NO: 17854 - protein, 155 aa, Zea mays subsp. mays
  peptide (1)..(155): Ceres Seq. ID no. 12363379
MEHDAEARRGFARMGFGCKHYRRRCRIRAPCCGDVFHCRHCHNESTKDGHELDRHDVQSVICLVCDTEQPIAQVCCNCGVCMGEYFCAACNFLDDDVDKEQFHCDDCGICRCVRACVCPSFFCFLFSFLPSIAVTELQDLSRRAQIAILVGTPPL

SEQ ID NO: 17855 - DNA, 1396 bp, Zea mays subsp. mays
  misc_feature (1)..(1396): Ceres Seq. ID no. 12369569
  misc_feature (1)..(1396): Ortholog of  Ceres SEQ ID NO 13595351 as cited in SEQ ID NO 55934
gcacgagaccattacctagaacatcctaatcgaaaagagttggaggagtcccctctctctctctatacctttcttgcccaagcagtcaatcaagctgggaaacttaaacagaaagcgaagaaattaaaggccaccaccgccttcacttgttccttttggttattttcctcttgctgtggcttaacttgacaagaagaagaggaagaagatgctacgtcggcaaggccgaggtggaaaatttctggaggaggtgctcatcgtcggcgggctcctgctggtgcagtgcgtgctctccggctacgtggtcttcaccgaccacctgctcgccctcggcgccgacccgctggccgtcgtcgtcgtcgccggagccgcctacgccgccttctgctttcccttcgccttcgccctcgagaggaagcgatggccttccacggtttcggggactctggtggcgcaatacctgctcattgctcttggagggacaatcgcgttccaagcgctgatgctgctggggatcaagaagaccacgccggccatcgcatccgccatgcccaacctcagccccggcctcatcttcatcgtcgcagcctgtttcaggctggagaggttcgacagggcgtgcaagtacacgcaggcgaagatggcggggacggtggtgtgcctggcgggagcgctggccatgggcttcctgcacagcccaacttctacgtcctcctctctgcaggcagcagcaggaggtggcgactactactacgactggatcctcggctgctgctgcctcgtcgccgccgtcaccgtcttcgcgctcgtcaccgtcctgcaggccgccacgctcgccgccttccccgcgccgctcaccatgtgctgcgccacctccgcgacgggcgccgctctcaccgccgtcctgcggctcgtcctggaagggaggttcctcggcatggggtcgcccaggatcgacgccacgctcgtcgcggggatcgtcgtcctcggcggggccgcggtgggcgcgtgcatggcgttccaggcgtggtgcctgggcaggaagggcccgctgttcgtctccgtcttcgggcccgtccagaccgtctgcaccgccatcctctccgcggctctcctccgccaagtcctcagcctgggaagcctcgcagggatcgtgctcatgttcactgggctctacattgtcctatggggccaagagcaacgagatctcggctgacgacgaggaacagtcgttgcagggtggcgacgacgccgagaaggcactcctagcctagcctagcaaaatccagagcgaatatcactgcacgctctgtatttgtaaaaatggaatggtgtctacgtacctgtatacatactcgagaggatttagagaaaaaggacatggctacgtttgttc

SEQ ID NO: 17856 - protein, 335 aa, Zea mays subsp. mays
  peptide (1)..(335): Ceres Seq. ID no. 12369570
MLRRQGRGGKFLEEVLIVGGLLLVQCVLSGYVVFTDHLLALGADPLAVVVVAGAAYAAFCFPFAFALERKRWPSTVSGTLVAQYLLIALGGTIAFQALMLLGIKKTTPAIASAMPNLSPGLIFIVAACFRLERFDRACKYTQAKMAGTVVCLAGALAMGFLHSPTSTSSSLQAAAGGGDYYYDWILGCCCLVAAVTVFALVTVLQAATLAAFPAPLTMCCATSATGAALTAVLRLVLEGRFLGMGSPRIDATLVAGIVVLGGAAVGACMAFQAWCLGRKGPLFVSVFGPVQTVCTAILSAALLRQVLSLGSLAGIVLMFTGLYIVLWGQEQRDLG

SEQ ID NO: 17857 - protein, 282 aa, Zea mays subsp. mays
  peptide (1)..(282): Ceres Seq. ID no. 12369571
MAFHGFGDSGGAIPAHCSWRDNRVPSADAAGDQEDHAGHRIRHAQPQPRPHLHRRSLFQAGEVRQGVQVHAGEDGGDGGVPGGSAGHGLPAQPNFYVLLSAGSSRRWRLLLRLDPRLLLPRRRRHRLRARHRPAGRHARRLPRAAHHVLRHLRDGRRSHRRPAARPGREVPRHGVAQDRRHARRGDRRPRRGRGGRVHGVPGVVPGQEGPAVRLRLRARPDRLHRHPLRGSPPPSPQPGKPRRDRAHVHWALHCPMGPRATRSRLTTRNSRCRVATTPRRHS

SEQ ID NO: 17858 - protein, 237 aa, Zea mays subsp. mays
  peptide (1)..(237): Ceres Seq. ID no. 12369572
MLLGIKKTTPAIASAMPNLSPGLIFIVAACFRLERFDRACKYTQAKMAGTVVCLAGALAMGFLHSPTSTSSSLQAAAGGGDYYYDWILGCCCLVAAVTVFALVTVLQAATLAAFPAPLTMCCATSATGAALTAVLRLVLEGRFLGMGSPRIDATLVAGIVVLGGAAVGACMAFQAWCLGRKGPLFVSVFGPVQTVCTAILSAALLRQVLSLGSLAGIVLMFTGLYIVLWGQEQRDLG

SEQ ID NO: 17859 - DNA, 1633 bp, Zea mays subsp. mays
  misc_feature (1)..(1633): Ceres Seq. ID no. 12363380
  misc_feature (1)..(1633): Ortholog of  Ceres SEQ ID NO 14311001 as cited in SEQ ID NO 53717
  misc_feature (1)..(1633): Ortholog of  Ceres SEQ ID NO 14314945 as cited in SEQ ID NO 58031
  misc_feature (1)..(1633): Ortholog of  Ceres SEQ ID NO 13595833 as cited in SEQ ID NO 59877
  misc_feature (1)..(1633): Ortholog of  Ceres SEQ ID NO 13654452 as cited in SEQ ID NO 65792
  misc_feature (1)..(1633): Ortholog of  Ceres SEQ ID NO 13573778 as cited in SEQ ID NO 0
gcacgagaccattacctagaacatcctaatcgaaaaaatatagaaccctgttcccaccggcgctcactgcaccttccccagcggccaccacccgaggccggtccccgctgacccgcctccgtggaccggggacacgcggcggcgaccggcgaggcggtccctgcttcctctttctactcctcacaagtatgtatgacacgcaccacccgcaccgcacccacccaccaacccgaccttccgctgctctcacacacacacacacactctacacgcgagcgagaccacgcgccggaccgccgcaagccggtcgccgccgccgcgacctggagcttgcgagctagctctggcctcgctgcctgcgccgactgagatggacccgcggtttccgctgccggccgcggcggcgccgtccacgggcggcggcggcggcgccagagggcaccaccggcgggcccactcggagacgttcctcagcttccacgacgcggacctgctcctcgacccggacggcgacttcttctccgacctcgacttcccctccctctccgacgactctccggccgccttcgaccccaccccgccgccgcatccgcagcagcagccgccgcaggcttccccggccccacgtccgcccggcgggacccacacgcggagcctctccctcgacgccgccttcttcgagggcctcgcgtttcagggacccagtgggagcgccgggggtggaggtgggcccggccacaagaggagcggctcgatggatggggacacctcgccgttcgagggcgagtcggcgctctccagcggcctgccggactacgccaagaaggccatgcccgccgagaggatcgccgagctcgcgctcatcgaccccaagcgcgcaaagaggattctggcgaacaggcagtcggcagcgaggtcaaaggagaggaagatcatgtacactagtgaactggagaagaaggtccagactctgcaaacggaggccactacgctgtcagcacagctgaccctgctccagagggatacaactggtttaactgccgaaaacagagagctcaagcttcggttgcagtccatggaagagcaagctaaactgcgggacgctttgaatgaagccctgcgagaagaagtccagcgacttaagatagccgcaggacaagtcgggaacatgaatgggaaccccttcaatggtggactccagcagcagattccatcctatttcgtgcagcagcagcagatgccgtacttcggtggccaccaggctcagcatcacagtcaaaatcaaaaccatcgtcaccagatctcatcaaatgtggggcagacgctcagtggtcagtccctaaacgactccatggatttcatgtgaggagtacaatatcagggccagtactacatcgtataccgactgcatttcagcactgtaaagatagctaaatgtacaatgtatgcatgtgcctcattggtagtgtgtagttagctcttctttgtatcattattctgaaaatggctcgtgtatgtcaaaatgatgtctcttttctttgctggtttctggagtaatgtgttagactgactagctacctttaacaatttattatgtaaatctttagctttttttaatggtggaaggttcttc

SEQ ID NO: 17860 - protein, 331 aa, Zea mays subsp. mays
  peptide (1)..(331): Ceres Seq. ID no. 12363381
MDPRFPLPAAAAPSTGGGGGARGHHRRAHSETFLSFHDADLLLDPDGDFFSDLDFPSLSDDSPAAFDPTPPPHPQQQPPQASPAPRPPGGTHTRSLSLDAAFFEGLAFQGPSGSAGGGGGPGHKRSGSMDGDTSPFEGESALSSGLPDYAKKAMPAERIAELALIDPKRAKRILANRQSAARSKERKIMYTSELEKKVQTLQTEATTLSAQLTLLQRDTTGLTAENRELKLRLQSMEEQAKLRDALNEALREEVQRLKIAAGQVGNMNGNPFNGGLQQQIPSYFVQQQQMPYFGGHQAQHHSQNQNHRHQISSNVGQTLSGQSLNDSMDFM

SEQ ID NO: 17861 - protein, 203 aa, Zea mays subsp. mays
  peptide (1)..(203): Ceres Seq. ID no. 12363382
MDGDTSPFEGESALSSGLPDYAKKAMPAERIAELALIDPKRAKRILANRQSAARSKERKIMYTSELEKKVQTLQTEATTLSAQLTLLQRDTTGLTAENRELKLRLQSMEEQAKLRDALNEALREEVQRLKIAAGQVGNMNGNPFNGGLQQQIPSYFVQQQQMPYFGGHQAQHHSQNQNHRHQISSNVGQTLSGQSLNDSMDFM

SEQ ID NO: 17862 - protein, 178 aa, Zea mays subsp. mays
  peptide (1)..(178): Ceres Seq. ID no. 12363383
MPAERIAELALIDPKRAKRILANRQSAARSKERKIMYTSELEKKVQTLQTEATTLSAQLTLLQRDTTGLTAENRELKLRLQSMEEQAKLRDALNEALREEVQRLKIAAGQVGNMNGNPFNGGLQQQIPSYFVQQQQMPYFGGHQAQHHSQNQNHRHQISSNVGQTLSGQSLNDSMDFM

SEQ ID NO: 17863 - DNA, 918 bp, Zea mays subsp. mays
  misc_feature (1)..(918): Ceres Seq. ID no. 12415286
  misc_feature (1)..(918): Ortholog of  Ceres SEQ ID NO 13594363 as cited in SEQ ID NO 60250
  misc_feature (1)..(918): Ortholog of  Ceres SEQ ID NO 15225478 as cited in SEQ ID NO 63805
  misc_feature (1)..(918): Ortholog of  Ceres SEQ ID NO 13596420 as cited in SEQ ID NO 68738
  misc_feature (1)..(918): Ortholog of  Ceres SEQ ID NO 14309260 as cited in SEQ ID NO 0
aactagtggatcccccgggctgcaggaattcgcacgagaccattacctagaacatcctaatcgaaaaagtgaggagccccaaatccacttcaacgatggaggaaagcctgtgcgccgtggagaagcgcgggcgggtgcacgtcatcagccctcaccggcgcgggggagcaccgcctcagcccggccctgctctccgccctccgctccgcggtcgcagccgcccgccgcgcctcccccggtgcgctcgtcctggccggcgagggcaagttcttcagcaacggctacgacctcgcgtgggcgcgcgcggggccggccccggcgccggagcaccgcctctccacgatgcgcgccgcgttccgcggcctcgtcgccgacctgctcgcgctccccgtgccaacggtcgcggccgtcacgggccacgcagcgggcgctggctgcgcgctcgcgctggcgcacgacgccgtcgccatgcgcgcctcccgcgggttcctctacattagcgaggtcgacgccgggatcaagatcgtcgattttgtcggcgagctggttcggcagaaggtccccgacgcggccgctaggagggacctggtgatgaagggggagaagatgacggccgcgcaggccgcgcgccgaggcatcgtggatgcggccgtggacggcggcgtggaggacgtcgtggccgcggcggtcgccatggctgaggagctcgctgccagagactgggacggagagaacctggccgccatcaggaaggacgcatggccggttttgtggagcaaggtcaaggactacggctgcgatgtgccggccaggccgcgtctgtaacggcctgcttgcgaatttcggtcgtttctgtgacttgccatttggtcgttatcaacaatctgaaagcaatgatccttggccttgggaatgtgc

SEQ ID NO: 17864 - protein, 196 aa, Zea mays subsp. mays
  peptide (1)..(196): Ceres Seq. ID no. 12415287
TSGSPGLQEFARDHYLEHPNRKSEEPQIHFNDGGKPVRRGEARAGARHQPSPARGSTASARPCSPPSAPRSQPPAAPPPVRSSWPARASSSATATTSRGRARGRPRRRSTASPRCAPRSAASSPTCSRSPCQRSRPSRATQRALAARSRWRTTPSPCAPPAGSSTLARSTPGSRSSILSASWFGRRSPTRPLGGTW

SEQ ID NO: 17865 - protein, 160 aa, Zea mays subsp. mays
  peptide (1)..(160): Ceres Seq. ID no. 12415288
MRAAFRGLVADLLALPVPTVAAVTGHAAGAGCALALAHDAVAMRASRGFLYISEVDAGIKIVDFVGELVRQKVPDAAARRDLVMKGEKMTAAQAARRGIVDAAVDGGVEDVVAAAVAMAEELAARDWDGENLAAIRKDAWPVLWSKVKDYGCDVPARPRL

SEQ ID NO: 17866 - protein, 134 aa, Zea mays subsp. mays
  peptide (1)..(134): Ceres Seq. ID no. 12415289
MEESLCAVEKRGRVHVISPHRRGGAPPQPGPALRPPLRGRSRPPRLPRCARPGRRGQVLQQRLRPRVGARGAGPGAGAPPLHDARRVPRPRRRPARAPRANGRGRHGPRSGRWLRARAGARRRRHARLPRVPLH

SEQ ID NO: 17867 - DNA, 1597 bp, Zea mays subsp. mays; identical to SEQ ID NO: 13576
  misc_feature (1)..(1597): Ceres Seq. ID no. 12411213
  misc_feature (1)..(1597): Ortholog of  Ceres SEQ ID NO 15177854 as cited in SEQ ID NO 51851
  misc_feature (1)..(1597): Ortholog of  Ceres SEQ ID NO 15177087 as cited in SEQ ID NO 51932
  misc_feature (1)..(1597): Ortholog of  Ceres SEQ ID NO 13662937 as cited in SEQ ID NO 64415
  misc_feature (1)..(1597): Ortholog of  Ceres SEQ ID NO 13595984 as cited in SEQ ID NO 68340
  misc_feature (1)..(1597): Ortholog of  Ceres SEQ ID NO 12635014 as cited in SEQ ID NO 0

SEQ ID NO: 17868 - protein, 460 aa, Zea mays subsp. mays; identical to SEQ ID NO: 13577
  peptide (1)..(460): Ceres Seq. ID no. 12411214

SEQ ID NO: 17869 - protein, 399 aa, Zea mays subsp. mays; identical to SEQ ID NO: 13578
  peptide (1)..(399): Ceres Seq. ID no. 12411215

SEQ ID NO: 17870 - protein, 373 aa, Zea mays subsp. mays; identical to SEQ ID NO: 13579
  peptide (1)..(373): Ceres Seq. ID no. 12411216

SEQ ID NO: 17871 - DNA, 718 bp, Zea mays subsp. mays
  misc_feature (1)..(718): Ceres Seq. ID no. 12549392
  misc_feature (1)..(718): Ortholog of  Ceres SEQ ID NO 13660334 as cited in SEQ ID NO 67468
aacgctgcacgacgctagaggaaaacgcactgccaacggacaacggagtcaggtgcggcgggaggtagcatgagggagcagcaggattccggcgacgtgacggggcgccggggcggggtcatcaggtcgctgctgggcgtcgagcgccggctcgcggagggcgacgcggacgccgagggggcgctcggagcctcctcggagaagcagcatttggccgcggacagcggcgaggagaggaaggcggtggtgagggtggtggcggctgacatgccgcccgcgctgcagcgccgcgcgttccgctgcgcccgcgacgagctcgcggcgatgccgcacttcccgcgccggctcgagcccaagcgcctcgcgctggcgctcaagaaggagtttgatactgcttacgggccagcttggcactgcatcgtggggacgagtttcggttcgtatgtcacgcacgcccggggcggtttcttgtatttttccgtcgataaggtntacatcctgctcttcaggacagccgtggagccctctaatcattgacggccaccggcctgccagcaatggacaaatggctcataaaaacgcgcagttnttgggacagcttgcaccaaattcagttgttcagtcagctaggccgagcccttgtaacttgtaaatcgcattgtttcttggtaggcaaatgtaaantactccttatgcttntgataaaatttaacatttc

SEQ ID NO: 17872 - protein, 155 aa, Zea mays subsp. mays
  peptide (1)..(155): Ceres Seq. ID no. 12549393
  misc_feature (141)..(141): Xaa is any aa, unknown or other
MREQQDSGDVTGRRGGVIRSLLGVERRLAEGDADAEGALGASSEKQHLAADSGEERKAVVRVVAADMPPALQRRAFRCARDELAAMPHFPRRLEPKRLALALKKEFDTAYGPAWHCIVGTSFGSYVTHARGGFLYFSVDKXYILLFRTAVEPSNH

SEQ ID NO: 17873 - protein, 89 aa, Zea mays subsp. mays
  peptide (1)..(89): Ceres Seq. ID no. 12549394
  misc_feature (75)..(75): Xaa is any aa, unknown or other
MPPALQRRAFRCARDELAAMPHFPRRLEPKRLALALKKEFDTAYGPAWHCIVGTSFGSYVTHARGGFLYFSVDKXYILLFRTAVEPSNH

SEQ ID NO: 17874 - DNA, 1288 bp, Zea mays subsp. mays
  misc_feature (1)..(1288): Ceres Seq. ID no. 12364285
  misc_feature (1)..(1288): Ortholog of  Ceres SEQ ID NO 13638746 as cited in SEQ ID NO 59296
  misc_feature (1)..(1288): Ortholog of  Ceres SEQ ID NO 14314050 as cited in SEQ ID NO 59952
  misc_feature (1)..(1288): Ortholog of  Ceres SEQ ID NO 13596474 as cited in SEQ ID NO 62169
  misc_feature (1)..(1288): Ortholog of  Ceres SEQ ID NO 13598714 as cited in SEQ ID NO 62656
  misc_feature (1)..(1288): Ortholog of  Ceres SEQ ID NO 13596969 as cited in SEQ ID NO 63375
  misc_feature (1)..(1288): Ortholog of  Ceres SEQ ID NO 13597519 as cited in SEQ ID NO 64759
  misc_feature (1)..(1288): Ortholog of  Ceres SEQ ID NO 13597870 as cited in SEQ ID NO 64982
  misc_feature (1)..(1288): Ortholog of  Ceres SEQ ID NO 14302388 as cited in SEQ ID NO 65655
  misc_feature (1)..(1288): Ortholog of  Ceres SEQ ID NO 12567001 as cited in SEQ ID NO 0
gcacgagaccattacctagaacatcctaatcgaaaaagagacatcgatcagctagctagctgctgccaagagctagccaggggacagagcagcagcttgaagttggtcaccaatgctaaggatgggccgcgccagcgccacagcaggtgtgttgcgcttcgtcagggcgttcgccctctgcgtggctacggcatgcctcctcctggcggccggcatgccctcgcctgtggcggcgcaggacccgtcgaagctgagcctgcagtactactccaagacgtgccccaacgtggagcacgtcgtccggacggagatggagtgcgcggtgcgcgccgacacgcgcaacgccgcgctcatgctccgcctccatttccatgactgcttcgtgcagggctgcgacgggtcggtgctgctcgacgacacggcaaccatgatcggagagaagcaggcggagcagaacgtcaactcgctgaaagggttcgatctggttgacaagatcaaggagaagctggaagccgagtgccctggaaccgtctcctgcgcagacctgctggcgattgcagctagggatgcggttgtgctggttggtgggccttactgggatgtcccagtaggaagactggactccaagaaggcgagcctggacctagcaaacagcgacatccctacggcccagcaaggcctcctcacgctcattgccaagttctgggagaagggccttgatgccactgacatggtggccctcgtcggatcccacacgatcggattcgctaggtgcgagaatttccgggacagaatctacggcgacttcgagatgacgtccaagtacaacccgtcgtccgaggcctacctgagcaagctgaaggaggtgtgcccgcgggacggcggcgacgacaacatcagcgccatggacagccacacctccgacgtgttcgacaaacgcctacttcgagaccctcatcaagggcgagggcctgctcaactccgaccaggcgatgtggtccagcatcgcgggctactccacctccgacacagtcaacaagtactgggccgaccccgaggccttcttcaagcagttctccgactccatggtgaagatgggcaacatcaccaaccctgccggcggcgaggtcaggaagacctgcagatttgtcaacacataggatatgataatatatataggatgctcgagactgcaggagaaactcggtggttgtgattgtactttacgcctgcaccttctttcgatggcttgtttagggtggcttggaaaataaaaaacccctttgcc

SEQ ID NO: 17875 - protein, 367 aa, Zea mays subsp. mays
  peptide (1)..(367): Ceres Seq. ID no. 12364286
MLRMGRASATAGVLRFVRAFALCVATACLLLAAGMPSPVAAQDPSKLSLQYYSKTCPNVEHVVRTEMECAVRADTRNAALMLRLHFHDCFVQGCDGSVLLDDTATMIGEKQAEQNVNSLKGFDLVDKIKEKLEAECPGTVSCADLLAIAARDAVVLVGGPYWDVPVGRLDSKKASLDLANSDIPTAQQGLLTLIAKFWEKGLDATDMVALVGSHTIGFARCENFRDRIYGDFEMTSKYNPSSEAYLSKLKEVCPRDGGDDNISAMDSHTSDVFDKRLLRDPHQGRGPAQLRPGDVVQHRGLLHLRHSQQVLGRPRGLLQAVLRLHGEDGQHHQPCRRRGQEDLQICQHIGYDNIYRMLETAGETRWL

SEQ ID NO: 17876 - protein, 364 aa, Zea mays subsp. mays
  peptide (1)..(364): Ceres Seq. ID no. 12364287
MGRASATAGVLRFVRAFALCVATACLLLAAGMPSPVAAQDPSKLSLQYYSKTCPNVEHVVRTEMECAVRADTRNAALMLRLHFHDCFVQGCDGSVLLDDTATMIGEKQAEQNVNSLKGFDLVDKIKEKLEAECPGTVSCADLLAIAARDAVVLVGGPYWDVPVGRLDSKKASLDLANSDIPTAQQGLLTLIAKFWEKGLDATDMVALVGSHTIGFARCENFRDRIYGDFEMTSKYNPSSEAYLSKLKEVCPRDGGDDNISAMDSHTSDVFDKRLLRDPHQGRGPAQLRPGDVVQHRGLLHLRHSQQVLGRPRGLLQAVLRLHGEDGQHHQPCRRRGQEDLQICQHIGYDNIYRMLETAGETRWL

SEQ ID NO: 17877 - protein, 333 aa, Zea mays subsp. mays
  peptide (1)..(333): Ceres Seq. ID no. 12364288
MPSPVAAQDPSKLSLQYYSKTCPNVEHVVRTEMECAVRADTRNAALMLRLHFHDCFVQGCDGSVLLDDTATMIGEKQAEQNVNSLKGFDLVDKIKEKLEAECPGTVSCADLLAIAARDAVVLVGGPYWDVPVGRLDSKKASLDLANSDIPTAQQGLLTLIAKFWEKGLDATDMVALVGSHTIGFARCENFRDRIYGDFEMTSKYNPSSEAYLSKLKEVCPRDGGDDNISAMDSHTSDVFDKRLLRDPHQGRGPAQLRPGDVVQHRGLLHLRHSQQVLGRPRGLLQAVLRLHGEDGQHHQPCRRRGQEDLQICQHIGYDNIYRMLETAGETRWL

SEQ ID NO: 17878 - DNA, 1726 bp, Zea mays subsp. mays
  misc_feature (1)..(1726): Ceres Seq. ID no. 12381349
  misc_feature (1)..(1726): Ortholog of  Ceres SEQ ID NO 14311183 as cited in SEQ ID NO 58495
  misc_feature (1)..(1726): Ortholog of  Ceres SEQ ID NO 15169627 as cited in SEQ ID NO 64517
  misc_feature (1)..(1726): Ortholog of  Ceres SEQ ID NO 14307952 as cited in SEQ ID NO 66029
  misc_feature (1)..(1726): Ortholog of  Ceres SEQ ID NO 13502874 as cited in SEQ ID NO 66298
  misc_feature (1)..(1726): Ortholog of  Ceres SEQ ID NO 12614124 as cited in SEQ ID NO 68392
gcacgagaccattacctagaacatcctaatcgaaaaggaactgaatactacaatggagctctcgtgggacgaatgggatgtcattatactggctgcctgcagcttcctcatccctctcgtgttcctctgcaatgctacgaagcggcggcggcggcgcgcgccccctggcccggccaccgtacccatcatcgggaacctggcgtggctaacgttgcgcgacgggttgggtgagctggacatcctgcgacgactgcactcgcgctttggcccgctgctgtcggtccgcttgggttcatcggagcaggtgaacgtggcggaccgccgtctcgcacacgccttgctcgtggagcgtggcgccgctgtggctgaccgctcgccgctgctggtgtccaccgagaggttcggggccttcggctctttcagcatacacgtgtccagctacggcccacgctggagtgttctccgccgcaacttcgcggcggaggtcgtgagcccagcgcggttccggcagatggcggcctcgcgggagctggcgcttgccgacctcatccggaagctgaagctgcaggagggcgtcgtcgtctgcagggacgcgttccagcacgccatgtccagcctcttcatcgccatgtgcttcggcaaggtcctcgacgactcgtccgtggacagcatcggcgtcgcgctgcgcgacttcgtcctccacggcggcgcgtcggggatggggatggcgctattcttgttcctccctgctctcaccacgcgactcttccgtggcctcctgcggtctaaggaggccaagcgccagaagctcgaaaacgtgtactgcctgccattgatccatgagcggagagagcgcaggaagacgaagcagctgacgcaggagcacccgcactgctacgttgacacgttgctcgacctcaggctcgacgaggaacaggatggtggccgccttctcacagaccacgagatagcaagcctgtgcatcgagatcctcatcgttggctcggagctaccggcgacggcgctggagtggatcatggcggagctagtaaagaacccaggcgtgcaggacaagctctacgaggagatgatggtgaaagccaaagccaccactgacgcttctgctggcgtgctcccgttctcggaggatgacttgcccaagataccctacctgagagcggtggtgctggagggtctccggcgccatccgccggggcaccagatgccgccacgcagggtgagggaggacgtggaggtgggtgactacgtggtgcccaagggctcagcgatcaacttcatgctgtacgacctgggcatggacgacgccacgtgggaccgcccagcagtgttcatgccggagaggttcctgcccggcggggaagccgaggcgctggacatcaccggcaccaaggagatgaagatgataccgtttggggcgggcagaaggatctgcccgggcctcaggatcgctctcctgctcctcgagtacttcgtcgccaacctcgtagcgaccttccactggaaagaggtggaagagggcgacgtcgatgtcaccaccgaggacgctcagctcaccgtcctcatggggaagccgctccgggcgcgcctgcttccaagactgcattcgtctgcttaattttcttcatcatcatggtgtatgtcagtgtgtcaccgaataattaattaatgcgaataaagatcaagcttcaaagactcttcaccgttc

SEQ ID NO: 17879 - protein, 527 aa, Zea mays subsp. mays
  peptide (1)..(527): Ceres Seq. ID no. 12381350
MELSWDEWDVIILAACSFLIPLVFLCNATKRRRRRAPPGPATVPIIGNLAWLTLRDGLGELDILRRLHSRFGPLLSVRLGSSEQVNVADRRLAHALLVERGAAVADRSPLLVSTERFGAFGSFSIHVSSYGPRWSVLRRNFAAEVVSPARFRQMAASRELALADLIRKLKLQEGVVVCRDAFQHAMSSLFIAMCFGKVLDDSSVDSIGVALRDFVLHGGASGMGMALFLFLPALTTRLFRGLLRSKEAKRQKLENVYCLPLIHERRERRKTKQLTQEHPHCYVDTLLDLRLDEEQDGGRLLTDHEIASLCIEILIVGSELPATALEWIMAELVKNPGVQDKLYEEMMVKAKATTDASAGVLPFSEDDLPKIPYLRAVVLEGLRRHPPGHQMPPRRVREDVEVGDYVVPKGSAINFMLYDLGMDDATWDRPAVFMPERFLPGGEAEALDITGTKEMKMIPFGAGRRICPGLRIALLLLEYFVANLVATFHWKEVEEGDVDVTTEDAQLTVLMGKPLRARLLPRLHSSA

SEQ ID NO: 17880 - protein, 374 aa, Zea mays subsp. mays
  peptide (1)..(374): Ceres Seq. ID no. 12381351
MAASRELALADLIRKLKLQEGVVVCRDAFQHAMSSLFIAMCFGKVLDDSSVDSIGVALRDFVLHGGASGMGMALFLFLPALTTRLFRGLLRSKEAKRQKLENVYCLPLIHERRERRKTKQLTQEHPHCYVDTLLDLRLDEEQDGGRLLTDHEIASLCIEILIVGSELPATALEWIMAELVKNPGVQDKLYEEMMVKAKATTDASAGVLPFSEDDLPKIPYLRAVVLEGLRRHPPGHQMPPRRVREDVEVGDYVVPKGSAINFMLYDLGMDDATWDRPAVFMPERFLPGGEAEALDITGTKEMKMIPFGAGRRICPGLRIALLLLEYFVANLVATFHWKEVEEGDVDVTTEDAQLTVLMGKPLRARLLPRLHSSA

SEQ ID NO: 17881 - protein, 342 aa, Zea mays subsp. mays
  peptide (1)..(342): Ceres Seq. ID no. 12381352
MSSLFIAMCFGKVLDDSSVDSIGVALRDFVLHGGASGMGMALFLFLPALTTRLFRGLLRSKEAKRQKLENVYCLPLIHERRERRKTKQLTQEHPHCYVDTLLDLRLDEEQDGGRLLTDHEIASLCIEILIVGSELPATALEWIMAELVKNPGVQDKLYEEMMVKAKATTDASAGVLPFSEDDLPKIPYLRAVVLEGLRRHPPGHQMPPRRVREDVEVGDYVVPKGSAINFMLYDLGMDDATWDRPAVFMPERFLPGGEAEALDITGTKEMKMIPFGAGRRICPGLRIALLLLEYFVANLVATFHWKEVEEGDVDVTTEDAQLTVLMGKPLRARLLPRLHSSA

SEQ ID NO: 17882 - DNA, 1251 bp, Zea mays subsp. mays
  misc_feature (1)..(1251): Ceres Seq. ID no. 12359009
  misc_feature (1)..(1251): Ortholog of  Ceres SEQ ID NO 13582619 as cited in SEQ ID NO 56520
  misc_feature (1)..(1251): Ortholog of  Ceres SEQ ID NO 12611392 as cited in SEQ ID NO 56826
  misc_feature (1)..(1251): Ortholog of  Ceres SEQ ID NO 14315846 as cited in SEQ ID NO 58094
  misc_feature (1)..(1251): Ortholog of  Ceres SEQ ID NO 13660872 as cited in SEQ ID NO 60830
  misc_feature (1)..(1251): Ortholog of  Ceres SEQ ID NO 15226831 as cited in SEQ ID NO 62916
  misc_feature (1)..(1251): Ortholog of  Ceres SEQ ID NO 12616221 as cited in SEQ ID NO 63291
aaaattactgattgattgaattgcgaagcatatatatggcggccttctcctccagcaacggcgtgccgccgggcttccggttccacccgaccgacgaggagctgctgctatactacctcaagaagaaggtcggattcgagaagttcgaactcgaggtcatcagggaggtcgacctcaacaagatcgagccatgggagctgcaagagacgtgccggatcgggtcggcgccgcagaacgagtggtacttcttcagccacaaggaccgcaagtacccgacggggtcgaggacgaaccgcgccacgacggccggcttctggaaggccacgggccgggacaagtgcatccggaccagctaccgcaagatcggcatgcgaaagacgctcgtcttctaccgcggccgcgcccctcacggccagaagaccgactggatcatgcacgagtaccgcctcgaggacgccgacgacgacgcccagggcggcacccagcgaggacggatgggtggtgtgccgcgtgttcaagaagaagtgcttcttcaagattggcggaggcgaagggagcaccaccagcagccagggcgcggatgccggcggccacctggccaccatgtcgccgccgctcggcggacaccacgacctggcgtacatgcacccgcacccgtactaccaccacgccgcctcctactactcccagatgcagaccccggggccgcacgccaccgcatactcgcaccacgtgcaggtccaggacctcctcaccaaccaccgacccacggacgacgacggcgccggcaccggctacgacttctccggcctgcatgtcgagcatcaacccggtggcggccttgacgtcggcagcagcgatggcgtcgccacagacgacggtggccagctggccggcgaaaggagggatcagaccaccggtacagccgcagatcatcagtggcaggcgatggatggtttcagcaacggcgggagcgccgaggtgcagcaaatgaccggcgcccaacgaggcggggagatggatttgtggggttacggaaggtaaaaacttgatgaccaccacctatacgatcgaaaacatggacgtcaagtgagcatctttcatgcatacatgatcgaagatatggtgcaaattgatgcatgcgttcattgggagtttatatatagcttgatgacttgtttggactagttttggtgtttacgatgtgtttgtatatgttggttaatttgttggtacaataagagccaaagg

SEQ ID NO: 17883 - protein, 269 aa, Zea mays subsp. mays
  peptide (1)..(269): Ceres Seq. ID no. 12359010
MAAFSSSNGVPPGFRFHPTDEELLLYYLKKKVGFEKFELEVIREVDLNKIEPWELQETCRIGSAPQNEWYFFSHKDRKYPTGSRTNRATTAGFWKATGRDKCIRTSYRKIGMRKTLVFYRGRAPHGQKTDWIMHEYRLEDADDDAQGGTQRGRMGGVPRVQEEVLLQDWRRRREHHQQPGRGCRRPPGHHVAAARRTPRPGVHAPAPVLPPRRLLLLPDADPGAARHRILAPRAGPGPPHQPPTHGRRRRRHRLRLLRPACRASTRWRP

SEQ ID NO: 17884 - protein, 267 aa, Zea mays subsp. mays
  peptide (1)..(267): Ceres Seq. ID no. 12359011
MGAARDVPDRVGAAERVVLLQPQGPQVPDGVEDEPRHDGRLLEGHGPGQVHPDQLPQDRHAKDARLLPRPRPSRPEDRLDHARVPPRGRRRRRPGRHPARTDGWCAACSRRSASSRLAEAKGAPPAARARMPAATWPPCRRRSADTTTWRTCTRTRTTTTPPPTTPRCRPRGRTPPHTRTTCRSRTSSPTTDPRTTTAPAPATTSPACMSSINPVAALTSAAAMASPQTTVASWPAKGGIRPPVQPQIISGRRWMVSATAGAPRCSK

SEQ ID NO: 17885 - protein, 158 aa, Zea mays subsp. mays
  peptide (1)..(158): Ceres Seq. ID no. 12359012
MRKTLVFYRGRAPHGQKTDWIMHEYRLEDADDDAQGGTQRGRMGGVPRVQEEVLLQDWRRRREHHQQPGRGCRRPPGHHVAAARRTPRPGVHAPAPVLPPRRLLLLPDADPGAARHRILAPRAGPGPPHQPPTHGRRRRRHRLRLLRPACRASTRWRP

SEQ ID NO: 17886 - DNA, 579 bp, Zea mays subsp. mays
  misc_feature (1)..(579): Ceres Seq. ID no. 13622385
  misc_feature (1)..(579): Ortholog of  Ceres SEQ ID NO 14316404 as cited in SEQ ID NO 57641
  misc_feature (1)..(579): Ortholog of  Ceres SEQ ID NO 14308575 as cited in SEQ ID NO 58782
  misc_feature (1)..(579): Ortholog of  Ceres SEQ ID NO 12611159 as cited in SEQ ID NO 59821
  misc_feature (1)..(579): Ortholog of  Ceres SEQ ID NO 15180029 as cited in SEQ ID NO 0
aattgtcgttgccatccatcactcacctggccgcggaaactgatccatgatctgatcccacggcaccagcagcaacggccgaccgccgggccggccggccggcgcgcacgcgcggtggcaaataaagagcttagagccgccggccgggatctatggggcgcgaggcggcagcgacgaggccgcccaagctgcggaggggcctgtggtcgccggaggaggacgagaagctgtacaatcacatcatccgatatggcgtcggctgctgtagctcacccccaaagctcgctggcttggagagatgcggcaagagctgcaggctgagatggatcaactacctgcggcctgacctcaagaggggcagcttctcccagcaggaggaggatctcatcgtcagcctccacaagatactaggcaacaggtggtcccagatcgcgtcgcagctgccggggaggacggacaacgagatcaaaaacttctggaactcgtgcatcaagaagaagctccggcagcatggcatcgaccccgccacccacaagccgctcannnacgacgacaacgttgctgctgccgctgctgcgg

SEQ ID NO: 17887 - protein, 142 aa, Zea mays subsp. mays
  peptide (1)..(142): Ceres Seq. ID no. 13622386
  misc_feature (131)..(131): Xaa is any aa, unknown or other
  misc_feature (132)..(132): Xaa is any aa, unknown or other
MGREAAATRPPKLRRGLWSPEEDEKLYNHIIRYGVGCCSSPPKLAGLERCGKSCRLRWINYLRPDLKRGSFSQQEEDLIVSLHKILGNRWSQIASQLPGRTDNEIKNFWNSCIKKKLRQHGIDPATHKPLXXDDNVAAAAAA

SEQ ID NO: 17888 - protein, 106 aa, Zea mays subsp. mays
  peptide (1)..(106): Ceres Seq. ID no. 13622387
NCRCHPSLTWPRKLIHDLIPRHQQQRPTAGPAGRRARAVANKELRAAGRDLWGARRQRRGRPSCGGACGRRRRTRSCTITSSDMASAAVAHPQSSLAWRDAARAAG

SEQ ID NO: 17889 - DNA, 1117 bp, Zea mays subsp. mays
  misc_feature (1)..(1117): Ceres Seq. ID no. 12350716
  misc_feature (1)..(1117): Ortholog of  Ceres SEQ ID NO 14316455 as cited in SEQ ID NO 57297
atgagctgcttccagcccggaaccgaggctaactccgccagccgactcggaccggtggtggtgtcgtggaagctgcgcagccacgggcgggcctgttcgctgttcgcagccgtgcctcgatcgccgcccgtgccagaggtctctctccaatggcggtgacgagcgccgcagcccgccgcttcctcgcgctcgcgcccgcccggggaccccgcgccttctggtcggcctcgtgtccacccgaccccgacgcaccttccgcctcgtcgacgtctaccgacaacaacagcaggaggaagaagaaggagccgtccgggtccgcccaccaccgcctcgccgccgtcatggacgccgtcaacgagcgcaagctcccacccgagctcagtgggcgcggcaacgcagtaaggtctgaaactgacattgtaaatgtcgttgaacaaagaatatggcattcaatggaggaagggcactttgaaaatctaccagggaagggcaaacccttaaacctcacttcaaatcctcatgccgatcctgccgaagacaccctttacaggatactttcaaagaatggttgtgcacctgaatgggttgaactgaataaggaaattcgtggcatgatcttgagctggaggtcggcattaaggaaagcatgggcaaaccgctctgaagatgatgattctaactggagtgatgacagcagggctctccaggagcgaattcgccagataaatgataaggttttccggtacaacctgatagtaccctttgggcgtcagttgtttggtctgaactgggacaaggagctggacaagttgaaggaagaataaaggacaaagaggtggacacattggtgaacatagcatggaggacttttgttgtatcaaaatgacctgtaactaggaatacctgataggacatacacatacttaagaaaaaccatgaaagctgagtataggtatttacacgtaggcttttattagtttatatatttttggagaaccaagttttccggtgtttccggtgctgtagccgattttgtgataaaactctgtcacatgggtaaaacctgagataatttcttagcggtaaaactcgatctatgccacatgggctaagctcc

SEQ ID NO: 17890 - protein, 224 aa, Zea mays subsp. mays
  peptide (1)..(224): Ceres Seq. ID no. 12350717
MAVTSAAARRFLALAPARGPRAFWSASCPPDPDAPSASSTSTDNNSRRKKKEPSGSAHHRLAAVMDAVNERKLPPELSGRGNAVRSETDIVNVVEQRIWHSMEEGHFENLPGKGKPLNLTSNPHADPAEDTLYRILSKNGCAPEWVELNKEIRGMILSWRSALRKAWANRSEDDDSNWSDDSRALQERIRQINDKVFRYNLIVPFGRQLFGLNWDKELDKLKEE

SEQ ID NO: 17891 - protein, 160 aa, Zea mays subsp. mays
  peptide (1)..(160): Ceres Seq. ID no. 12350718
MDAVNERKLPPELSGRGNAVRSETDIVNVVEQRIWHSMEEGHFENLPGKGKPLNLTSNPHADPAEDTLYRILSKNGCAPEWVELNKEIRGMILSWRSALRKAWANRSEDDDSNWSDDSRALQERIRQINDKVFRYNLIVPFGRQLFGLNWDKELDKLKEE

SEQ ID NO: 17892 - protein, 123 aa, Zea mays subsp. mays
  peptide (1)..(123): Ceres Seq. ID no. 12350719
MEEGHFENLPGKGKPLNLTSNPHADPAEDTLYRILSKNGCAPEWVELNKEIRGMILSWRSALRKAWANRSEDDDSNWSDDSRALQERIRQINDKVFRYNLIVPFGRQLFGLNWDKELDKLKEE

SEQ ID NO: 17893 - DNA, 1321 bp, Zea mays subsp. mays
  misc_feature (1)..(1321): Ceres Seq. ID no. 12360757
  misc_feature (1)..(1321): Ortholog of  Ceres SEQ ID NO 14303656 as cited in SEQ ID NO 61363
gcacgagaccattacctagaacatcctaacaaaatcttttttttttgttcctgtgatgaactgagagagttggtttttgagttctgcaggctattgaagtttcgaagcgccaaatgaaactaagagaggcgtctggaaatagtgatatggtttcaaggctagaagcagctgagtcaaagctgcaagagttgaaatcgaatatgggggtattgggcaaagaagctgttgcagcaatgactgccgttgaggcccaacagcaaagattgaccttgcagcgtcttattgcattggtacattatttgtctagttgggtgatttgggccacttgactttttgtttgtttgtcttgaagttgtctattgtgtctcataacatttgtggacttaattgaaggttgaatcagagagaaactaccaccaaaaggtcctacaaattcttgatcaacttgagagagaggtctgatggtttcacatccacatcctttccatccttgcccattgtgctaaagaaagtttacaacttcaagaaaaatctggtcggttatgttatcttgattgagctttcttattttttttctagatggtatctgagcgccaaagaatcgaaggagcacctccggtggttgagagttccatgcctccaccgcctgcatatgaagaagtcaatggtatattcatgagaaatacagttgcagaattggtcgagactgtggagtatttcttggctgaggcaatccagtcataccaagccgaaagcgataccgagctcaacctttcaactggtgactacatagtggtccgaaaggtagtgctttcagatttctcttacacgtcatttacgaattgctcatgtagtcatgttatgctgcggccagcttcacacatattggttgcccatttcatgagtatctcaatcacatttcacattgtacccgaacttgattaccgaatttacataaaaaaccctttcctaatcaggtgtcgaacaatggatgggccgaaggtgaatgcagggggaaagctggttggttcccctacgactacatcgagaaacgggagcgtgtgcttgcaagtaaagtcggccaagttttctaagtcttccgctgagccatgtagtatatccccggggttgtacactgtgtgttgtttatgcttgtcatcttcagagaatcagaggagatctgtaattttgctgaaagctgcctgttgggtggtttgtttctgcctggccgccttaattgttcaaattcatgtggcaggaactgaatatattcattcttcagttatcctgtcaatatatataatttttttgtttgaagcac

SEQ ID NO: 17894 - protein, 247 aa, Zea mays subsp. mays
  peptide (1)..(247): Ceres Seq. ID no. 12360758
MVSERQRIEGAPPVVESSMPPPPAYEEVNGIFMRNTVAELVETVEYFLAEAIQSYQAESDTELNLSTGDYIVVRKVVLSDFSYTSFTNCSCSHVMLRPASHILVAHFMSISITFHIVPELDYRIYIKNPFLIRCRTMDGPKVNAGGKLVGSPTTTSRNGSVCLQVKSAKFSKSSAEPCSISPGLYTVCCLCLSSSENQRRSVILLKAACWVVCFCLAALIVQIHVAGTEYIHSSVILSIYIIFLFEA

SEQ ID NO: 17895 - protein, 229 aa, Zea mays subsp. mays
  peptide (1)..(229): Ceres Seq. ID no. 12360759
MPPPPAYEEVNGIFMRNTVAELVETVEYFLAEAIQSYQAESDTELNLSTGDYIVVRKVVLSDFSYTSFTNCSCSHVMLRPASHILVAHFMSISITFHIVPELDYRIYIKNPFLIRCRTMDGPKVNAGGKLVGSPTTTSRNGSVCLQVKSAKFSKSSAEPCSISPGLYTVCCLCLSSSENQRRSVILLKAACWVVCFCLAALIVQIHVAGTEYIHSSVILSIYIIFLFEA

SEQ ID NO: 17896 - protein, 215 aa, Zea mays subsp. mays
  peptide (1)..(215): Ceres Seq. ID no. 12360760
MRNTVAELVETVEYFLAEAIQSYQAESDTELNLSTGDYIVVRKVVLSDFSYTSFTNCSCSHVMLRPASHILVAHFMSISITFHIVPELDYRIYIKNPFLIRCRTMDGPKVNAGGKLVGSPTTTSRNGSVCLQVKSAKFSKSSAEPCSISPGLYTVCCLCLSSSENQRRSVILLKAACWVVCFCLAALIVQIHVAGTEYIHSSVILSIYIIFLFEA

SEQ ID NO: 17897 - DNA, 1051 bp, Zea mays subsp. mays
  misc_feature (1)..(1051): Ceres Seq. ID no. 12359310
  misc_feature (1)..(1051): Ortholog of  Ceres SEQ ID NO 12611159 as cited in SEQ ID NO 59821
  misc_feature (1)..(1051): Ortholog of  Ceres SEQ ID NO 13584238 as cited in SEQ ID NO 64216
acacacacacgactagcaggcacagcagcaccgactagtcaatctctacttgcctacacagcagaaggaaccagacagggaagtagggaaccagagaaagcatagcaatggtgcggaagccgatccacgctgacgacgccggcgctaagagcacggaggcgagcaaggagaggaaggggttgtggtcgccggaggaggacgagcggctcttcacccacatcacctaccacgtcgtctccacctggagctccgtcgcgcagctagcaggcctgcggaggagcggcaagagctgccggctgcggtggctgaactacctgcgcccggacctcaagaaggagcccatctccaagcgcgaggaggagaccatcatctccctgcagcagtcgctcggcaaccggtggtcgactatcgcggcgaggatgccaggcaggacggacaacgagatcaagaactactggaactcccgcatcaggaagcgcctcaacgccgccgcctccagagctgcaggctgcggcgacggcggtgacagcgcggccgagccatcgggggccgcggccgcgggaggaaaggaggattcggccaacgctgcgccgccgccagcggcccagcctacgcccatcccggcgcggttcccggtcttcgggtgccagctgcccgacggagccggcggcggcatttcgtctcccggcagcggcaagagtccacagtcgtcgactactgcgagtatgcggcagaacgcgggtgacgagagcgatgcgagcgacggtggcggtggcgacagcgacatggtccatttcctctcgttcgatgatctggattatcccggggatttgctcattgatgtgccgggcgccatggacgcgtgggagagccaactgtgctatgcgaatccgatgatgagctcgctctgttgatccacactaccaattgcatatagcacagccattgtcttgttcccgctaatcatatataggttgtatgaattgtttatgtgaaatttcactgggttttttggagaaggaatgcatgatgacgtgtgggtattcctatt

SEQ ID NO: 17898 - protein, 268 aa, Zea mays subsp. mays
  peptide (1)..(268): Ceres Seq. ID no. 12359311
MVRKPIHADDAGAKSTEASKERKGLWSPEEDERLFTHITYHVVSTWSSVAQLAGLRRSGKSCRLRWLNYLRPDLKKEPISKREEETIISLQQSLGNRWSTIAARMPGRTDNEIKNYWNSRIRKRLNAAASRAAGCGDGGDSAAEPSGAAAAGGKEDSANAAPPPAAQPTPIPARFPVFGCQLPDGAGGGISSPGSGKSPQSSTTASMRQNAGDESDASDGGGGDSDMVHFLSFDDLDYPGDLLIDVPGAMDAWESQLCYANPMMSSLC

SEQ ID NO: 17899 - protein, 164 aa, Zea mays subsp. mays
  peptide (1)..(164): Ceres Seq. ID no. 12359312
MPGRTDNEIKNYWNSRIRKRLNAAASRAAGCGDGGDSAAEPSGAAAAGGKEDSANAAPPPAAQPTPIPARFPVFGCQLPDGAGGGISSPGSGKSPQSSTTASMRQNAGDESDASDGGGGDSDMVHFLSFDDLDYPGDLLIDVPGAMDAWESQLCYANPMMSSLC

SEQ ID NO: 17900 - DNA, 852 bp, Zea mays subsp. mays
  misc_feature (1)..(852): Ceres Seq. ID no. 12391900
  misc_feature (1)..(852): Ortholog of  Ceres SEQ ID NO 13596564 as cited in SEQ ID NO 62236
ctcgcctcccgtcgcgttcttatccatccaccccgtccggcacccatttatatcctgtcgtccctccctccctccttcggccacaccgtgtcacaccgctgcttgcttgcttgcgatcgggtttggatttggggagcatcatggaggcctacttcttgttccacagcgggagggcgcacgagttcgcgtacgcggagcaggaggaggacatcggctcgccgtcggattccgaacccccgtccacgtccacgtcgagggagtccgcgggctcgtcggcggagctcgacgacgacgccacctcctccggctccggctccggctcggaccgcttcgagatgtccgccctcatgacgcagctccctcccttcaagcggggcctgtccaggttcttcgacggcaagtcgcagtccttcgcctcgctcgccgccgtggggtcgctagaggacctggccaagccggcccggaagcgcctcaagccgtcgcggagctgcggcggcgccctcgacgcgcaccgcggacgcctcctctcgccgcgcgaggcattattgcaccaagcccaccgctaggattaggaaggcagccgcgaggagcggcacgttgtcggttctcgcggccggcgcgccgaggatgccgccggcggtggcgagggccgagggcgtggccgccaaggttctgatcgtcagttgagccgcggatcggcctgcctgagctcaacatcgacgcacacactcgcaggcacagctagtacggaccgccgcatccacccctctgcctgaagctgttcggttttctttttgtttcccaatgcgtctgtgatctgatctctttgtaatgaaaacgcgcagctcaatt

SEQ ID NO: 17901 - protein, 224 aa, Zea mays subsp. mays
  peptide (1)..(224): Ceres Seq. ID no. 12391901
SPPVAFLSIHPVRHPFISCRPSLPPSATPCHTAACLLAIGFGFGEHHGGLLLVPQREGARVRVRGAGGGHRLAVGFRTPVHVHVEGVRGLVGGARRRRHLLRLRLRLGPLRDVRPHDAAPSLQAGPVQVLRRQVAVLRLARRRGVARGPGQAGPEAPQAVAELRRRPRRAPRTPPLAARGIIAPSPPLGLGRQPRGAARCRFSRPARRGCRRRWRGPRAWPPRF

SEQ ID NO: 17902 - protein, 187 aa, Zea mays subsp. mays
  peptide (1)..(187): Ceres Seq. ID no. 12391902
RLPSRSYPSTPSGTHLYPVVPPSLLRPHRVTPLLACLRSGLDLGSIMEAYFLFHSGRAHEFAYAEQEEDIGSPSDSEPPSTSTSRESAGSSAELDDDATSSGSGSGSDRFEMSALMTQLPPFKRGLSRFFDGKSQSFASLAAVGSLEDLAKPARKRLKPSRSCGGALDAHRGRLLSPREALLHQAHR

SEQ ID NO: 17903 - protein, 141 aa, Zea mays subsp. mays
  peptide (1)..(141): Ceres Seq. ID no. 12391903
MEAYFLFHSGRAHEFAYAEQEEDIGSPSDSEPPSTSTSRESAGSSAELDDDATSSGSGSGSDRFEMSALMTQLPPFKRGLSRFFDGKSQSFASLAAVGSLEDLAKPARKRLKPSRSCGGALDAHRGRLLSPREALLHQAHR

SEQ ID NO: 17904 - DNA, 1004 bp, Zea mays subsp. mays
  misc_feature (1)..(1004): Ceres Seq. ID no. 12383275
  misc_feature (1)..(1004): Ortholog of  Ceres SEQ ID NO 12619615 as cited in SEQ ID NO 66033
gaaaagtcgaaatccaaacccgctggtcagcttatccccttcgcaggagccaggacggacgaactgcgagtacacgagagaggagagaggagaggagacacaggcgacacgcgccatttgggagagggaaaggaatggagctgacgtcttcttcccgctccgtgctctcctcctgcaaccggccggtcgctcgtgctctttgcaggacggcgtacccgggtgcaaggaggaaggagaagggaatagtatgtatcttgagcgaggagaaagaagtggtacaaaggacgatccggaggcgagctgccttttctttgttgctggcttcgccggtgctatcagtggcgttctcggcctatgggaagagtaaaaccatgaacccttacgatgaaaggcgtctgcttcagcagaataagaagattcaggaagccaaccgtgcccctgaggatttcccaaacttcatcagagaaggcttccaggtcaaagtagtgacaccggacaactatattacacgggcctctggactaatgtatgaggacattaaagtcggtacaggcgactctccaaaggatggtcagcagattatattccattatgtgggctacaatgaagcaggacgaagaatagatagcacctatattcagggttcccctgcaaaaattcggttagggaacggaacactagttccaggttttgaagaaggcatacgggacatgaaaccaggtggtaagagaagaattataatacctccagagcttggtcctcctgttgggccttcgacgttcttcagtgcgaagcagttcgaagtgttcgatgtggagttactggcggtgcaggactgccagcggaggacgatagcattttactctgatgtcgtgtgcagctgaacttcggtttgtctagtcttccgcctatggcacatcgcagcagcatcctgcacttttggctgctggtctgagttgccgtccaattgtgtgtatgtatatagccagctgttgttactgcgg

SEQ ID NO: 17905 - protein, 293 aa, Zea mays subsp. mays
  peptide (1)..(293): Ceres Seq. ID no. 12383276
KVEIQTRWSAYPLRRSQDGRTASTRERREERRHRRHAPFGRGKGMELTSSSRSVLSSCNRPVARALCRTAYPGARRKEKGIVCILSEEKEVVQRTIRRRAAFSLLLASPVLSVAFSAYGKSKTMNPYDERRLLQQNKKIQEANRAPEDFPNFIREGFQVKVVTPDNYITRASGLMYEDIKVGTGDSPKDGQQIIFHYVGYNEAGRRIDSTYIQGSPAKIRLGNGTLVPGFEEGIRDMKPGGKRRIIIPPELGPPVGPSTFFSAKQFEVFDVELLAVQDCQRRTIAFYSDVVCS

SEQ ID NO: 17906 - protein, 249 aa, Zea mays subsp. mays
  peptide (1)..(249): Ceres Seq. ID no. 12383277
MELTSSSRSVLSSCNRPVARALCRTAYPGARRKEKGIVCILSEEKEVVQRTIRRRAAFSLLLASPVLSVAFSAYGKSKTMNPYDERRLLQQNKKIQEANRAPEDFPNFIREGFQVKVVTPDNYITRASGLMYEDIKVGTGDSPKDGQQIIFHYVGYNEAGRRIDSTYIQGSPAKIRLGNGTLVPGFEEGIRDMKPGGKRRIIIPPELGPPVGPSTFFSAKQFEVFDVELLAVQDCQRRTIAFYSDVVCS

SEQ ID NO: 17907 - protein, 170 aa, Zea mays subsp. mays
  peptide (1)..(170): Ceres Seq. ID no. 12383278
MNPYDERRLLQQNKKIQEANRAPEDFPNFIREGFQVKVVTPDNYITRASGLMYEDIKVGTGDSPKDGQQIIFHYVGYNEAGRRIDSTYIQGSPAKIRLGNGTLVPGFEEGIRDMKPGGKRRIIIPPELGPPVGPSTFFSAKQFEVFDVELLAVQDCQRRTIAFYSDVVCS

SEQ ID NO: 17908 - DNA, 429 bp, Zea mays subsp. mays
  misc_feature (1)..(429): Ceres Seq. ID no. 1676685
  misc_feature (1)..(429): Ortholog of  Ceres SEQ ID NO 13597333 as cited in SEQ ID NO 63974
ctttctacccccagggtcgcggcgagcgcgcctatgacatctactcgcggctgctgcgggagcgcatcgtgtgcgtcatgggcccgatcgatgacagcgttgccagccttgttatcgcacagctcctcttcctgcaatccgagagcaacaagaagcccatccacatgtacatcaacagccctggtggtgtggtgaccgcgggcctggccatctacgacacgatgcagtacatcctcaacccgatctgcacctggtgcgtgggccaggccgccagcatgggctccctgcttctcgccgccggcaccccaggcatgcccactcgctcctcctctccagaatcatgtggaggggccagaggctgccagacccccagctgggccctgctcaccccttgttgctgggcttggaggggcctcttgaggaactttt

SEQ ID NO: 17909 - protein, 142 aa, Zea mays subsp. mays
  peptide (1)..(142): Ceres Seq. ID no. 1676686
FYPQGRGERAYDIYSRLLRERIVCVMGPIDDSVASLVIAQLLFLQSESNKKPIHMYINSPGGVVTAGLAIYDTMQYILNPICTWCVGQAASMGSLLLAAGTPGMPTRSSSPESCGGARGCQTPSWALLTPCCWAWRGLLRNF

SEQ ID NO: 17910 - protein, 117 aa, Zea mays subsp. mays
  peptide (1)..(117): Ceres Seq. ID no. 1676687
MGPIDDSVASLVIAQLLFLQSESNKKPIHMYINSPGGVVTAGLAIYDTMQYILNPICTWCVGQAASMGSLLLAAGTPGMPTRSSSPESCGGARGCQTPSWALLTPCCWAWRGLLRNF

SEQ ID NO: 17911 - protein, 88 aa, Zea mays subsp. mays
  peptide (1)..(88): Ceres Seq. ID no. 1676688
MYINSPGGVVTAGLAIYDTMQYILNPICTWCVGQAASMGSLLLAAGTPGMPTRSSSPESCGGARGCQTPSWALLTPCCWAWRGLLRNF

SEQ ID NO: 17912 - DNA, 1211 bp, Zea mays subsp. mays
  misc_feature (1)..(1211): Ceres Seq. ID no. 12415232
  misc_feature (1)..(1211): Ortholog of  Ceres SEQ ID NO 14313167 as cited in SEQ ID NO 54354
  misc_feature (1)..(1211): Ortholog of  Ceres SEQ ID NO 15226238 as cited in SEQ ID NO 68840
  misc_feature (1)..(1211): Ortholog of  Ceres SEQ ID NO 14306100 as cited in SEQ ID NO 0
gcacgagaccattacctagaacatcctaatcgaaaaagggtgccgtgcgagtacaagcacaggaacctgtcggtgagggtgcaggagaagaggcgctccccggggggccctggcgacctcgccatcaggtttctctaccagggcggccagaccgacatcgtcgccgtcgacgtcgcgcaggtgggctcgtccaactggaagtccatgacgcgccacagcggcgggccggcgtggagcacgaggcaggcgccggcggggccgctccagctcagggtggtggtgacgggcggctacgacggcaagtgggtgtgggcggagcgcgaggtgctgccgcggcggcggcgcgccggcgaggtctacgacacgggcgtccagatcaccgacgtcgccccaacccgcagggctccttccactacggcgccatcccgacttccaggacgctggtgctggccagctccgcttccctcgacggcgccggccgtaggcgctgcgcctgtcaacgcagtgtccttcgtcgtgcccgacacgccgctcaagctcgccgacagatacgacatcgccggcgtcatcgactgggacggcctccccgcgcggctcgacggcgccgcggcggtgccgcgcgccgggacgcccgtgctcaggctcggcctgcacgagttcgtggaggtggtgttccagaacacggaggaggagctgcagtcgtggcacctcgatggatacgacttctgggttgtagggtacggcgatggccagtggaatgagacgcagcggcagacgtacaacttggtggacgcgcaggcaagacacaccgttcaggtgtaccccaacgggtggtcggcgatcctggtgtcgctggacaaccaggggatgtggaacctgcggtcggcgatgtgggaccggcattacctcgggcagcagctctacctcagggtgtggacgccggagcagagcctctccaacgagtacgccatccccgccaacgccatcctctgcgggaaggccgccgccctcccacactgacacgacgacgttcagcagccatactactgcctgctccattcgaccaaccaagtgaaagaagaagaggagaatctatttttgttgctgcaagaattaatgtgaaaaaaaacacaattactgccactggtatacgtatctcctaactcctaattgtccagcaacagttacagcgtttttttatgcaannctgc

SEQ ID NO: 17913 - protein, 339 aa, Zea mays subsp. mays
  peptide (1)..(339): Ceres Seq. ID no. 12415233
ARDHYLEHPNRKRVPCEYKHRNLSVRVQEKRRSPGGPGDLAIRFLYQGGQTDIVAVDVAQVGSSNWKSMTRHSGGPAWSTRQAPAGPLQLRVVVTGGYDGKWVWAEREVLPRRRRAGEVYDTGVQITDVAPTRRAPSTTAPSRLPGRWCWPAPLPSTAPAVGAAPVNAVSFVVPDTPLKLADRYDIAGVIDWDGLPARLDGAAAVPRAGTPVLRLGLHEFVEVVFQNTEEELQSWHLDGYDFWVVGYGDGQWNETQRQTYNLVDAQARHTVQVYPNGWSAILVSLDNQGMWNLRSAMWDRHYLGQQLYLRVWTPEQSLSNEYAIPANAILCGKAAALPH

SEQ ID NO: 17914 - protein, 271 aa, Zea mays subsp. mays
  peptide (1)..(271): Ceres Seq. ID no. 12415234
MTRHSGGPAWSTRQAPAGPLQLRVVVTGGYDGKWVWAEREVLPRRRRAGEVYDTGVQITDVAPTRRAPSTTAPSRLPGRWCWPAPLPSTAPAVGAAPVNAVSFVVPDTPLKLADRYDIAGVIDWDGLPARLDGAAAVPRAGTPVLRLGLHEFVEVVFQNTEEELQSWHLDGYDFWVVGYGDGQWNETQRQTYNLVDAQARHTVQVYPNGWSAILVSLDNQGMWNLRSAMWDRHYLGQQLYLRVWTPEQSLSNEYAIPANAILCGKAAALPH

SEQ ID NO: 17915 - DNA, 1362 bp, Zea mays subsp. mays
  misc_feature (1)..(1362): Ceres Seq. ID no. 12368239
  misc_feature (1)..(1362): Ortholog of  Ceres SEQ ID NO 14310713 as cited in SEQ ID NO 53582
gcacgagaccattacctagaacatcctaatcgaaaacccagaacccagagctccaaacctaggccggagccgcggtgcaagcagctacgtggattggacttggacgtctggctctggaggtcccaagttcccaacgcttgctggagttgagatctggtgggcttccggaggagacgccgacggtttgcgaggtttgctggctccgtggcgtcgcggaaggtcatggagcaccgcgccttcgactgcagcgggagtgatgatgatctccctccaacatatcaaattagagtaccgagaatgcatttcagtgggaacagaaggccattagcaggcgcattttctcagccaagaccacacaacaagttggatagcgatatacatcagattgagcaacaggcatatactggtgttcttagagcattcaaaatgcaatcggatgccctgacatgggaaaaagaaagtctaattactgaactaagaagagagttgaaagtctctgatgtggaacacaggatgctattaaacatggtcaatgaagaggaggctatccatacaataaggcagtcaaggcagggatgtggaatgcaatctagcttgccttataatagcgtagttgatcacaaccttggacctatcaagcggcagaagaaatcacatcccatctattcactccctgtggatccccattcacccagcatgcctttgaaagcattggtgggcaacaagacatatacactggcacctgaaaacataagacggggatctgcctatcaaacccttccacatcaggttggttggctgggcatctgatggtgctacgaaaggtatggatgggagaagcggaaggtatcacacgaacgagtattatgcttcacataatgacatggggcttttgaacttcaatcgtactgacatacctgatactgaaactcttgtgaaaaaggtggagagggtattatcccggccagatgtgtatgcaattgaaagggcaaaggaactgcttataggccaagagcagtcattgcttgatgcaattgccaaacttgatgaagcatctgaccatgaaagcgatgatatgctagttgggagccggatacacgccaccattgggtgacgcgggcagcacgcctctgacacggggcgatgctttggagttcagacctctggcagcaggcggagaggcaacgatatgtgaaatagtgctgtgtattgtaaaacgctacctgttttagtccggtagtagcctagtaggttaggttcttttggcagcctggcaaatctgtgcatgcgccatgcagtgtgatgggaatatatgtcttgagcaccatcacatgtgatgtgatgctgtctcgtttcatctcc

SEQ ID NO: 17916 - protein, 195 aa, Zea mays subsp. mays
  peptide (1)..(195): Ceres Seq. ID no. 12368240
MEHRAFDCSGSDDDLPPTYQIRVPRMHFSGNRRPLAGAFSQPRPHNKLDSDIHQIEQQAYTGVLRAFKMQSDALTWEKESLITELRRELKVSDVEHRMLLNMVNEEEAIHTIRQSRQGCGMQSSLPYNSVVDHNLGPIKRQKKSHPIYSLPVDPHSPSMPLKALVGNKTYTLAPENIRRGSAYQTLPHQVGWLGI

SEQ ID NO: 17917 - protein, 170 aa, Zea mays subsp. mays
  peptide (1)..(170): Ceres Seq. ID no. 12368241
MHFSGNRRPLAGAFSQPRPHNKLDSDIHQIEQQAYTGVLRAFKMQSDALTWEKESLITELRRELKVSDVEHRMLLNMVNEEEAIHTIRQSRQGCGMQSSLPYNSVVDHNLGPIKRQKKSHPIYSLPVDPHSPSMPLKALVGNKTYTLAPENIRRGSAYQTLPHQVGWLGI

SEQ ID NO: 17918 - protein, 127 aa, Zea mays subsp. mays
  peptide (1)..(127): Ceres Seq. ID no. 12368242
MQSDALTWEKESLITELRRELKVSDVEHRMLLNMVNEEEAIHTIRQSRQGCGMQSSLPYNSVVDHNLGPIKRQKKSHPIYSLPVDPHSPSMPLKALVGNKTYTLAPENIRRGSAYQTLPHQVGWLGI

SEQ ID NO: 17919 - DNA, 790 bp, Zea mays subsp. mays
  misc_feature (1)..(790): Ceres Seq. ID no. 12359021
  misc_feature (1)..(790): Ortholog of  Ceres SEQ ID NO 13598846 as cited in SEQ ID NO 1217
acaccggcattctgctctgcactccattgctagctgcaacgcactgcaagaaagagctagctagctcaccgtcgttacgaagatgatcaagctgaggtaccctaagaagctgttcaggaggagctcctccaagggcagcagcactaccaccaccaccagcagcagcagcagcgacggtgatgccgccggcagcgcccgcggcggggagatcgagtgggaggtgcggccgggcggcatgctggtgcagaagagggacggcagggggcacgtggacgtcatcaccgtgagggtcgccaccggcttctcctggcacgacgtctccgtcgtggctacctgcacttttggtgagctgaaggcggtgctgtggaagatgacagggctggagcctcgggagcagaggctcctgttcaggggcaaggagagggaggacggcgaccacctccacatgatcggggtgagggacatggacaaggtgctgctcctggaggaccctgccctcaaggacatgaagctccgggccggcctcacggcggcgtatcgtcagactttcatcagggtgtagtagtaggcttaggcttgccgcccccgccccctaattaactgtgatgcatgatatatatagagagagtaaaacgaaccagtatcgtgttttcggctgctctcggtcggtgaacgactgcctgcctgttgaagagaagccactgcttgtttttgtttatgtttagctgtgtcttttgtcatttttgtagggtagagagatgaatcacgtacgctgagtttttactggcct

SEQ ID NO: 17920 - protein, 159 aa, Zea mays subsp. mays
  peptide (1)..(159): Ceres Seq. ID no. 12359022
MIKLRYPKKLFRRSSSKGSSTTTTTSSSSSDGDAAGSARGGEIEWEVRPGGMLVQKRDGRGHVDVITVRVATGFSWHDVSVVATCTFGELKAVLWKMTGLEPREQRLLFRGKEREDGDHLHMIGVRDMDKVLLLEDPALKDMKLRAGLTAAYRQTFIRV

SEQ ID NO: 17921 - protein, 108 aa, Zea mays subsp. mays
  peptide (1)..(108): Ceres Seq. ID no. 12359023
MLVQKRDGRGHVDVITVRVATGFSWHDVSVVATCTFGELKAVLWKMTGLEPREQRLLFRGKEREDGDHLHMIGVRDMDKVLLLEDPALKDMKLRAGLTAAYRQTFIRV

SEQ ID NO: 17922 - DNA, 1887 bp, Zea mays subsp. mays
  misc_feature (1)..(1887): Ceres Seq. ID no. 12374668
  misc_feature (1)..(1887): Ortholog of  Ceres SEQ ID NO 15172174 as cited in SEQ ID NO 60481
  misc_feature (1)..(1887): Ortholog of  Ceres SEQ ID NO 15176081 as cited in SEQ ID NO 65838
  misc_feature (1)..(1887): Ortholog of  Ceres SEQ ID NO 14302875 as cited in SEQ ID NO 66242
  misc_feature (1)..(1887): Ortholog of  Ceres SEQ ID NO 13660287 as cited in SEQ ID NO 67316
  misc_feature (1)..(1887): Ortholog of  Ceres SEQ ID NO 14307892 as cited in SEQ ID NO 67490
gcttgcaaacgccgcattctcgacagacgacagatgctttgcaacatagacgccgatgcacccgtcaccctgcaagaaaagaaatctacaggaagactctcagctcgccggtgatcgagtggcatggatgtgccaaacgcaagcgtggaggccgagccactgctcgtgccacgcagctccaccgaaggtggctcggcggcggcaaccgagtcgaagagactgctgcggctcgctgggccactggtcctgagcttcatcctgcggaacgccgtccagatggtgtccgtcatgtttgtcggccacctcgggaagctccccctcgccggtgcctccctggcctcgtcgctcgccaacgtcacgggcttcagcctggtcgccggcatggccggcgccctcgacacgctgtgcgggcaggcgttcggggcgcggcggtacgcgctgctgggcgtctacaagcagcgctccatgctggtgctagcgctcgccagcctccccgtcgtgctgacgtgggtgttcgtggagcagctcctcctgaccatcggcgaggacccggacatcgccgcggaggccggcgcgtacgcgcggtggctgatcccgtccctcgccgcgttcgtgcccctcacctgccacatgaggttcctgcagacgcagagcgtcgtggtgcccgtcatggccagctccggcgtcacggcgctcgcccacgtcctgctgtgctacacgctggtgtacaaggtgggcatggggagcaagggcgccgcgctcggcgccgccgtctcctacagcgtcaacttggccgtgctcgctctttacgtcaggctgtccagcgcttgcaaggcaacatggacagggttctccaccgaggccttctctttctctgggctgcgggagtacgcgaagctcgccgtcccgtcggcgatgatggtttgcttggagtggtggtcgtttgagctgctcgttcttctctctgggtttttgccaaaccctaaactcgagacttccgtcctgtcaatatgcgtcaacaccgctattctgctgtacatggtaccgctgggccttggcacatctgcaagtacacgcgtctccaatgagctcggcgcagggcagcctgaagcagcaaggctagcagcgcgagttgtggtctgcatgaccttgtgtggaggggtggtgttggcaaccatcatgattctcctgcgcaacatctggggatacgcatacagcagcgaggaggatgtggtggcatacattgccagaatgcttcccatccttgctgtttccttcttcgtcgacggccttaacggttctctttcaggggtaatcataggatgtggcaaacagaagattggagcacgcgtaaacctcggcgccttttacatggttggcattccaacagggctgttgcttgcgtttgtgttcaaactaaatggaatgggtctttggcttggcattgtgtgcggtagcatcagcaaactggcgttgctcctgtggattgcactgcgcatagattgggagagcgaagctatcaaggccaagaacagggtcctccgttcgtcagggcaaacataatgatgagggtctcctacctttgtcgcataaccatatgtcatatgtcagggatatttagtggtaaggatccgtttggcattgctgaaccacccaatctcagtctcagctctacttcaaagccttcatcatgaagttagagaaggggaaaaaaggcgtgcaactttgacgttaactccagctactgccggtcctgcttttaagggcatgcgtgtatttttatactatgttccagcaagtgtgtgtattttttatataccatctaatttttattgtctcctagtttacttttaaactacaacacgataaataaaaaagaattgagag

SEQ ID NO: 17923 - protein, 479 aa, Zea mays subsp. mays
  peptide (1)..(479): Ceres Seq. ID no. 12374669
MDVPNASVEAEPLLVPRSSTEGGSAAATESKRLLRLAGPLVLSFILRNAVQMVSVMFVGHLGKLPLAGASLASSLANVTGFSLVAGMAGALDTLCGQAFGARRYALLGVYKQRSMLVLALASLPVVLTWVFVEQLLLTIGEDPDIAAEAGAYARWLIPSLAAFVPLTCHMRFLQTQSVVVPVMASSGVTALAHVLLCYTLVYKVGMGSKGAALGAAVSYSVNLAVLALYVRLSSACKATWTGFSTEAFSFSGLREYAKLAVPSAMMVCLEWWSFELLVLLSGFLPNPKLETSVLSICVNTAILLYMVPLGLGTSASTRVSNELGAGQPEAARLAARVVVCMTLCGGVVLATIMILLRNIWGYAYSSEEDVVAYIARMLPILAVSFFVDGLNGSLSGVIIGCGKQKIGARVNLGAFYMVGIPTGLLLAFVFKLNGMGLWLGIVCGSISKLALLLWIALRIDWESEAIKAKNRVLRSSGQT

SEQ ID NO: 17924 - protein, 428 aa, Zea mays subsp. mays
  peptide (1)..(428): Ceres Seq. ID no. 12374670
MVSVMFVGHLGKLPLAGASLASSLANVTGFSLVAGMAGALDTLCGQAFGARRYALLGVYKQRSMLVLALASLPVVLTWVFVEQLLLTIGEDPDIAAEAGAYARWLIPSLAAFVPLTCHMRFLQTQSVVVPVMASSGVTALAHVLLCYTLVYKVGMGSKGAALGAAVSYSVNLAVLALYVRLSSACKATWTGFSTEAFSFSGLREYAKLAVPSAMMVCLEWWSFELLVLLSGFLPNPKLETSVLSICVNTAILLYMVPLGLGTSASTRVSNELGAGQPEAARLAARVVVCMTLCGGVVLATIMILLRNIWGYAYSSEEDVVAYIARMLPILAVSFFVDGLNGSLSGVIIGCGKQKIGARVNLGAFYMVGIPTGLLLAFVFKLNGMGLWLGIVCGSISKLALLLWIALRIDWESEAIKAKNRVLRSSGQT

SEQ ID NO: 17925 - protein, 424 aa, Zea mays subsp. mays
  peptide (1)..(424): Ceres Seq. ID no. 12374671
MFVGHLGKLPLAGASLASSLANVTGFSLVAGMAGALDTLCGQAFGARRYALLGVYKQRSMLVLALASLPVVLTWVFVEQLLLTIGEDPDIAAEAGAYARWLIPSLAAFVPLTCHMRFLQTQSVVVPVMASSGVTALAHVLLCYTLVYKVGMGSKGAALGAAVSYSVNLAVLALYVRLSSACKATWTGFSTEAFSFSGLREYAKLAVPSAMMVCLEWWSFELLVLLSGFLPNPKLETSVLSICVNTAILLYMVPLGLGTSASTRVSNELGAGQPEAARLAARVVVCMTLCGGVVLATIMILLRNIWGYAYSSEEDVVAYIARMLPILAVSFFVDGLNGSLSGVIIGCGKQKIGARVNLGAFYMVGIPTGLLLAFVFKLNGMGLWLGIVCGSISKLALLLWIALRIDWESEAIKAKNRVLRSSGQT

SEQ ID NO: 17926 - DNA, 2125 bp, Zea mays subsp. mays
  misc_feature (1)..(2125): Ceres Seq. ID no. 12383484
  misc_feature (1)..(2125): Ortholog of  Ceres SEQ ID NO 14313167 as cited in SEQ ID NO 54354
  misc_feature (1)..(2125): Ortholog of  Ceres SEQ ID NO 13596100 as cited in SEQ ID NO 68573
cgcaattaaccctcactaaagggaacaaaagctggagctccaccgcggtggcggccgctctagaactagtggatcccccgggctgcaggaattcgcacgagaccattacctagaacatcctaatcgaaaaactcgatcgtcgtgcacgcccccccaccggccggatcgacagcaccgatcaccctgaccgtctgcgcgcggcggctctcactccggtgacacgcagggcgcgcataggcgagggcctccccccccggcgagggatggtgtggtcggctgggatggcaacaatgcgaggcgcctccgccgccgcgctactggtgctggcgctcgccgccgccgtggcgcgcgcggaggacccctaccacttcttcgagtggaaggtgacgtacgggacgaggaccatcatggggacggcgcagcaggtgatcctcatcaacgacatgttcccgggccctaccatcaactgctcatccaacaacaacatcctcgtcaacgtcttcaacatgctcgaccagccgctcctcttcacctggcacgggatccagcagaggaagaactcgtggcaggacggcatgccgggcaccatgtgcccgatccagcccaacaccaacttcacgtaccactggcagcccaaggaccagatcggcagcttcttctactaccccagcaccggcatgcagcgggcggcgggcgcctacgggctgatcagcgtccacagccgtgacctgatcccggtgcccttcgacacgccggccgacgacttcccggtgctcatcggcgactggtacaccaaggaccacgccgtgctggccaagaacctggacgccggcaaggggatcgggcggccggcggggctggtgatcaacggcaagaacgagaaggacgcgtcgaacccgcccatgtacaacgtggaggccggcaagacgtaccggttccgcgtgtgcaacgtgggcatcaaggcgtccttcaacgtccgcatccaggaccacatcatgaagctggtggagatggaggggtcccacaccatgcagaacgactacgactcgctggacctccacatcgggcagtgcctgtcgttcctggtgaccgcggaccagaagcccggcgactacctgctggtggcgtccacccggttcatcaaggagaagagcagcaccacggccgtgatccgctacaagggctccagcgccccgccgccggccaagctgccggagggccccagcgggtgggcgtggtccatcaaccagtgcaggtccttccgctggaacctgacggccagcgcggcgcggcccaacccgcaggggtcgtaccactacggccagatcaacatcacccgcaccatcaagctcgccatgggccgcggcaaggtcgacggcaaggagaggttcggcttcaacggcgtgtcgcacgtggacccggaaacccccgtgaagctcgccgagtacttcaacgccagcgacggcgtgttcaagtacaacctcatcggggacgtgccgccctccaacacggcccccaccaagatggcacccaacgtcatcagcgccgagttccgcacgttcattgaggtggtcttcgagaaccccgagaagagcatcgacaccatccacatcgacggctacgccttcttcgccgtcggcatggggcccggcaaatggacggcagcgtcgcggagtacgtacaacctcctggacacggtgagccggcacacgatccaggtgtacccaaggtcgtggacggcggtgatgatgacgttcgacaacgcgggcatgtggagcgtccgctccaacatctgggagaggcagtacctcggcgagcagctgtacgtgagcgtcatctcgccggagcggtcgctcagggacgagtacaacatgccggagaccagcctccgctgcggcaaggtcgtcggcctgccgatgccaccgtcctaccgcgccgtctagagcgtcgaccgatcgcgcacggtgctgtacacaactaaaggagagcgagaggggactttttctcgcgtttccttctctagccagccttgtctgtccccccctcgtttattctctctctcttttttttcgttcgcttccgaggaataatacccaaacaaaaaaaacaaaggggctcaagactc

SEQ ID NO: 17927 - protein, 559 aa, Zea mays subsp. mays
  peptide (1)..(559): Ceres Seq. ID no. 12383485
MVWSAGMATMRGASAAALLVLALAAAVARAEDPYHFFEWKVTYGTRTIMGTAQQVILINDMFPGPTINCSSNNNILVNVFNMLDQPLLFTWHGIQQRKNSWQDGMPGTMCPIQPNTNFTYHWQPKDQIGSFFYYPSTGMQRAAGAYGLISVHSRDLIPVPFDTPADDFPVLIGDWYTKDHAVLAKNLDAGKGIGRPAGLVINGKNEKDASNPPMYNVEAGKTYRFRVCNVGIKASFNVRIQDHIMKLVEMEGSHTMQNDYDSLDLHIGQCLSFLVTADQKPGDYLLVASTRFIKEKSSTTAVIRYKGSSAPPPAKLPEGPSGWAWSINQCRSFRWNLTASAARPNPQGSYHYGQINITRTIKLAMGRGKVDGKERFGFNGVSHVDPETPVKLAEYFNASDGVFKYNLIGDVPPSNTAPTKMAPNVISAEFRTFIEVVFENPEKSIDTIHIDGYAFFAVGMGPGKWTAASRSTYNLLDTVSRHTIQVYPRSWTAVMMTFDNAGMWSVRSNIWERQYLGEQLYVSVISPERSLRDEYNMPETSLRCGKVVGLPMPPSYRAV

SEQ ID NO: 17928 - protein, 553 aa, Zea mays subsp. mays
  peptide (1)..(553): Ceres Seq. ID no. 12383486
MATMRGASAAALLVLALAAAVARAEDPYHFFEWKVTYGTRTIMGTAQQVILINDMFPGPTINCSSNNNILVNVFNMLDQPLLFTWHGIQQRKNSWQDGMPGTMCPIQPNTNFTYHWQPKDQIGSFFYYPSTGMQRAAGAYGLISVHSRDLIPVPFDTPADDFPVLIGDWYTKDHAVLAKNLDAGKGIGRPAGLVINGKNEKDASNPPMYNVEAGKTYRFRVCNVGIKASFNVRIQDHIMKLVEMEGSHTMQNDYDSLDLHIGQCLSFLVTADQKPGDYLLVASTRFIKEKSSTTAVIRYKGSSAPPPAKLPEGPSGWAWSINQCRSFRWNLTASAARPNPQGSYHYGQINITRTIKLAMGRGKVDGKERFGFNGVSHVDPETPVKLAEYFNASDGVFKYNLIGDVPPSNTAPTKMAPNVISAEFRTFIEVVFENPEKSIDTIHIDGYAFFAVGMGPGKWTAASRSTYNLLDTVSRHTIQVYPRSWTAVMMTFDNAGMWSVRSNIWERQYLGEQLYVSVISPERSLRDEYNMPETSLRCGKVVGLPMPPSYRAV

SEQ ID NO: 17929 - protein, 550 aa, Zea mays subsp. mays
  peptide (1)..(550): Ceres Seq. ID no. 12383487
MRGASAAALLVLALAAAVARAEDPYHFFEWKVTYGTRTIMGTAQQVILINDMFPGPTINCSSNNNILVNVFNMLDQPLLFTWHGIQQRKNSWQDGMPGTMCPIQPNTNFTYHWQPKDQIGSFFYYPSTGMQRAAGAYGLISVHSRDLIPVPFDTPADDFPVLIGDWYTKDHAVLAKNLDAGKGIGRPAGLVINGKNEKDASNPPMYNVEAGKTYRFRVCNVGIKASFNVRIQDHIMKLVEMEGSHTMQNDYDSLDLHIGQCLSFLVTADQKPGDYLLVASTRFIKEKSSTTAVIRYKGSSAPPPAKLPEGPSGWAWSINQCRSFRWNLTASAARPNPQGSYHYGQINITRTIKLAMGRGKVDGKERFGFNGVSHVDPETPVKLAEYFNASDGVFKYNLIGDVPPSNTAPTKMAPNVISAEFRTFIEVVFENPEKSIDTIHIDGYAFFAVGMGPGKWTAASRSTYNLLDTVSRHTIQVYPRSWTAVMMTFDNAGMWSVRSNIWERQYLGEQLYVSVISPERSLRDEYNMPETSLRCGKVVGLPMPPSYRAV

SEQ ID NO: 17930 - DNA, 470 bp, Zea mays subsp. mays
  misc_feature (1)..(470): Ceres Seq. ID no. 2790787
  misc_feature (1)..(470): Ortholog of  Ceres SEQ ID NO 12618461 as cited in SEQ ID NO 64349
cagggtaaatggaaggcacctatgattgacaacccagatttcaaggatgatccgtacatttatgcatttgacagcctgaaatacattggcattgagctgtggcaggttaaatcaggcactttgtttgacaacatcatcatcactgatgatcctgcgttggccaagacttttgcagaggagacatggggcaagcacaaggaggcagagaagactgctttcgatgaggctgagaaaaagaaggaagaagaggaagccgccaagggtggcgatgatgacgatgatgacctagaggatgaggcagacgatgacaaggcagacgatgacaaggccgactctgatgccgaggatgacaaggactctgaggagcacgacgagctctagatgatgagtatgatagaggtggccactgacattggtgccgttggcctggatttatcagctcttccattttgttctccttttctgttatc

SEQ ID NO: 17931 - protein, 126 aa, Zea mays subsp. mays
  peptide (1)..(126): Ceres Seq. ID no. 2790788
QGKWKAPMIDNPDFKDDPYIYAFDSLKYIGIELWQVKSGTLFDNIIITDDPALAKTFAEETWGKHKEAEKTAFDEAEKKKEEEEAAKGGDDDDDDLEDEADDDKADDDKADSDAEDDKDSEEHDEL

SEQ ID NO: 17932 - protein, 119 aa, Zea mays subsp. mays
  peptide (1)..(119): Ceres Seq. ID no. 2790789
MIDNPDFKDDPYIYAFDSLKYIGIELWQVKSGTLFDNIIITDDPALAKTFAEETWGKHKEAEKTAFDEAEKKKEEEEAAKGGDDDDDDLEDEADDDKADDDKADSDAEDDKDSEEHDEL

SEQ ID NO: 17933 - DNA, 1538 bp, Zea mays subsp. mays
  misc_feature (1)..(1538): Ceres Seq. ID no. 12415228
  misc_feature (1)..(1538): Ortholog of  Ceres SEQ ID NO 14307813 as cited in SEQ ID NO 54282
cgagaccattacctagaacatcctaatcgaaaaaagcagcccaaagcctcaaacccaatgcgaggcccttgggccagcagcgccttatcacttcgcctccgtctccgtggcgcgcgcgctcgcacgaacacgagtcccatgtcgtccaccgcagcgcgcgtcgtccacccggctgccgcggcgccgccgcctccccgcccacgccgcctggcgcccgcgaggtgcgcggctggatccgcgacggacacggccaccgcgggtccgacaagggtgacgaccgtcagcaaccgcggggactccttggcgatatgccgggtgctcaacggcatgtggcagaccagcggagggtggggccgcatagaccgcgacgccgcggttgacgccatgctcgcgcacgccgacgccggactctccaccttcgatatggctgaccactatgggccagcagaggatttgtatggcatgttcatcaacagaattaggagggagcgcccacctgagtttcttgaagaagtcaaggggcttacaaagtgggtaccacccccggttaagatgacaagaagttatgttgaggataatatcaacagatccaggaagaggatggatgttactgcattggacatgttgcagttccactggtgggagtactcaaatccaggctacttggatgcgctaaagcacatcacagacctgaaggaggaaggcaagataaagactgtggccctaacaaacttcgatacagacagactgcaaataattctcgaaaatggaatcccagttgtgagcaaccaggttcaacattctatcgttgatatgcgccctcagcagagaatggcagagctttgccagctaactggagttagacttataacgtatggcacagtgatgggtggtcttttgtctgaaaagtttctcgacaccaatgtatcaataccttttgctggtcctcctctaaataccccatccttgcagaaatataagaggatggttgatgcttggggtggctggagcctgttccagactttgcttcaaaccttaaagaaggtgtcactgaaacacggtgttactatttcaacggttgctgtgaaatacatactgaaccagacgtctgttgcaggttccatggtcggtgtgagattgggactctctgaacacatcaaagacaccaacgccatattctcacttgaattggatgaagaggacatgaacatcatcactgaagtgtcgaagaggggcagaaatttgatcgatattattggggattgtggtgacgagtaccgagcttagttggccatgctgctgctgggctactacagacctatatactcgtgcccaattttgcncagctctaaatttttgcctatttgggtctagcggctcagcgcactgttgaggcaaccatatacctgaatgcctattattcaggcgctagcatgtaccctccagtcctcaacagccagttataaaactgtaaatacacagcgatgcagatcgctaatgtggtaacttgttcagtcctttttagcgattactgtccc

SEQ ID NO: 17934 - protein, 428 aa, Zea mays subsp. mays
  peptide (1)..(428): Ceres Seq. ID no. 12415229
RDHYLEHPNRKKQPKASNPMRGPWASSALSLRLRLRGARARTNTSPMSSTAARVVHPAAAAPPPPRPRRLAPARCAAGSATDTATAGPTRVTTVSNRGDSLAICRVLNGMWQTSGGWGRIDRDAAVDAMLAHADAGLSTFDMADHYGPAEDLYGMFINRIRRERPPEFLEEVKGLTKWVPPPVKMTRSYVEDNINRSRKRMDVTALDMLQFHWWEYSNPGYLDALKHITDLKEEGKIKTVALTNFDTDRLQIILENGIPVVSNQVQHSIVDMRPQQRMAELCQLTGVRLITYGTVMGGLLSEKFLDTNVSIPFAGPPLNTPSLQKYKRMVDAWGGWSLFQTLLQTLKKVSLKHGVTISTVAVKYILNQTSVAGSMVGVRLGLSEHIKDTNAIFSLELDEEDMNIITEVSKRGRNLIDIIGDCGDEYRA

SEQ ID NO: 17935 - protein, 409 aa, Zea mays subsp. mays
  peptide (1)..(409): Ceres Seq. ID no. 12415230
MRGPWASSALSLRLRLRGARARTNTSPMSSTAARVVHPAAAAPPPPRPRRLAPARCAAGSATDTATAGPTRVTTVSNRGDSLAICRVLNGMWQTSGGWGRIDRDAAVDAMLAHADAGLSTFDMADHYGPAEDLYGMFINRIRRERPPEFLEEVKGLTKWVPPPVKMTRSYVEDNINRSRKRMDVTALDMLQFHWWEYSNPGYLDALKHITDLKEEGKIKTVALTNFDTDRLQIILENGIPVVSNQVQHSIVDMRPQQRMAELCQLTGVRLITYGTVMGGLLSEKFLDTNVSIPFAGPPLNTPSLQKYKRMVDAWGGWSLFQTLLQTLKKVSLKHGVTISTVAVKYILNQTSVAGSMVGVRLGLSEHIKDTNAIFSLELDEEDMNIITEVSKRGRNLIDIIGDCGDEYRA

SEQ ID NO: 17936 - protein, 382 aa, Zea mays subsp. mays
  peptide (1)..(382): Ceres Seq. ID no. 12415231
MSSTAARVVHPAAAAPPPPRPRRLAPARCAAGSATDTATAGPTRVTTVSNRGDSLAICRVLNGMWQTSGGWGRIDRDAAVDAMLAHADAGLSTFDMADHYGPAEDLYGMFINRIRRERPPEFLEEVKGLTKWVPPPVKMTRSYVEDNINRSRKRMDVTALDMLQFHWWEYSNPGYLDALKHITDLKEEGKIKTVALTNFDTDRLQIILENGIPVVSNQVQHSIVDMRPQQRMAELCQLTGVRLITYGTVMGGLLSEKFLDTNVSIPFAGPPLNTPSLQKYKRMVDAWGGWSLFQTLLQTLKKVSLKHGVTISTVAVKYILNQTSVAGSMVGVRLGLSEHIKDTNAIFSLELDEEDMNIITEVSKRGRNLIDIIGDCGDEYRA

SEQ ID NO: 17937 - DNA, 476 bp, Zea mays subsp. mays
  misc_feature (1)..(476): Ceres Seq. ID no. 1681819
  misc_feature (1)..(476): Ortholog of  Ceres SEQ ID NO 13596388 as cited in SEQ ID NO 62129
acataccggcacgggctcaaggctctggctcgcgcacccctggtccctgttccgcaccgcaccgcacacctagacgcacctccagctgcagcgcgccatacttgaccgcatcagcatggcatccacggggacgacatcggcggtgccggaggtgaccctgcggtcgggcaacgggaagccgatgccgatggtgggcatgggcacggcgtcgttccccgtggtgcacgaggccgtcagggacgccgtgctggcggccatcggggtggggttccgccacttcgacacggccttcctgtacggcaccgagaagccgctcggcgacgccgtggccgaggcgctgcggcgcggcctcctgcggtcccgggaggagctcttcgtcacgtccaagctgtggtgctcgcagacccacgcggacctcgtgctgccgtccctgcgggaaactctcaagaacctgcagatggagtacgtggacctgt

SEQ ID NO: 17938 - protein, 120 aa, Zea mays subsp. mays
  peptide (1)..(120): Ceres Seq. ID no. 1681820
MASTGTTSAVPEVTLRSGNGKPMPMVGMGTASFPVVHEAVRDAVLAAIGVGFRHFDTAFLYGTEKPLGDAVAEALRRGLLRSREELFVTSKLWCSQTHADLVLPSLRETLKNLQMEYVDL

SEQ ID NO: 17939 - protein, 98 aa, Zea mays subsp. mays
  peptide (1)..(98): Ceres Seq. ID no. 1681821
MPMVGMGTASFPVVHEAVRDAVLAAIGVGFRHFDTAFLYGTEKPLGDAVAEALRRGLLRSREELFVTSKLWCSQTHADLVLPSLRETLKNLQMEYVDL

SEQ ID NO: 17940 - protein, 96 aa, Zea mays subsp. mays
  peptide (1)..(96): Ceres Seq. ID no. 1681822
MVGMGTASFPVVHEAVRDAVLAAIGVGFRHFDTAFLYGTEKPLGDAVAEALRRGLLRSREELFVTSKLWCSQTHADLVLPSLRETLKNLQMEYVDL

SEQ ID NO: 17941 - DNA, 1103 bp, Zea mays subsp. mays
  misc_feature (1)..(1103): Ceres Seq. ID no. 12362920
  misc_feature (1)..(1103): Ortholog of  Ceres SEQ ID NO 14311511 as cited in SEQ ID NO 51444
  misc_feature (1)..(1103): Ortholog of  Ceres SEQ ID NO 13654854 as cited in SEQ ID NO 62466
  misc_feature (1)..(1103): Ortholog of  Ceres SEQ ID NO 13565116 as cited in SEQ ID NO 0
gcacgagaccattacctagaacatcctaatcgaaaaagaccagaccaccccacttaccaaccagagcgacaagcccgaccgcccgcttccttgcaaacgaaacaaaacaaaacaatggcgacagcgagtgagatcgcggcggtgggcgtaataggcgcggggcagatgggctcgggcatcgcccagctcgccgccggcggcggctgtgccgtacttctcctcgacgccgaccccactgccctctcccgtgccgtcgtctccatctccgcctccctacggcgcctcgccgccaagggccagctctcccaggccgcgtgcgaggactcaataaagcggataaggtgcgtctccgccgtgcaggatctcagggacgcggatcttgtgatcgaggccgtcgtggagaacgaagacgtcaagaagaagctattcgtggagctggataaggtcacgaagccctcggccatcctcgcctccaacacgagctccatctccgtaacccgcctggcttcagctaccaaacgcccctctcaggtgataggcatgcatttcttcaaccctcctccggtaatgaaactgatcgaggttatccgaggagccgatacgtcagatgaggtgtttgctgctgtcagatctttctccgaaaggctcgggaagtccgttatatgctcgcaagattacccaggattcatcgtgaaccgcatcctcatgccgatgatcaacgaggccttctgggctctgtacaccggagtggcaaccaaagaggacatcgacgcagggatgaagctgggcacgaaccacccgatgggcccgctgcagctcgccgacttcatcggcctggacgtctgcctctccgtacttcgggtactccacagcggtctgggagataacaagtacagcccctgccctctcctcgtccagtacgtcgatgctggccggcttgggaagaagcgtggagtaggcgtgtattcgtatgggcacaggccttcgtccgtcaggccaaagtcgtctctgtagacgtgagagcaaactgttgggcgaataaaaccaggtgcgtgttgcaattgcacgtcagagaaaaagggagcacagcctagttcagaggt

SEQ ID NO: 17942 - protein, 337 aa, Zea mays subsp. mays
  peptide (1)..(337): Ceres Seq. ID no. 12362921
ARDHYLEHPNRKRPDHPTYQPERQARPPASLQTKQNKTMATASEIAAVGVIGAGQMGSGIAQLAAGGGCAVLLLDADPTALSRAVVSISASLRRLAAKGQLSQAACEDSIKRIRCVSAVQDLRDADLVIEAVVENEDVKKKLFVELDKVTKPSAILASNTSSISVTRLASATKRPSQVIGMHFFNPPPVMKLIEVIRGADTSDEVFAAVRSFSERLGKSVICSQDYPGFIVNRILMPMINEAFWALYTGVATKEDIDAGMKLGTNHPMGPLQLADFIGLDVCLSVLRVLHSGLGDNKYSPCPLLVQYVDAGRLGKKRGVGVYSYGHRPSSVRPKSSL

SEQ ID NO: 17943 - protein, 299 aa, Zea mays subsp. mays
  peptide (1)..(299): Ceres Seq. ID no. 12362922
MATASEIAAVGVIGAGQMGSGIAQLAAGGGCAVLLLDADPTALSRAVVSISASLRRLAAKGQLSQAACEDSIKRIRCVSAVQDLRDADLVIEAVVENEDVKKKLFVELDKVTKPSAILASNTSSISVTRLASATKRPSQVIGMHFFNPPPVMKLIEVIRGADTSDEVFAAVRSFSERLGKSVICSQDYPGFIVNRILMPMINEAFWALYTGVATKEDIDAGMKLGTNHPMGPLQLADFIGLDVCLSVLRVLHSGLGDNKYSPCPLLVQYVDAGRLGKKRGVGVYSYGHRPSSVRPKSSL

SEQ ID NO: 17944 - protein, 282 aa, Zea mays subsp. mays
  peptide (1)..(282): Ceres Seq. ID no. 12362923
MGSGIAQLAAGGGCAVLLLDADPTALSRAVVSISASLRRLAAKGQLSQAACEDSIKRIRCVSAVQDLRDADLVIEAVVENEDVKKKLFVELDKVTKPSAILASNTSSISVTRLASATKRPSQVIGMHFFNPPPVMKLIEVIRGADTSDEVFAAVRSFSERLGKSVICSQDYPGFIVNRILMPMINEAFWALYTGVATKEDIDAGMKLGTNHPMGPLQLADFIGLDVCLSVLRVLHSGLGDNKYSPCPLLVQYVDAGRLGKKRGVGVYSYGHRPSSVRPKSSL

SEQ ID NO: 17945 - DNA, 562 bp, Zea mays subsp. mays
  misc_feature (1)..(562): Ceres Seq. ID no. 12337588
  misc_feature (1)..(562): Ortholog of  Ceres SEQ ID NO 12598859 as cited in SEQ ID NO 62872
  misc_feature (1)..(562): Ortholog of  Ceres SEQ ID NO 12617350 as cited in SEQ ID NO 63777
  misc_feature (1)..(562): Ortholog of  Ceres SEQ ID NO 15176153 as cited in SEQ ID NO 0
  misc_feature (1)..(562): Ortholog of  Ceres SEQ ID NO 15179157 as cited in SEQ ID NO 0
cacaaagcacaaacaacgccactcctgcacggctccgacgccggggccggggccgcctacgtctgggtcggcaacgccgaaacgcagtgccccgggcagtgcgcgtggccgttccaccagccgctgtacgggccccaggcgccggcgctcgtgccgccgagcggcgacgtcggcatggatggcatggtggtcaacatcgccagcatggtcgccggcgcggtcaccaacccgttccgcgacgggttctaccagggcgacaaggacgcgccgctagaggccgccaccgcctgcacgggggtctacggcagcggcgcctaccccggtttcgcaggcaacctggcggtggacggcacgacgggggcgagctacaatgccaatggtgccaacgggaggaagtacctgcttcccgctctattcgaccctgcaacctttacgtgttcgactttggtttaacgcccaaggaaacagtcctgtcaactgtgtagtaacgctgtgtatatagtatgagagtttgataaggagtgtactgtggttagtgttgatatctgcatcataatacgat

SEQ ID NO: 17946 - protein, 160 aa, Zea mays subsp. mays
  peptide (1)..(160): Ceres Seq. ID no. 12337589
QSTNNATPARLRRRGRGRLRLGRQRRNAVPRAVRVAVPPAAVRAPGAGARAAERRRRHGWHGGQHRQHGRRRGHQPVPRRVLPGRQGRAARGRHRLHGGLRQRRLPRFRRQPGGGRHDGGELQCQWCQREEVPASRSIRPCNLYVFDFGLTPKETVLSTV

SEQ ID NO: 17947 - protein, 150 aa, Zea mays subsp. mays
  peptide (1)..(150): Ceres Seq. ID no. 12337590
HKAQTTPLLHGSDAGAGAAYVWVGNAETQCPGQCAWPFHQPLYGPQAPALVPPSGDVGMDGMVVNIASMVAGAVTNPFRDGFYQGDKDAPLEAATACTGVYGSGAYPGFAGNLAVDGTTGASYNANGANGRKYLLPALFDPATFTCSTLV

SEQ ID NO: 17948 - protein, 92 aa, Zea mays subsp. mays
  peptide (1)..(92): Ceres Seq. ID no. 12337591
MDGMVVNIASMVAGAVTNPFRDGFYQGDKDAPLEAATACTGVYGSGAYPGFAGNLAVDGTTGASYNANGANGRKYLLPALFDPATFTCSTLV

SEQ ID NO: 17949 - DNA, 980 bp, Zea mays subsp. mays
  misc_feature (1)..(980): Ceres Seq. ID no. 12377101
  misc_feature (1)..(980): Ortholog of  Ceres SEQ ID NO 13599971 as cited in SEQ ID NO 0
cctagagatatttaacgcgcctattgatgagctccctaaggaaattgggcatctgaggtctcttcagacactgatattagtccgtactggactagacgagctgccactggctgtttgctcgcttacacggttgatgtgcctgatagccctagggttcgaaaggttgccagctgacagaatggggaacctaacgtccctggaggagctacaactacatagggtagttggccggagtgctacccaagacctagtggcagagtttggcaagctgacgaggttgagggtggtcagcatcaccttttcagagcagctagaggagagcttgcaagaagcattggtgcaatctctgtccaatctgcggcgactccaggaactagagcttttgtgtaaaatgccagagcggggaggcgatatgtggggagactgggagccaccaaggcagctccggcgcctgattattgaaggcatcgacttctcacggcagcctcgatggatcaaccgctcctgcctgccacgcctctgctccttatctctgatggtgcacgctcttgaagcacaggacctagataatctagcgaggttgccagagctccagtacctcacgctagatggtctcagctggcctccaaggtatactgttggcccagacgacttcaggaatctgaggttctgcgaagtgggcacaacgttcgagtttcgtaagggcgccatgccaaggcttgaagagctgcactttggagtttatgcagggtacagtagttgggaacagtatggtgtgccgttcgagcagttcccaacgaaggatgtgatcgaaggtcttgacttggacctggataacgtccttttacttcagcaagtgatggtcgaagttgactgcgcaggtgctactgccgcacaagtggaggaggtggaggccgtggtcatgcgtgccgtggaaaatcatgccaaccgtccaaccataaaaatggatcgagcatatg

SEQ ID NO: 17950 - protein, 326 aa, Zea mays subsp. mays
  peptide (1)..(326): Ceres Seq. ID no. 12377102
LEIFNAPIDELPKEIGHLRSLQTLILVRTGLDELPLAVCSLTRLMCLIALGFERLPADRMGNLTSLEELQLHRVVGRSATQDLVAEFGKLTRLRVVSITFSEQLEESLQEALVQSLSNLRRLQELELLCKMPERGGDMWGDWEPPRQLRRLIIEGIDFSRQPRWINRSCLPRLCSLSLMVHALEAQDLDNLARLPELQYLTLDGLSWPPRYTVGPDDFRNLRFCEVGTTFEFRKGAMPRLEELHFGVYAGYSSWEQYGVPFEQFPTKDVIEGLDLDLDNVLLLQQVMVEVDCAGATAAQVEEVEAVVMRAVENHANRPTIKMDRAY

SEQ ID NO: 17951 - protein, 282 aa, Zea mays subsp. mays
  peptide (1)..(282): Ceres Seq. ID no. 12377103
MCLIALGFERLPADRMGNLTSLEELQLHRVVGRSATQDLVAEFGKLTRLRVVSITFSEQLEESLQEALVQSLSNLRRLQELELLCKMPERGGDMWGDWEPPRQLRRLIIEGIDFSRQPRWINRSCLPRLCSLSLMVHALEAQDLDNLARLPELQYLTLDGLSWPPRYTVGPDDFRNLRFCEVGTTFEFRKGAMPRLEELHFGVYAGYSSWEQYGVPFEQFPTKDVIEGLDLDLDNVLLLQQVMVEVDCAGATAAQVEEVEAVVMRAVENHANRPTIKMDRAY

SEQ ID NO: 17952 - protein, 267 aa, Zea mays subsp. mays
  peptide (1)..(267): Ceres Seq. ID no. 12377104
MGNLTSLEELQLHRVVGRSATQDLVAEFGKLTRLRVVSITFSEQLEESLQEALVQSLSNLRRLQELELLCKMPERGGDMWGDWEPPRQLRRLIIEGIDFSRQPRWINRSCLPRLCSLSLMVHALEAQDLDNLARLPELQYLTLDGLSWPPRYTVGPDDFRNLRFCEVGTTFEFRKGAMPRLEELHFGVYAGYSSWEQYGVPFEQFPTKDVIEGLDLDLDNVLLLQQVMVEVDCAGATAAQVEEVEAVVMRAVENHANRPTIKMDRAY

SEQ ID NO: 17953 - DNA, 1214 bp, Zea mays subsp. mays
  misc_feature (1)..(1214): Ceres Seq. ID no. 12416435
  misc_feature (1)..(1214): Ortholog of  Ceres SEQ ID NO 14304689 as cited in SEQ ID NO 53265
  misc_feature (1)..(1214): Ortholog of  Ceres SEQ ID NO 14307820 as cited in SEQ ID NO 53938
  misc_feature (1)..(1214): Ortholog of  Ceres SEQ ID NO 15177137 as cited in SEQ ID NO 55030
  misc_feature (1)..(1214): Ortholog of  Ceres SEQ ID NO 14302407 as cited in SEQ ID NO 66891
  misc_feature (1)..(1214): Ortholog of  Ceres SEQ ID NO 13599557 as cited in SEQ ID NO 0
gcacgagaccattacctagaacatcctaatcgaaaaaaaaactccccagtcaaggcgcatatccattccatggatctcgcgcccctgctccttctctcccagctgctgctgcttccggtggtggcggttgtctccggcgagaccgccgcgcacccgggctacacacacgctgaggaggcatgcagcggtgtgctagaggcagaggcggagaaagcaacggtgctggtgcctgcgcccagagcggcgcgaagagttcgacggggggcggatcgtggacatcagccactactaccgcgaggacatgccggagtgggagtcatcagagggctccggcgagttcctgcagctggcgcgttccatgcgcaacggctccgacatcgctaacttctcggagctccggctcactgcgcactccggcacccacgtcgacgcgccgggacacgtcttcgagcactactacgacaccggcttcgacgtcgacaccctcgacctcgctgtcctcaacggaccagcgctgttggttgacgttcccagagataagaacatcacagctgatgttatggcatccctaaacatgcctaaaggtgttcgacgtgtactctttcggaccctaaatacagacaggatggtgcacaatggttggttgataatacagacatcaaactagttggagttgactacttgtcagtgggcgcatttgatgaatgcattccagctcatctagtatttcttgaaaaaagggaggtcatacttgtcgaagccttgaatctggagcatgttagccctggaatatacatcttgcattgcttgccactaagattgcggggtgctgaaggttctcctgcaagatgcatcctcatcaagtgacatggttataaccatcccaaaaagcattgtacaatcaatcttgaaacctacctattcagtcttttcgaagtgcttatagaagtatggttttcatgcgtgtgtttatagggatggtgtgaggacccaataatatggagctgggctagtactgatccaatcgacactaatatgagctgaagatactacataaaacatgaacaatatggagttttatatactggaccccagtccaggttttaaatccacccctgcaaggggtgaatttatgtttgtgtttgggagtgtatatttctatattgcagtttgaaaaaaactatgtatgtaataaaataagaatacatcaattc

SEQ ID NO: 17954 - protein, 130 aa, Zea mays subsp. mays
  peptide (1)..(130): Ceres Seq. ID no. 12416436
MQRCARGRGGESNGAGACAQSGAKSSTGGGSWTSATTTARTCRSGSHQRAPASSCSWRVPCATAPTSLTSRSSGSLRTPAPTSTRRDTSSSTTTTPASTSTPSTSLSSTDQRCWLTFPEIRTSQLMLWHP

SEQ ID NO: 17955 - protein, 127 aa, Zea mays subsp. mays
  peptide (1)..(127): Ceres Seq. ID no. 12416437
ARDHYLEHPNRKKNSPVKAHIHSMDLAPLLLLSQLLLLPVVAVVSGETAAHPGYTHAEEACSGVLEAEAEKATVLVPAPRAARRVRRGADRGHQPLLPRGHAGVGVIRGLRRVPAAGAFHAQRLRHR

SEQ ID NO: 17956 - protein, 121 aa, Zea mays subsp. mays
  peptide (1)..(121): Ceres Seq. ID no. 12416438
MPEWESSEGSGEFLQLARSMRNGSDIANFSELRLTAHSGTHVDAPGHVFEHYYDTGFDVDTLDLAVLNGPALLVDVPRDKNITADVMASLNMPKGVRRVLFRTLNTDRMVHNGWLIIQTSN

SEQ ID NO: 17957 - DNA, 1032 bp, Zea mays subsp. mays
  misc_feature (1)..(1032): Ceres Seq. ID no. 12359028
  misc_feature (1)..(1032): Ortholog of  Ceres SEQ ID NO 15178260 as cited in SEQ ID NO 59907
ctttacacctctacatgcctcatatctctctgtctgtccaacgatccctctcctttgtcatctccgtctccatctcccaagcaccggagaggagagctagcatgcctggatgtccacggagagggagagactcgatgagatcgggaagatcaagcgagagccggatacagccgccctcgctgtcgcttccgcatccgcctccaccgtgccggccgacaaccacatcccacgccgcctcggccacggcggtgccctcaacaccttgacgccgtgcgccgcgtgcaagctcctccgccgccgctgcgcgcaggaatgccccttcgccccttacttctcgccgcatgagccccacaaattcgccgccgtccacaaggtcttcggcgctagcaacgtctccaagatgctcttggaggtggtggagggggagagggcggacacagcgagcagcctggtgtacgaagcgaacctccggttgcgggatccggtgtacggatgcatgggcgccatctccattctccagcaacaggtgaacgcgctggaggccgagctggaggcagtgagggccgagatcctcaagcacaggtaccggcaggccaccggcaaccgtctcatggacgacgtgcgtgccacggccagcttcgtcttggctcctgcgtccgctccgatgcacgttaatgacgttgtatcagtggtggaggcaggccaagaggtcaccgccaccggcggcgcgtcgggggtgtacattgcggaagccgagcagccgtcaagtactaataactatgctcccttaacccaagtgagcatcctgcatactttggttgacaataagcatggatttatttaacattttggtgggatcacagtagtagaaagtttggatgaataaactgtgtgcaagtttaattatatatacaagttttctagaaataggttatagatgtggatatgtatattgggtgactaaaaagttcatccaatattatggaatatatgtaccattattttcttgtaatagcccattgcgtgttgttg

SEQ ID NO: 17958 - protein, 244 aa, Zea mays subsp. mays
  peptide (1)..(244): Ceres Seq. ID no. 12359029
MSTERERLDEIGKIKREPDTAALAVASASASTVPADNHIPRRLGHGGALNTLTPCAACKLLRRRCAQECPFAPYFSPHEPHKFAAVHKVFGASNVSKMLLEVVEGERADTASSLVYEANLRLRDPVYGCMGAISILQQQVNALEAELEAVRAEILKHRYRQATGNRLMDDVRATASFVLAPASAPMHVNDVVSVVEAGQEVTATGGASGVYIAEAEQPSSTNNYAPLTQVSILHTLVDNKHGFI

SEQ ID NO: 17959 - protein, 147 aa, Zea mays subsp. mays
  peptide (1)..(147): Ceres Seq. ID no. 12359030
MLLEVVEGERADTASSLVYEANLRLRDPVYGCMGAISILQQQVNALEAELEAVRAEILKHRYRQATGNRLMDDVRATASFVLAPASAPMHVNDVVSVVEAGQEVTATGGASGVYIAEAEQPSSTNNYAPLTQVSILHTLVDNKHGFI

SEQ ID NO: 17960 - DNA, 902 bp, Zea mays subsp. mays; identical to SEQ ID NO: 13266
  misc_feature (1)..(902): Ceres Seq. ID no. 12377811
  misc_feature (1)..(902): Ortholog of  Ceres SEQ ID NO 15226744 as cited in SEQ ID NO 61720

SEQ ID NO: 17961 - protein, 223 aa, Zea mays subsp. mays; identical to SEQ ID NO: 13267
  peptide (1)..(223): Ceres Seq. ID no. 12377812
  misc_feature (190)..(190): Xaa is any aa, unknown or other
  misc_feature (209)..(209): Xaa is any aa, unknown or other

SEQ ID NO: 17962 - protein, 152 aa, Zea mays subsp. mays; identical to SEQ ID NO: 13268
  peptide (1)..(152): Ceres Seq. ID no. 12377813
  misc_feature (119)..(119): Xaa is any aa, unknown or other
  misc_feature (138)..(138): Xaa is any aa, unknown or other

SEQ ID NO: 17963 - DNA, 483 bp, Zea mays subsp. mays
  misc_feature (1)..(483): Ceres Seq. ID no. 1682030
  misc_feature (1)..(483): Ortholog of  Ceres SEQ ID NO 13598513 as cited in SEQ ID NO 64102
acgacgccatggacgccgatgcccgcctcgtcatgcacgtcgtgctcagcgagtgccctgccgtcttccacggcctcgcttcgctcgtcgacgtcggcggcggccatggcacagccgcggctgccatcgccagggccttcccacacatcaagtgtaccgtcatggacctccctcacgttgtcgctgaggctcccgcgggcactggactgtgcttcctcgccggcgatatgttcgaccacatcccaccggctgacggtattctgctcaagtggattctgcatgattgggatgatgcgaagtgcattaagataatggaacggtgcaaggaagcaattggtggcaaagaaaggggagggaaagtcattataatcgacaccgtgattggatctaggccaaacgaggaagatatgatacgcagggaggctcaagtcctgtgtgatctaggtatgatgacaacgtcgaatggagctgagcgagaggagc

SEQ ID NO: 17964 - protein, 160 aa, Zea mays subsp. mays
  peptide (1)..(160): Ceres Seq. ID no. 1682031
DAMDADARLVMHVVLSECPAVFHGLASLVDVGGGHGTAAAAIARAFPHIKCTVMDLPHVVAEAPAGTGLCFLAGDMFDHIPPADGILLKWILHDWDDAKCIKIMERCKEAIGGKERGGKVIIIDTVIGSRPNEEDMIRREAQVLCDLGMMTTSNGAEREE

SEQ ID NO: 17965 - protein, 158 aa, Zea mays subsp. mays
  peptide (1)..(158): Ceres Seq. ID no. 1682032
MDADARLVMHVVLSECPAVFHGLASLVDVGGGHGTAAAAIARAFPHIKCTVMDLPHVVAEAPAGTGLCFLAGDMFDHIPPADGILLKWILHDWDDAKCIKIMERCKEAIGGKERGGKVIIIDTVIGSRPNEEDMIRREAQVLCDLGMMTTSNGAEREE

SEQ ID NO: 17966 - protein, 150 aa, Zea mays subsp. mays
  peptide (1)..(150): Ceres Seq. ID no. 1682033
MHVVLSECPAVFHGLASLVDVGGGHGTAAAAIARAFPHIKCTVMDLPHVVAEAPAGTGLCFLAGDMFDHIPPADGILLKWILHDWDDAKCIKIMERCKEAIGGKERGGKVIIIDTVIGSRPNEEDMIRREAQVLCDLGMMTTSNGAEREE

SEQ ID NO: 17967 - DNA, 811 bp, Zea mays subsp. mays
  misc_feature (1)..(811): Ceres Seq. ID no. 13499210
  misc_feature (1)..(811): Ortholog of  Ceres SEQ ID NO 14316176 as cited in SEQ ID NO 57814
  misc_feature (1)..(811): Ortholog of  Ceres SEQ ID NO 13660037 as cited in SEQ ID NO 66990
atatgcctaataaaaggcataaacctggcctcaccccaccgcgagccgaaccggagcgtcaagcaaacatccgtcgatcccgattccgaccactgcgctcgcgccatcgcgccatccacccggcattgtgcgcccgagccgggctcgttggatggcgtccggaggcgccgcccgcggtcgccttgctgaggagcgcaaggcgtggcgcaagagccatcccctcggctttgtggccaagccggcgatgctgccggatggttctgtcaatctcatgctctggaactgcgtcgtccccggcaaggaaggcactgattgggaaggtggatatttcccggtcactctccatttcactgaaaattacccaagtaaccccccaacctgcaagttcccacgaaggtttttccatgtcaatgtctatgattctggggatgtatgcctgtcaatacttggtgatgcatgggcgccttctatcacagtgcggcaaattctaataggcatccaggagctgctggagaacccaaacccagcctctcccgcacaggattttgcttacgatgtttttgcagagaatatgccagaatacaagagacgcgtccgtgagcaagccaagaggtatccgtcgctcgtgtagccgtggacctctgcaacacaattgctgctaaccaagtagtcactcactttggtgtagtggaacttgttcatgacgtgcttaactatggtgtctagttagccgtacgcttgttggaactgctaaagtgcagcttattggaactgctaaaatgcccttgactacgtcttattattatggttt

SEQ ID NO: 17968 - protein, 162 aa, Zea mays subsp. mays
  peptide (1)..(162): Ceres Seq. ID no. 13499211
MPNKRHKPGLTPPRAEPERQANIRRSRFRPLRSRHRAIHPALCARAGLVGWRPEAPPAVALLRSARRGARAIPSALWPSRRCCRMVLSISCSGTASSPARKALIGKVDISRSLSISLKITQVTPQPASSHEGFSMSMSMILGMYACQYLVMHGRLLSQCGKF

SEQ ID NO: 17969 - protein, 159 aa, Zea mays subsp. mays
  peptide (1)..(159): Ceres Seq. ID no. 13499212
MASGGAARGRLAEERKAWRKSHPLGFVAKPAMLPDGSVNLMLWNCVVPGKEGTDWEGGYFPVTLHFTENYPSNPPTCKFPRRFFHVNVYDSGDVCLSILGDAWAPSITVRQILIGIQELLENPNPASPAQDFAYDVFAENMPEYKRRVREQAKRYPSLV

SEQ ID NO: 17970 - protein, 128 aa, Zea mays subsp. mays
  peptide (1)..(128): Ceres Seq. ID no. 13499213
MLPDGSVNLMLWNCVVPGKEGTDWEGGYFPVTLHFTENYPSNPPTCKFPRRFFHVNVYDSGDVCLSILGDAWAPSITVRQILIGIQELLENPNPASPAQDFAYDVFAENMPEYKRRVREQAKRYPSLV

SEQ ID NO: 17971 - DNA, 1048 bp, Zea mays subsp. mays
  misc_feature (1)..(1048): Ceres Seq. ID no. 12364326
  misc_feature (1)..(1048): Ortholog of  Ceres SEQ ID NO 14301822 as cited in SEQ ID NO 66211
gcacgagaccattacctagaacatcctaatcgaaaagctctaaactcttcctaccccgctacccgctctctcgttggacgtgacttcggaagttgccggagatgtcgtcgatggccacgaagctcttcaacaccgccgaggtggagtcgtcggacgcgcaagccctagtcgcggacatgcggaaggctatcggcaccatgaagtccctcgccgtagacttcgagagggacggaaagtccgataaggtgaagaagcttgaggagacggttctggagttggtggcttcgtacgaggactgcgcggccatggcccaggcaattaaggcagtacctggagtgtatcagtcatctgatcagccaacggatttcaaaacattgatcggggtggaggctagcaagattagggaagcgtcatcggcatcacaacagaaccacccactctttcggcagttcagggagtctgtctggaatgttcaccatgctggtcagcctatgcctggtgaggaacaggaggacattgtcatgactagcactcagatgagcatcttaaatgtcacatgcccattaactggaaagcctgtgattgaattgatgaatccagttcgctgtgtggattgcaagcatatctatgaaaaggaccctgtaatgcaatatataaggaccaaaaaaccaccgcagtgccctattgcaggctgtcctagggtcctagaaagagggaaggttatctgtgatcccttcctccttattgagatcgaagagctgcgttcatcagagaccgccgctccgaatgccacaaacatagatgactggaccgatctaaatgacgaagacgaggagtgaggaaggcccggtaaaaggataccggcagctgttattgtttaggaggatagggtttagtatgttcttcaggatacactgtcttgttggattctgtaggaggatgggttctagtatgttcaggaatcaggatgcgctcgtcttgttgggttttgcttctgatgacttcgatatgttccatggcaaatgcgactttaaagtttgggagactc

SEQ ID NO: 17972 - protein, 245 aa, Zea mays subsp. mays
  peptide (1)..(245): Ceres Seq. ID no. 12364327
MSSMATKLFNTAEVESSDAQALVADMRKAIGTMKSLAVDFERDGKSDKVKKLEETVLELVASYEDCAAMAQAIKAVPGVYQSSDQPTDFKTLIGVEASKIREASSASQQNHPLFRQFRESVWNVHHAGQPMPGEEQEDIVMTSTQMSILNVTCPLTGKPVIELMNPVRCVDCKHIYEKDPVMQYIRTKKPPQCPIAGCPRVLERGKVICDPFLLIEIEELRSSETAAPNATNIDDWTDLNDEDEE

SEQ ID NO: 17973 - protein, 242 aa, Zea mays subsp. mays
  peptide (1)..(242): Ceres Seq. ID no. 12364328
MATKLFNTAEVESSDAQALVADMRKAIGTMKSLAVDFERDGKSDKVKKLEETVLELVASYEDCAAMAQAIKAVPGVYQSSDQPTDFKTLIGVEASKIREASSASQQNHPLFRQFRESVWNVHHAGQPMPGEEQEDIVMTSTQMSILNVTCPLTGKPVIELMNPVRCVDCKHIYEKDPVMQYIRTKKPPQCPIAGCPRVLERGKVICDPFLLIEIEELRSSETAAPNATNIDDWTDLNDEDEE

SEQ ID NO: 17974 - protein, 220 aa, Zea mays subsp. mays
  peptide (1)..(220): Ceres Seq. ID no. 12364329
MRKAIGTMKSLAVDFERDGKSDKVKKLEETVLELVASYEDCAAMAQAIKAVPGVYQSSDQPTDFKTLIGVEASKIREASSASQQNHPLFRQFRESVWNVHHAGQPMPGEEQEDIVMTSTQMSILNVTCPLTGKPVIELMNPVRCVDCKHIYEKDPVMQYIRTKKPPQCPIAGCPRVLERGKVICDPFLLIEIEELRSSETAAPNATNIDDWTDLNDEDEE

SEQ ID NO: 17975 - DNA, 778 bp, Zea mays subsp. mays
  misc_feature (1)..(778): Ceres Seq. ID no. 12379700
  misc_feature (1)..(778): Ortholog of  Ceres SEQ ID NO 14316176 as cited in SEQ ID NO 57814
  misc_feature (1)..(778): Ortholog of  Ceres SEQ ID NO 13660037 as cited in SEQ ID NO 66990
accgcgagccgaaccggagcgtcaagcaaacatccgtcgatcccgattccgaccactgcgctcgcgccatcgcgccatccacccggcattgtgcgcccgagccgggctcgttggatggcgtccggaggcgccgcccgcggtcgccttgctgaggagcgcaaggcgtggcgcaagagccatcccctcggctttgtggccaagccggcgatgctgccggatggttctgtcaatctcatgctctgggactgcgtcgtccccggcaaggaaggcactgattgggaaggtggatatttcccggtcactctccatttcactgaaaattacccaagtaaccccccaacctgcaagttcccacgaaggtttttccatgtcaatgtctatgattctggggatgtatgcctgtcaatacttggtgatgcatgggcgccttctatcacagtgcggcaaattctaataggcatccaggagctgctggagaacccaaacccagcctctcccgcacaggattttgcttacgatgtttttgcagagaatatgccagaatacaagagacgcgtccgtgagcaagccaagaggtatccgtcgctcgtgtagccgtggacctctgcaacacaattgctgctaaccaagtagtcactcactttggtgtagtggaacttgttcatgacgtgcttaactatggtgtctagttagccgtacgcttgttggaactgctaaagtgcagcttattggaactgctaaaatgcccttgactacgtcttattattatggtttatct

SEQ ID NO: 17976 - protein, 197 aa, Zea mays subsp. mays
  peptide (1)..(197): Ceres Seq. ID no. 12379701
TASRTGASSKHPSIPIPTTALAPSRHPPGIVRPSRARWMASGGAARGRLAEERKAWRKSHPLGFVAKPAMLPDGSVNLMLWDCVVPGKEGTDWEGGYFPVTLHFTENYPSNPPTCKFPRRFFHVNVYDSGDVCLSILGDAWAPSITVRQILIGIQELLENPNPASPAQDFAYDVFAENMPEYKRRVREQAKRYPSLV

SEQ ID NO: 17977 - protein, 159 aa, Zea mays subsp. mays
  peptide (1)..(159): Ceres Seq. ID no. 12379702
MASGGAARGRLAEERKAWRKSHPLGFVAKPAMLPDGSVNLMLWDCVVPGKEGTDWEGGYFPVTLHFTENYPSNPPTCKFPRRFFHVNVYDSGDVCLSILGDAWAPSITVRQILIGIQELLENPNPASPAQDFAYDVFAENMPEYKRRVREQAKRYPSLV

SEQ ID NO: 17978 - protein, 150 aa, Zea mays subsp. mays
  peptide (1)..(150): Ceres Seq. ID no. 12379703
PRAEPERQANIRRSRFRPLRSRHRAIHPALCARAGLVGWRPEAPPAVALLRSARRGARAIPSALWPSRRCCRMVLSISCSGTASSPARKALIGKVDISRSLSISLKITQVTPQPASSHEGFSMSMSMILGMYACQYLVMHGRLLSQCGKF

SEQ ID NO: 17979 - DNA, 1436 bp, Zea mays subsp. mays
  misc_feature (1)..(1436): Ceres Seq. ID no. 12382811
  misc_feature (1)..(1436): Ortholog of  Ceres SEQ ID NO 13594298 as cited in SEQ ID NO 57803
  misc_feature (1)..(1436): Ortholog of  Ceres SEQ ID NO 13503476 as cited in SEQ ID NO 61978
  misc_feature (1)..(1436): Ortholog of  Ceres SEQ ID NO 12578438 as cited in SEQ ID NO 62201
  misc_feature (1)..(1436): Ortholog of  Ceres SEQ ID NO 12617675 as cited in SEQ ID NO 64656
acgccaagcgcgcaattaaccctcactaaagggaacaaaagctggagctccaccgcggtggcggccgctctagaactagtggatcccccgggctgcaggaattcgcacgagaccattacctagaacatcctaatcgaaaaaccgggctgaggaggccatcggacgcacaaggacagcagagtgcaggaccggagcggagcgaccgagagtgtgtgggagagagatggcgtccagcgcctcgtctaccctgccgctgccaacgctctcgctcgccgtgatcctgctcgcgctgtgcgcccgcggcggcgaggccaggccgccaccgccgctccacggcgtgcgcccgctcgccttcgacgaggggtacacccagatcttcggcagcgccaacctcgcgctcctccgcgacggtaggcgcgtccgcctcacgctcgacgagtccaccggagccgggttcgcgtcgcaggacgtcttcctccacggtttcttcagcgccgccatcaagctgcccgccgactacgcggcgggcgtcgtcgtcgcgttctacctgtcgaacggcgacgtgtacgagaagacgcacgacgagctggacttcgagttcctgggcaacgtgcggggccgcgagtggcgggtgcagaccaacgtgtacggcaacggcagcaccgacgccggccgggaggagcgctacgacctcccattcgaccccaccgacgacttccaccactactccatcctctggaccagcgaccgcatcactttctacgtcgacgagaccccgatccaggaggtggtgcggacggcggccatgggcgcggcgttcccgtccaagcccatgtccctgtacgccacgatctgggacggctccgcgtgggccacgctgggcggccggtaccgcgtcaactacaagtacgcgccgttcgtggccgagttcgccgacctcgccatccagggcttcgccgtcgaccccgccgccgaccacgccgtggcgtcgtgcggcgcgggcctgggcctgggcctgggcccgggcccgctcgccgtgtccgcggagcagcgctcggccatggcggcgttccggcgcgcccacacctcctactcctactgccacgaccggcggcggtaccccgtcgcgctgtcggagtgcggggccggcgcggggctcctccccggccgcatgtttggccccgacgggatgaagcagcaccggcgccacctggggcgcggcgcgcggccaccgcggcggcgcccaggacgacgacgtcatgtgatcgccggtccctggcccctcgccacgtcgcggcggcggggcggggatggttgcacgctgtggattggattggattggattgggttgggggggttgggcggggattgtccgggatggaaaagctcgcctcattgtaccattcgcgccatggaagtaggtcgtgtttattgcc

SEQ ID NO: 17980 - protein, 404 aa, Zea mays subsp. mays
  peptide (1)..(404): Ceres Seq. ID no. 12382812
MASSASSTLPLPTLSLAVILLALCARGGEARPPPPLHGVRPLAFDEGYTQIFGSANLALLRDGRRVRLTLDESTGAGFASQDVFLHGFFSAAIKLPADYAAGVVVAFYLSNGDVYEKTHDELDFEFLGNVRGREWRVQTNVYGNGSTDAGREERYDLPFDPTDDFHHYSILWTSDRITFYVDETPIQEVVRTAAMGAAFPSKPMSLYATIWDGSAWATLGGRYRVNYKYAPFVAEFADLAIQGFAVDPAADHAVASCGAGLGLGLGPGPLAVSAEQRSAMAAFRRAHTSYSYCHDRRRYPVALSECGAGAGLLPGRMFGPDGMKQHRRHLGRGARPPRRRPGRRRHVIAGPWPLATSRRRGGDGCTLWIGLDWIGLGGLGGDCPGWKSSPHCTIRAMEVGRVYC

SEQ ID NO: 17981 - protein, 210 aa, Zea mays subsp. mays
  peptide (1)..(210): Ceres Seq. ID no. 12382813
MGAAFPSKPMSLYATIWDGSAWATLGGRYRVNYKYAPFVAEFADLAIQGFAVDPAADHAVASCGAGLGLGLGPGPLAVSAEQRSAMAAFRRAHTSYSYCHDRRRYPVALSECGAGAGLLPGRMFGPDGMKQHRRHLGRGARPPRRRPGRRRHVIAGPWPLATSRRRGGDGCTLWIGLDWIGLGGLGGDCPGWKSSPHCTIRAMEVGRVYC

SEQ ID NO: 17982 - DNA, 1022 bp, Zea mays subsp. mays
  misc_feature (1)..(1022): Ceres Seq. ID no. 12416675
  misc_feature (1)..(1022): Ortholog of  Ceres SEQ ID NO 15225507 as cited in SEQ ID NO 55551
  misc_feature (1)..(1022): Ortholog of  Ceres SEQ ID NO 15225677 as cited in SEQ ID NO 0
agagaaaagtaataagaccgtgctgcgcctgcgctgcgcagctccagcaccacagcaccagagctcgatcgacctccctctccaatgccgtctttcatcgacggccccactttccgggcgctgctccggccgtccaccaacgggcgccggaccaagatctcggacagcggcggcggcggcgggggcatcttcaagatgttcaagctcatgcccatgctctcgtccgggtgcaagatggtggcgctgctgggcaagcacaacaaccgggcgctgctggccgaccacgcgacgacggtgacgctgttcgggccgcgccggggccgcgtgagcctggccatccacgaggacacgcgcgcgccgccgctgttcctcatcgagctgcccatgctgacgagcgcgctgcaccgggagatctcgtccggggcgctcaagctggcgctggagagcgacacccgcagcgcgcgccgccgcctcgtggaggagtacgtctgggccgtctactgcaacggccgcaaggccggatactccatccgcaggaaggaggcctccgacgacgagcgccacgtgctgcgcctcctgcgcggcgtgtccatgggcgccggcgtgctcccggccgcccccgagaaggagggcggcgtgcccgcggggcccgacggggagctcacgtacgtgcgcgcccgcgtcgagcgcgtcgtcggatccaaggactcggaggccttctacatgatcaaccccgaggagggcgggaacggcgccgataataacgggggcggtggaggcgccggcggcgcgccggagctgagcattttcctagtaaggatgaaatgaataaaccgtcatattattactgctacagcataaatatataaatataatagggtgctatattgttttttacacacacccttgtgccttgtttgcacacagcagatgtgttctatgaaactgtccatagatcgagtttgtaatctaactgatgtatatctccatgttagataattgattttgtgaatcgtgctgag

SEQ ID NO: 17983 - protein, 252 aa, Zea mays subsp. mays
  peptide (1)..(252): Ceres Seq. ID no. 12416676
RKVIRPCCACAAQLQHHSTRARSTSLSNAVFHRRPHFPGAAPAVHQRAPDQDLGQRRRRRGHLQDVQAHAHALVRVQDGGAAGQAQQPGAAGRPRDDGDAVRAAPGPREPGHPRGHARAAAVPHRAAHADERAAPGDLVRGAQAGAGERHPQRAPPPRGGVRLGRLLQRPQGRILHPQEGGLRRRAPRAAPPARRVHGRRRAPGRPREGGRRARGARRGAHVRARPRRARRRIQGLGGLLHDQPRGGRERRR

SEQ ID NO: 17984 - protein, 247 aa, Zea mays subsp. mays
  peptide (1)..(247): Ceres Seq. ID no. 12416677
MPSFIDGPTFRALLRPSTNGRRTKISDSGGGGGGIFKMFKLMPMLSSGCKMVALLGKHNNRALLADHATTVTLFGPRRGRVSLAIHEDTRAPPLFLIELPMLTSALHREISSGALKLALESDTRSARRRLVEEYVWAVYCNGRKAGYSIRRKEASDDERHVLRLLRGVSMGAGVLPAAPEKEGGVPAGPDGELTYVRARVERVVGSKDSEAFYMINPEEGGNGADNNGGGGGAGGAPELSIFLVRMK

SEQ ID NO: 17985 - protein, 210 aa, Zea mays subsp. mays
  peptide (1)..(210): Ceres Seq. ID no. 12416678
MFKLMPMLSSGCKMVALLGKHNNRALLADHATTVTLFGPRRGRVSLAIHEDTRAPPLFLIELPMLTSALHREISSGALKLALESDTRSARRRLVEEYVWAVYCNGRKAGYSIRRKEASDDERHVLRLLRGVSMGAGVLPAAPEKEGGVPAGPDGELTYVRARVERVVGSKDSEAFYMINPEEGGNGADNNGGGGGAGGAPELSIFLVRMK

SEQ ID NO: 17986 - DNA, 947 bp, Zea mays subsp. mays
  misc_feature (1)..(947): Ceres Seq. ID no. 12374953
  misc_feature (1)..(947): Ortholog of  Ceres SEQ ID NO 13599231 as cited in SEQ ID NO 984
aagttcggcagttccctccctccctcctcgtcacctaatccgccccgtcgccccggaagcttcaagaaggtggacggtcggagggacgggctacatggggggctgcttctggtagcttcggtcgcccgccgcgccgccgccaggatggattcaggattgtaatttcaggagatggtgaccatgggagggaattggagctaattgacgatggcaagaatgaagaaacgcctctgtcagttcttcaggtaaatgctatgagaaagttggggtcggtggaagaggtgcctgtcccgctcttcccgtccaagggtcttcggttgaagcaaaagattaaggactggttggaagggttccagaggctcccttatgtatctccatatgagaatttcagccacatcaatccgggtagtgatgtttcagagaagcgggcagtcggggtgctccatgagctgcttagtctgtttgtgacatgctctgctgagaggcgacggttacgctgcctccggcagcacctagggctgccacagaagtttcatcttgtgttcgagcggcaccctcatgtgttctacttattgttaaaggagaagacatgctttgttgtcctcaaagaggcctacatagctggagaagacactgcaattgaggcgcaccccatgttggaagtgttcaagaagtatgttgagttgatggagcagtcacgggaaatcataagacgtcgacggagcgggaagcctattgaactagagtccaaggcatgcggggatagctgagaagaaggatggggatacatgtgcaaatatgacctctataacaagaatgtggatatgtactcttggtaggagctagtttatttctcattatttgtagagaaatatttctcattatttgtagagaaatacatcaagtgctgaaacaggttggtgactatgatatttaatctgcattct

SEQ ID NO: 17987 - protein, 171 aa, Zea mays subsp. mays
  peptide (1)..(171): Ceres Seq. ID no. 12374954
MRKLGSVEEVPVPLFPSKGLRLKQKIKDWLEGFQRLPYVSPYENFSHINPGSDVSEKRAVGVLHELLSLFVTCSAERRRLRCLRQHLGLPQKFHLVFERHPHVFYLLLKEKTCFVVLKEAYIAGEDTAIEAHPMLEVFKKYVELMEQSREIIRRRRSGKPIELESKACGDS

SEQ ID NO: 17988 - DNA, 617 bp, Zea mays subsp. mays
  misc_feature (1)..(617): Ceres Seq. ID no. 12362776
  misc_feature (1)..(617): Ortholog of  Ceres SEQ ID NO 14310701 as cited in SEQ ID NO 53113
  misc_feature (1)..(617): Ortholog of  Ceres SEQ ID NO 14303079 as cited in SEQ ID NO 67486
atacactcctgaaattgctgtcagctttggtgcagggttgattggatcattggtgtatctccgcatgcttggaaccagtatagattccctagcaggtggaactggagaaactgtcaagagtgctgctgcacaaccaaggttgcttattccagtggtacttgtgatgatgtataacagatggaatcagatattagttccggattatggtttcatgcagcttgagttaataccaatgcttgttgggttttttacctataagattgctacattcgctcaagcaatccaggattctatgcctccagtcggaaatcgtgaaggttgaaaagtgtcatgttgtatataaacgaaggtggtagccatggtccctggtcagtggtcacccagatagtaaggtctgtatagaagaatctggtctggtgtcatcaccaagtagatgagatgctcgttgaggacgccatttgaaaatctcgagtgcttaactatgttctgcacaaatattttgacgaaaggtgatgttaccacattcattccatattacacgcagatcatcagtgtataaatttacggctccgaacttttaccacaacgattaattgacaaaacaattgtatgattgc

SEQ ID NO: 17989 - protein, 106 aa, Zea mays subsp. mays
  peptide (1)..(106): Ceres Seq. ID no. 12362777
YTPEIAVSFGAGLIGSLVYLRMLGTSIDSLAGGTGETVKSAAAQPRLLIPVVLVMMYNRWNQILVPDYGFMQLELIPMLVGFFTYKIATFAQAIQDSMPPVGNREG

SEQ ID NO: 17990 - protein, 85 aa, Zea mays subsp. mays
  peptide (1)..(85): Ceres Seq. ID no. 12362778
MLGTSIDSLAGGTGETVKSAAAQPRLLIPVVLVMMYNRWNQILVPDYGFMQLELIPMLVGFFTYKIATFAQAIQDSMPPVGNREG

SEQ ID NO: 17991 - DNA, 994 bp, Zea mays subsp. mays
  misc_feature (1)..(994): Ceres Seq. ID no. 12416292
  misc_feature (1)..(994): Ortholog of  Ceres SEQ ID NO 13638441 as cited in SEQ ID NO 58066
acttcggcatgcgccgggaatttgattcttctgcctaaaatagtcacgctaccttccacctccccctactactctgactctccctcgtcttcttcgctaccaagatgatggcggaggcgtggacgccggtgctgttgccggcgacggcgccctgcttctggcagcaggacacgcactcggttttgtggcggagaggagacgcgtggacggcggaggagaacaagctgttcgagaaggcactggcgcagatcgaccggaacgcgcccgacaggtgggagaaggtggcggcggtgctgccctggaagacggtcgacgacgtgaggagccagtaccacgccctcgagaaggacgtgggcgtcatcgaggccggcgggctcgtgccgttcccgcgctacagcggctcggtcccgccgccgtccgggttcgccctcgaggactggggcggcggcgaccgcgggttcaggcgcgcgcgcggctcggaggagatgcaggagcggaagaagggtgtcccctggacggaggaggagcacaagcttttcttgatggggctgaggaagtacgggagaggggactggaggaacatctcgcgcaagtacgtgacgacccggacgccgacgcaggtggccagccacgcgcagaagtacttcatccggctcagctccggcggcaaggacaagcggcggtccagcatccacgacatcaccaccgtcaacctcccaggcgacgccccgcgctcgtcgccgcccgcggccaccaccaacccctccgccggcgccctggtggtggacgtgaagcccttcgtgtgacgaggatgaagagtggcacagcctcgtcgtccagctgccagctcgcggcagctccgagcgactgcgttcatcgagaacaagacgccatgggcggcaatgcggcatccgtttcagttcagtgtacataattcggcaagtacagagcccaacaacttccacgtaaaaggtactgaataataaagcattcg

SEQ ID NO: 17992 - protein, 233 aa, Zea mays subsp. mays
  peptide (1)..(233): Ceres Seq. ID no. 12416293
MMAEAWTPVLLPATAPCFWQQDTHSVLWRRGDAWTAEENKLFEKALAQIDRNAPDRWEKVAAVLPWKTVDDVRSQYHALEKDVGVIEAGGLVPFPRYSGSVPPPSGFALEDWGGGDRGFRRARGSEEMQERKKGVPWTEEEHKLFLMGLRKYGRGDWRNISRKYVTTRTPTQVASHAQKYFIRLSSGGKDKRRSSIHDITTVNLPGDAPRSSPPAATTNPSAGALVVDVKPFV

SEQ ID NO: 17993 - protein, 232 aa, Zea mays subsp. mays
  peptide (1)..(232): Ceres Seq. ID no. 12416294
MAEAWTPVLLPATAPCFWQQDTHSVLWRRGDAWTAEENKLFEKALAQIDRNAPDRWEKVAAVLPWKTVDDVRSQYHALEKDVGVIEAGGLVPFPRYSGSVPPPSGFALEDWGGGDRGFRRARGSEEMQERKKGVPWTEEEHKLFLMGLRKYGRGDWRNISRKYVTTRTPTQVASHAQKYFIRLSSGGKDKRRSSIHDITTVNLPGDAPRSSPPAATTNPSAGALVVDVKPFV

SEQ ID NO: 17994 - DNA, 912 bp, Zea mays subsp. mays
  misc_feature (1)..(912): Ceres Seq. ID no. 12360805
  misc_feature (1)..(912): Ortholog of  Ceres SEQ ID NO 14303437 as cited in SEQ ID NO 54411
  misc_feature (1)..(912): Ortholog of  Ceres SEQ ID NO 12611816 as cited in SEQ ID NO 56754
  misc_feature (1)..(912): Ortholog of  Ceres SEQ ID NO 15170943 as cited in SEQ ID NO 59454
gcacgagaccattacctagaacatcctaatcaaaaatatattttatcagcgtgcggccacgtacacggtacacgcccccagctgcttcgaaaccaactccagaaaactcggcacagcctaggccgattcgcctgtgcctgtgcgtacgtgagctgcgaggtagatagatggctgcggtggtggaggcggcgccggctgcggagacggcggcaaaggccgtggcagaggaggaggccggcgtcaccgcgcctgggcctccggttggtggctccaactccaaggccctgatcgtcgttgacaaggtggatgataaacctttttctttgaataatatgccaaggaactccaatgatagagacattgctcttgcaacagtggaaatagagaagataaactctttgattaaagcttgggaagagaatgagaaggcaaaagcagataacaagactgctaagaaacaatctattattctttcatgggagaacacaaagaaggcaatcatagaagctgagttgaaaaagaagaaagaagaactagagaagaaaatggctgaatatgctgagaagatgaaaaacaagaaggcaatcatccataagaaggccgaggaaaagagagcgatggttatggcccagcatggtgaagaaattctcaagactgaggagatggcagctaagtaccgtgccactagggtagctccaaaaatttcttaggtgctttagagcataaggaaggtttgatttttatgctttcttatttgtgcattaaaatgccatggtgcaactttatcaacttatgtaattgttacccttcttaattgtttgtatagactactatttatggtgcacaaatgatactattggtgtataattagaccatcattgaccaaaatgaaaagcatataaatgtgaatgt

SEQ ID NO: 17995 - protein, 180 aa, Zea mays subsp. mays
  peptide (1)..(180): Ceres Seq. ID no. 12360806
MAAVVEAAPAAETAAKAVAEEEAGVTAPGPPVGGSNSKALIVVDKVDDKPFSLNNMPRNSNDRDIALATVEIEKINSLIKAWEENEKAKADNKTAKKQSIILSWENTKKAIIEAELKKKKEELEKKMAEYAEKMKNKKAIIHKKAEEKRAMVMAQHGEEILKTEEMAAKYRATRVAPKIS

SEQ ID NO: 17996 - protein, 125 aa, Zea mays subsp. mays
  peptide (1)..(125): Ceres Seq. ID no. 12360807
MPRNSNDRDIALATVEIEKINSLIKAWEENEKAKADNKTAKKQSIILSWENTKKAIIEAELKKKKEELEKKMAEYAEKMKNKKAIIHKKAEEKRAMVMAQHGEEILKTEEMAAKYRATRVAPKIS

SEQ ID NO: 17997 - protein, 95 aa, Zea mays subsp. mays
  peptide (1)..(95): Ceres Seq. ID no. 12360808
ARDHYLEHPNQKYILSACGHVHGTRPQLLRNQLQKTRHSLGRFACACAYVSCEVDRWLRWWRRRRLRRRRQRPWQRRRPASPRLGLRLVAPTPRP

SEQ ID NO: 17998 - DNA, 484 bp, Zea mays subsp. mays
  misc_feature (1)..(484): Ceres Seq. ID no. 1679849
  misc_feature (1)..(484): Ortholog of  Ceres SEQ ID NO 13597542 as cited in SEQ ID NO 64986
gacgaatcgtccatcatcttccccaactccatagtaggccagtccagaacacgagggcggcggctatgggcggacatggccacccttactcgccggcggagctgcagctgccggggttcgtgccgcagcggctgtcgcaggcccagatcgtcgcgcctttcgcgggcaccgcgtgttggccgtgctcggcgcctggctcgtctccgggagatgcggcggcagsggcggcggcagattatccaggaccgaccgcttgctcatgggctggtggctcttcaccgcgctgacccacctcgtcttcgagccacccttcctcttcaccccggacttcttcagcaaggagaacccaaactacttcgacgacctctttaaagagtacagcaaaggtgactccagatacgccgctagggacaccgccatcgtcgcgcttgaagtgataaccgtcggggctgaaaggcctgcatcgctcctcgcagtctatgcg

SEQ ID NO: 17999 - protein, 123 aa, Zea mays subsp. mays
  peptide (1)..(123): Ceres Seq. ID no. 1679850
  misc_feature (75)..(75): Xaa is any aa, unknown or other
DESSIIFPNSIVGQSRTRGRRLWADMATLTRRRSCSCRGSCRSGCRRPRSSRLSRAPRVGRARRLARLREMRRQXRRQIIQDRPLAHGLVALHRADPPRLRATLPLHPGLLQQGEPKLLRRPL

SEQ ID NO: 18000 - protein, 94 aa, Zea mays subsp. mays
  peptide (1)..(94): Ceres Seq. ID no. 1679851
  misc_feature (74)..(74): Xaa is any aa, unknown or other
RIVHHLPQLHSRPVQNTRAAAMGGHGHPYSPAELQLPGFVPQRLSQAQIVAPFAGTACWPCSAPGSSPGDAAAXAAADYPGPTACSWAGGSSPR

SEQ ID NO: 18001 - protein, 98 aa, Zea mays subsp. mays
  peptide (1)..(98): Ceres Seq. ID no. 1679852
  misc_feature (50)..(50): Xaa is any aa, unknown or other
MATLTRRRSCSCRGSCRSGCRRPRSSRLSRAPRVGRARRLARLREMRRQXRRQIIQDRPLAHGLVALHRADPPRLRATLPLHPGLLQQGEPKLLRRPL

SEQ ID NO: 18002 - DNA, 2141 bp, Zea mays subsp. mays; identical to SEQ ID NO: 17750
  misc_feature (1)..(2141): Ceres Seq. ID no. 12435299
  misc_feature (1)..(2141): Ortholog of  Ceres SEQ ID NO 13654166 as cited in SEQ ID NO 68381
  misc_feature (1)..(2141): Ortholog of  Ceres SEQ ID NO 13599720 as cited in SEQ ID NO 0

SEQ ID NO: 18003 - protein, 501 aa, Zea mays subsp. mays; identical to SEQ ID NO: 17751
  peptide (1)..(501): Ceres Seq. ID no. 12435300

SEQ ID NO: 18004 - protein, 425 aa, Zea mays subsp. mays; identical to SEQ ID NO: 17752
  peptide (1)..(425): Ceres Seq. ID no. 12435301

SEQ ID NO: 18005 - protein, 400 aa, Zea mays subsp. mays; identical to SEQ ID NO: 17753
  peptide (1)..(400): Ceres Seq. ID no. 12435302

SEQ ID NO: 18006 - DNA, 740 bp, Zea mays subsp. mays
  misc_feature (1)..(740): Ceres Seq. ID no. 12379716
  misc_feature (1)..(740): Ortholog of  Ceres SEQ ID NO 13585437 as cited in SEQ ID NO 65262
gcacgagaccattacctagaacatcctaatcaaaaaccgatcgagccaccgtacgtcccgccgaggagggaggccggagcgctgcgcagcgaacaacggaacagaggaacgatggcagcagcactgaaagatgcattcgtaaggaagcctgtgctggcaacgatccgcctcgtcctgccagccggcgcagcccgcacgggacctccagtgagcccagcgctgggcccctaccgggtgaacctgatggcgctctgcaaggagatcaacgccaggacgcagaggtacaagcccgacaccccgatacgggtcaccgtgaccgtctacagggacagcaccttccagctcgtggtgaagccgccctcggtgtcgtggctcctcaagaaggccgccgggatccagaccgccagccggttccccggccacgtcaccgccgcgtccctcaccgtccgccacgtgtacgagatcgcaggctgaagctgggtgacgacccctcctgcaagtacgcgtcgcttgaggccatgtgcaagtccgtcgtcgccacggcccgctccatggggatcgccatcgtcagagatctgtgatcgatcgagcagcgcgtttgtctagttggtgctgtaacggctaatagtgttagtgtctcttctttaaaaaaatcagccatggcaggggcaggcgcggtggccttcatagccacagtctggcggcgatgggaaacaattgtttaagatatggtatatact

SEQ ID NO: 18007 - protein, 157 aa, Zea mays subsp. mays
  peptide (1)..(157): Ceres Seq. ID no. 12379717
ARDHYLEHPNQKPIEPPYVPPRREAGALRSEQRNRGTMAAALKDAFVRKPVLATIRLVLPAGAARTGPPVSPALGPYRVNLMALCKEINARTQRYKPDTPIRVTVTVYRDSTFQLVVKPPSVSWLLKKAAGIQTASRFPGHVTAASLTVRHVYEIAG

SEQ ID NO: 18008 - protein, 120 aa, Zea mays subsp. mays
  peptide (1)..(120): Ceres Seq. ID no. 12379718
MAAALKDAFVRKPVLATIRLVLPAGAARTGPPVSPALGPYRVNLMALCKEINARTQRYKPDTPIRVTVTVYRDSTFQLVVKPPSVSWLLKKAAGIQTASRFPGHVTAASLTVRHVYEIAG

SEQ ID NO: 18009 - DNA, 1175 bp, Zea mays subsp. mays; identical to SEQ ID NO: 1897
  misc_feature (1)..(1175): Ceres Seq. ID no. 12566396
  misc_feature (1)..(1175): Ortholog of  Ceres SEQ ID NO 13598479 as cited in SEQ ID NO 60680

SEQ ID NO: 18010 - protein, 283 aa, Zea mays subsp. mays; identical to SEQ ID NO: 1898
  peptide (1)..(283): Ceres Seq. ID no. 12566397

SEQ ID NO: 18011 - protein, 215 aa, Zea mays subsp. mays; identical to SEQ ID NO: 1899
  peptide (1)..(215): Ceres Seq. ID no. 12566398

SEQ ID NO: 18012 - protein, 206 aa, Zea mays subsp. mays; identical to SEQ ID NO: 1900
  peptide (1)..(206): Ceres Seq. ID no. 12566399

SEQ ID NO: 18013 - DNA, 477 bp, Zea mays subsp. mays
  misc_feature (1)..(477): Ceres Seq. ID no. 1682393
  misc_feature (1)..(477): Ortholog of  Ceres SEQ ID NO 12634327 as cited in SEQ ID NO 0
aacgaaagcagcaggaagccggcggtgctagggctgtaggcgacccatggctccacagacgaggagagacaggttggcgggggaggcgcggccgagctcgtcggggctaacaccggcgaagccgggggcggtcgaggtgcagcgccgacgggcgggcagcggttggacgagccgtcggatctccatctacgcctcccgagtctacttcctcctcatcatgctccagatcccgctcttcagggtcccttgtagagctggcacatgcacaactcctattcaagtaacatcatctcagttggtctcaaatgatatattcccagcagctgttgtgaaggccatgctctaccctggagctaccgtgagcagcctaactaaaagcaagacatttccgagttggaatgacctgtttgacatgtacaacctgacagaagcaaaaaatgcttcttgcagtagttgatctccagcgtctagagatac

SEQ ID NO: 18014 - protein, 136 aa, Zea mays subsp. mays
  peptide (1)..(136): Ceres Seq. ID no. 1682394
MAPQTRRDRLAGEARPSSSGLTPAKPGAVEVQRRRAGSGWTSRRISIYASRVYFLLIMLQIPLFRVPCRAGTCTTPIQVTSSQLVSNDIFPAAVVKAMLYPGATVSSLTKSKTFPSWNDLFDMYNLTEAKNASCSS

SEQ ID NO: 18015 - protein, 79 aa, Zea mays subsp. mays
  peptide (1)..(79): Ceres Seq. ID no. 1682395
MLQIPLFRVPCRAGTCTTPIQVTSSQLVSNDIFPAAVVKAMLYPGATVSSLTKSKTFPSWNDLFDMYNLTEAKNASCSS

SEQ ID NO: 18016 - DNA, 697 bp, Zea mays subsp. mays
  misc_feature (1)..(697): Ceres Seq. ID no. 12359244
  misc_feature (1)..(697): Ortholog of  Ceres SEQ ID NO 13657873 as cited in SEQ ID NO 66361
tttcctaggactctatgctaacttgcgttatcaattgctatgtggagtagaccaatatatggtcaagcgcttcgatgttttgggtgtggcaatcttcttcagcagcagcaagactgatgaatattcagattggtgaggcatcaaggaggacttggcttggcgaggaagctgatccacagtactcagatcgactgttgagagcatacaagagacctgtggaggttgacgcggaccaatcaaggtggtttatatccaaggatgcaattgtatctggccttggtcttctaggtatcaagcagggtggacctgaggcaacattttctaagtctcgtcgaaagagagtcatccgcaaaaaggtcacttcaggttgagtttagtggatttggatagcaatgctggaacaattttgcttctgttccactatgccagagggaggtctacccaaattatggtaaatgagaaaaaggtatcaagtcaaccagcacgtggtctgtcggcgaagggatcaaagggtttgttactgggaagggttagttaaaaggtgccaattactattttataatttaattgcagttatttaaggtaagaaaatatgttgttttcttgtattgctgtgaggcaaatagacacgcttagtggtagttttgtaagattgttaatgtactgactttacatgagaaatggattctgcattttt

SEQ ID NO: 18017 - protein, 98 aa, Zea mays subsp. mays
  peptide (1)..(98): Ceres Seq. ID no. 12359245
MFWVWQSSSAAARLMNIQIGEASRRTWLGEEADPQYSDRLLRAYKRPVEVDADQSRWFISKDAIVSGLGLLGIKQGGPEATFSKSRRKRVIRKKVTSG

SEQ ID NO: 18018 - protein, 84 aa, Zea mays subsp. mays
  peptide (1)..(84): Ceres Seq. ID no. 12359246
MNIQIGEASRRTWLGEEADPQYSDRLLRAYKRPVEVDADQSRWFISKDAIVSGLGLLGIKQGGPEATFSKSRRKRVIRKKVTSG

SEQ ID NO: 18019 - DNA, 466 bp, Zea mays subsp. mays
  misc_feature (1)..(466): Ceres Seq. ID no. 1682458
  misc_feature (1)..(466): Ortholog of  Ceres SEQ ID NO 13595660 as cited in SEQ ID NO 56750
tagatgttccagatgaactccttgttgaaagggtggttggaaggcggcttgatcctgtaacagggaaaatatatcatttgaagtattctccgccagagaatgaagaaatcgcttcaaggcttacacaaagatttgacgatacagaagaaaaggttaagttgaggctggagacttattaccaaaatatcgagtccttgctatcaacatatgagaacattattgtcaaagtgcaaggagatgccacagtggatgctgtctttgctaagatcgacgagctgctgggttctatcctggagaagaaaaatgaaatggtttccagcacatgagcaaggtaaaaatgattgggtgcagtgcagatccgacaagttcatgtaatgcaagtcacctctcatgataggaacttctccaggggaatatatctgaagcacaggacgacacgtacaagtaatgtaagccagtctcacgt

SEQ ID NO: 18020 - protein, 107 aa, Zea mays subsp. mays
  peptide (1)..(107): Ceres Seq. ID no. 1682459
DVPDELLVERVVGRRLDPVTGKIYHLKYSPPENEEIASRLTQRFDDTEEKVKLRLETYYQNIESLLSTYENIIVKVQGDATVDAVFAKIDELLGSILEKKNEMVSST

SEQ ID NO: 18021 - protein, 55 aa, Zea mays subsp. mays
  peptide (1)..(55): Ceres Seq. ID no. 1682460
MRTLLSKCKEMPQWMLSLLRSTSCWVLSWRRKMKWFPAHEQGKNDWVQCRSDKFM

SEQ ID NO: 18022 - DNA, 1448 bp, Zea mays subsp. mays
  misc_feature (1)..(1448): Ceres Seq. ID no. 12390259
  misc_feature (1)..(1448): Ortholog of  Ceres SEQ ID NO 15170461 as cited in SEQ ID NO 52853
  misc_feature (1)..(1448): Ortholog of  Ceres SEQ ID NO 14313666 as cited in SEQ ID NO 54618
  misc_feature (1)..(1448): Ortholog of  Ceres SEQ ID NO 13595351 as cited in SEQ ID NO 55934
  misc_feature (1)..(1448): Ortholog of  Ceres SEQ ID NO 13595513 as cited in SEQ ID NO 56663
  misc_feature (1)..(1448): Ortholog of  Ceres SEQ ID NO 13639645 as cited in SEQ ID NO 57488
cgcaattaaccctcactaaagggaacaaaagctggagctccaccgcggtggcggccgctctagaactagtggatcccccgggctgcaggaattcgcacgagaccattacctagaacatcctaatcgaaaaacatacaggagttaattgttgggggatgccacactagctcctcacacatggacgatgagtggaggccggtgatggccatgctcgtcttcaacctcatctctgctgtgatgacggcgctggtgaagaaggcgctccagcaagggctcaacgccctggtcctcatcactcttcgccagttggtggccactctcttcctagcaccaatagcctacttcaaagaacggaacacaaggcctaagctcacgctagagatctttgtgtaccacttcttcagtgcagcgcttggtgcttccctgtcgcagtacagcttcttctacgggctcaagttgacaactgcgacgttcgccataacatttgccaacatggctcctgtcctcaccttcctcattgccatagctctacgggtggagtcgctcaacatgaagagcaaatcagggtctgcaaagatggtggggacgctcatgtcgctcggtggagtgctgctgctgagcctctacaagggcatggccgtgacacaccacagcagcggcactcctccgccctctcaagtacaactaggcaacgacggcgacaggaaggtctggatgctggggactgtagcgttactggccaactgcctcgtcttctccctgtggttgctgctgcaaagcaggctgacgaacaagtacccggcgctctactccagcaccgccttcatgttcttcatcagcacgctgcagacaggatcgctgacggtgacggtcgagtggcaccacgcgtcggtgtggattgtcacaaagaagctggagatggtcacgatattgtattcgggaatcatggcgtctgcagcaggcttcctgataatgacctggtgcgtccacaagaggggtccagttttcactgcagccttcatccccatcgtccagatcatggtggccatcatcgatttcttcttcctccatgagcagctataccttggcagtgttctgggatccgcgctgatgatatttggactttaccttctgttgtggggaaagaagaaggatgcaatggcggcatgctctgcaggtacgaccaaacatgacgaagaggccagcatcaacaagtagcttagtgaaataatcagcagtcagcatcatcgagtggtggcaaacacagacatgtactagtggcggcatctgcaattgtttgaagaaaagaaaatctacgatcgatccagaccccttttgccatgcatgcatgagatgtgtttccagcaacactaattaacagaactgccgatcgatgatatcacgagtttattgttcataaccacttgtcaataaaaacttttgctttt

SEQ ID NO: 18023 - protein, 346 aa, Zea mays subsp. mays
  peptide (1)..(346): Ceres Seq. ID no. 12390260
MDDEWRPVMAMLVFNLISAVMTALVKKALQQGLNALVLITLRQLVATLFLAPIAYFKERNTRPKLTLEIFVYHFFSAALGASLSQYSFFYGLKLTTATFAITFANMAPVLTFLIAIALRVESLNMKSKSGSAKMVGTLMSLGGVLLLSLYKGMAVTHHSSGTPPPSQVQLGNDGDRKVWMLGTVALLANCLVFSLWLLLQSRLTNKYPALYSSTAFMFFISTLQTGSLTVTVEWHHASVWIVTKKLEMVTILYSGIMASAAGFLIMTWCVHKRGPVFTAAFIPIVQIMVAIIDFFFLHEQLYLGSVLGSALMIFGLYLLLWGKKKDAMAACSAGTTKHDEEASINK

SEQ ID NO: 18024 - protein, 338 aa, Zea mays subsp. mays
  peptide (1)..(338): Ceres Seq. ID no. 12390261
MAMLVFNLISAVMTALVKKALQQGLNALVLITLRQLVATLFLAPIAYFKERNTRPKLTLEIFVYHFFSAALGASLSQYSFFYGLKLTTATFAITFANMAPVLTFLIAIALRVESLNMKSKSGSAKMVGTLMSLGGVLLLSLYKGMAVTHHSSGTPPPSQVQLGNDGDRKVWMLGTVALLANCLVFSLWLLLQSRLTNKYPALYSSTAFMFFISTLQTGSLTVTVEWHHASVWIVTKKLEMVTILYSGIMASAAGFLIMTWCVHKRGPVFTAAFIPIVQIMVAIIDFFFLHEQLYLGSVLGSALMIFGLYLLLWGKKKDAMAACSAGTTKHDEEASINK

SEQ ID NO: 18025 - protein, 336 aa, Zea mays subsp. mays
  peptide (1)..(336): Ceres Seq. ID no. 12390262
MLVFNLISAVMTALVKKALQQGLNALVLITLRQLVATLFLAPIAYFKERNTRPKLTLEIFVYHFFSAALGASLSQYSFFYGLKLTTATFAITFANMAPVLTFLIAIALRVESLNMKSKSGSAKMVGTLMSLGGVLLLSLYKGMAVTHHSSGTPPPSQVQLGNDGDRKVWMLGTVALLANCLVFSLWLLLQSRLTNKYPALYSSTAFMFFISTLQTGSLTVTVEWHHASVWIVTKKLEMVTILYSGIMASAAGFLIMTWCVHKRGPVFTAAFIPIVQIMVAIIDFFFLHEQLYLGSVLGSALMIFGLYLLLWGKKKDAMAACSAGTTKHDEEASINK

SEQ ID NO: 18026 - DNA, 1252 bp, Zea mays subsp. mays
  misc_feature (1)..(1252): Ceres Seq. ID no. 12383283
  misc_feature (1)..(1252): Ortholog of  Ceres SEQ ID NO 14316440 as cited in SEQ ID NO 58263
  misc_feature (1)..(1252): Ortholog of  Ceres SEQ ID NO 14302462 as cited in SEQ ID NO 65678
gcacgagaccattacctagaacatcctaatcaaaaaaatctggttcgggctcctggatcggacccgaaaaactggtgagatttgacctacagcggagatggccaccggcgacctgcgcagcctcgccaccgtcgcggccgcggtgatcgcgtgcatgggctacgcccgcttcgccgcgcggcgactccgcccgggcctgtcccgccttgcagcgttcctcccggtgctcgccgtcttgcctttcctcccgctcgccttccgtgcgctccacccgcgcggcatctccggcttcttcctcgcctgggccgccgaattcaaactcctgctcctcgcatgcggccagcgcccgctcgatccgagcctcccgctgccctccttcaccgccatcgccaccttccccgtcacactacgggatcccaagagctccgcctcgaggccgggcctggggctcgtggagtccgcctccatggccgcgctgctcgcggccatcgtgtcgctgtactggtacgaggagcggatgaacggttacgtcctgctcacgctctactccgtgcacgtgtacctcgcgctcgagctcgtcctggcggcggccgcggtggcgtcgcgcgcgctgatgggcctggaactggagccccagttcgaccggccctacctctcgtcctcgctgcgggacttctggggccggaggtggaacctctccgttccggcgctgctccgccagtgcgtgttccgccccgtgcgcgcgcgcctcggcgccgccgcgggtgtgctagctgcgttcgtcgtctcgggcctcatgcacgaggccatgttctcctacctcacgctgctgcggccgacgggggaggcggccgcgttcttcacgctgcacggggcgtgcgcggtggcggaggggtggtgggccgcgcacgaggggtggccgcggccgccgcgcgccatggccacgccgctgacactggcgttcgtgggcgtgacggccttctggctcttctttcctccgctcacaaggcccggcgcggacaagcaggccatcgcggagtgcgaggccatggtcgcttttctgcgggacaccgcagcttgggcggtcgactccgcctggtcagtcttgtcaagctggtcgtaaattgtggtccgccgtccgcaacaggcgtgcgctgcgcctgcgcctgcgcctgcgcgtgccgtgtgctttgtcgccgtggcatctgtttgcacttttgttttgggatggtgataatttcagaaatattct

SEQ ID NO: 18027 - protein, 341 aa, Zea mays subsp. mays
  peptide (1)..(341): Ceres Seq. ID no. 12383284
MATGDLRSLATVAAAVIACMGYARFAARRLRPGLSRLAAFLPVLAVLPFLPLAFRALHPRGISGFFLAWAAEFKLLLLACGQRPLDPSLPLPSFTAIATFPVTLRDPKSSASRPGLGLVESASMAALLAAIVSLYWYEERMNGYVLLTLYSVHVYLALELVLAAAAVASRALMGLELEPQFDRPYLSSSLRDFWGRRWNLSVPALLRQCVFRPVRARLGAAAGVLAAFVVSGLMHEAMFSYLTLLRPTGEAAAFFTLHGACAVAEGWWAAHEGWPRPPRAMATPLTLAFVGVTAFWLFFPPLTRPGADKQAIAECEAMVAFLRDTAAWAVDSAWSVLSSWS

SEQ ID NO: 18028 - protein, 322 aa, Zea mays subsp. mays
  peptide (1)..(322): Ceres Seq. ID no. 12383285
MGYARFAARRLRPGLSRLAAFLPVLAVLPFLPLAFRALHPRGISGFFLAWAAEFKLLLLACGQRPLDPSLPLPSFTAIATFPVTLRDPKSSASRPGLGLVESASMAALLAAIVSLYWYEERMNGYVLLTLYSVHVYLALELVLAAAAVASRALMGLELEPQFDRPYLSSSLRDFWGRRWNLSVPALLRQCVFRPVRARLGAAAGVLAAFVVSGLMHEAMFSYLTLLRPTGEAAAFFTLHGACAVAEGWWAAHEGWPRPPRAMATPLTLAFVGVTAFWLFFPPLTRPGADKQAIAECEAMVAFLRDTAAWAVDSAWSVLSSWS

SEQ ID NO: 18029 - protein, 306 aa, Zea mays subsp. mays
  peptide (1)..(306): Ceres Seq. ID no. 12383286
MRPAPARSEPPAALLHRHRHLPRHTTGSQELRLEAGPGARGVRLHGRAARGHRVAVLVRGADERLRPAHALLRARVPRARARPGGGRGGVARADGPGTGAPVRPALPLVLAAGLLGPEVEPLRSGAAPPVRVPPRARAPRRRRGCASCVRRLGPHARGHVLLPHAAAADGGGGRVLHAARGVRGGGGVVGRARGVAAAAARHGHAADTGVRGRDGLLALLSSAHKARRGQAGHRGVRGHGRFSAGHRSLGGRLRLVSLVKLVVNCGPPSATGVRCACACACACRVLCRRGICLHFCFGMVIISEIF

SEQ ID NO: 18030 - DNA, 696 bp, Zea mays subsp. mays
  misc_feature (1)..(696): Ceres Seq. ID no. 12377779
  misc_feature (1)..(696): Ortholog of  Ceres SEQ ID NO 13638441 as cited in SEQ ID NO 58066
aaacactgtcgccgtccttctgtcgacgtacagcagatggagaactgcgaggtactcttcccgggaggcagcagcggggccaacgcgttcaccaggccagagcaggagaggaagcgcgggcagccatggacggaggaggagcacaagttgtttctcttgggcctgaagaaatatggccggggggattggaggaacatatcgcgcaattttgttcagaccaggacgcctactcaggtggtcagccatgcgcagaagtacttcatgaggcacaactccggcggcaaggacaagagaagatccagcatccacgacatcaccacagttaagctgagcgacgaccaggaccagcctccgtcctcgccatcccagtcctctctgatcactgaccagttcaacgcattagctctgacatccggcgctgcgtattcgccctccaattaacctttgcggctttgccggactactgggatatgtatatgccaatctttggaacggggtttgcaagatcaacgcctgcagtgtggcccgttcaattggatggaagctagaacattctgttttttttgggtgcaattcagtctgcagcaccatgaatctatcagatttctatctacttgtatagtacagactggagagaccgggagtgttaacaagtttgttgtatcatcttgtgtggtgtaataaacctgnaatttg

SEQ ID NO: 18031 - protein, 146 aa, Zea mays subsp. mays
  peptide (1)..(146): Ceres Seq. ID no. 12377780
KHCRRPSVDVQQMENCEVLFPGGSSGANAFTRPEQERKRGQPWTEEEHKLFLLGLKKYGRGDWRNISRNFVQTRTPTQVVSHAQKYFMRHNSGGKDKRRSSIHDITTVKLSDDQDQPPSSPSQSSLITDQFNALALTSGAAYSPSN

SEQ ID NO: 18032 - protein, 134 aa, Zea mays subsp. mays
  peptide (1)..(134): Ceres Seq. ID no. 12377781
MENCEVLFPGGSSGANAFTRPEQERKRGQPWTEEEHKLFLLGLKKYGRGDWRNISRNFVQTRTPTQVVSHAQKYFMRHNSGGKDKRRSSIHDITTVKLSDDQDQPPSSPSQSSLITDQFNALALTSGAAYSPSN

SEQ ID NO: 18033 - protein, 107 aa, Zea mays subsp. mays
  peptide (1)..(107): Ceres Seq. ID no. 12377782
TLSPSFCRRTADGELRGTLPGRQQRGQRVHQARAGEEARAAMDGGGAQVVSLGPEEIWPGGLEEHIAQFCSDQDAYSGGQPCAEVLHEAQLRRQGQEKIQHPRHHHS

SEQ ID NO: 18034 - DNA, 1079 bp, Zea mays subsp. mays
  misc_feature (1)..(1079): Ceres Seq. ID no. 14305350
  misc_feature (1)..(1079): Ortholog of  Ceres SEQ ID NO 15226493 as cited in SEQ ID NO 59078
ctatttgcggaaaggaacttctgttagtgctggccaaacatcaagttcatcaaatggaacaactgcaggagaaaggcctctcctacgtgagaaattgtcaaagggaaaggatggctttgttgctgctgatttcacagctacagaagctcattgtgctgtaccctcgactccaatactttggttccagcaggcagatgagtgcatgcacctatgcatttatcagcacaaaagtctcactatcttactgctggttcctgcttcctcagtgataaatggagaagagggcattactcatgtgaagaaggcgatccttgaaaatgcatcacagaagattgtcactgttgagcagaaattgacacggggatggggaggagaaaatgcgtatcatgttagtggatatcgttatttgcttgttgatccggagagaagagtatcaagagcctccccacctgggaaagtcaccaccctagcaaaggattctctacttgccctcaacatgctaagacaagaagtagatctagagaagtcaagatacaagagaggtgacccttgtcgtgataaggatttcgaagtatgtatcagaacaaaaaacaatgcgtgggttattgctaaaatcagtcaaggaagggagctttacatggctctagagaagggtggtgaaacgcttctatatgcatccacagctgtagagaaattcagcaacaggtactgtgagggagtattctctacagattagaagcaccagagggagatcttagcttttccatacattacctattatgtacatcctgttttttccccagctgtatcgttgccccccattgttgagagactcggaccactctttgcgaagggaataaggagttcgtatcagttgtacagctgctctgctaccgtgtgctatctgcaaaagaatagcctagtctgggaataacgcagagcgggatagagtttgtttgttcacgggtcttatgtccttccttaacgcagagcattgtgcgtgttttcattttgctgtaacagccggcgatttacctgcagactgggaaagtaacttagcgtttcatttggtattctgc

SEQ ID NO: 18035 - protein, 244 aa, Zea mays subsp. mays
  peptide (1)..(244): Ceres Seq. ID no. 14305351
YLRKGTSVSAGQTSSSSNGTTAGERPLLREKLSKGKDGFVAADFTATEAHCAVPSTPILWFQQADECMHLCIYQHKSLTILLLVPASSVINGEEGITHVKKAILENASQKIVTVEQKLTRGWGGENAYHVSGYRYLLVDPERRVSRASPPGKVTTLAKDSLLALNMLRQEVDLEKSRYKRGDPCRDKDFEVCIRTKNNAWVIAKISQGRELYMALEKGGETLLYASTAVEKFSNRYCEGVFSTD

SEQ ID NO: 18036 - protein, 177 aa, Zea mays subsp. mays
  peptide (1)..(177): Ceres Seq. ID no. 14305352
MHLCIYQHKSLTILLLVPASSVINGEEGITHVKKAILENASQKIVTVEQKLTRGWGGENAYHVSGYRYLLVDPERRVSRASPPGKVTTLAKDSLLALNMLRQEVDLEKSRYKRGDPCRDKDFEVCIRTKNNAWVIAKISQGRELYMALEKGGETLLYASTAVEKFSNRYCEGVFSTD

SEQ ID NO: 18037 - DNA, 1208 bp, Zea mays subsp. mays
  misc_feature (1)..(1208): Ceres Seq. ID no. 12416178
  misc_feature (1)..(1208): Ortholog of  Ceres SEQ ID NO 12616324 as cited in SEQ ID NO 63414
tatgctacgccaagcccgcaattaaccctcactaaagggaacaaaagctggagctccaccgcggtggcggccgctctagaactagtggatcccccgggctgcaggaattcgcacgagaccattacctagaacatcctaatcgaaaagttgcgttccagggcgagctatcgcgcagcaggcacagcgccctacaacgcccggccgtgcaaactaaccttcggatcagatggagacgccggcggcggactcctccggcggcgaccgctacaggtcccacctggctggcgagggcgagaagcacaccgtgtggcggcacggcgcgccgccctcgtacgacgccgtgaacgcgctcttcgaggccgagcgcacgcaggagtggccggcggggtcgctggaggagatcgtgcagaacgcgatcaagacgtgggagatggagctgtcgcacaaggcgcggctgtcggacttcaagtccgtgagccccggcaggttcaggctgtccgtgaacggcggtcgggcccggagcggggaggagacgctggccgtgggcagctacaacgcgctgctggacagcccgctcctggcgcgcgcgggcgcgtacgacgcctccgccgagacgttccggtcctcgcacgacctgttccgcgccgcgttcccgcgcggcttcgcctgggaggtgctcaaggtctactccggcccgccgctgctcgccttcaagttccggcactggggccacaaggaggggccctacaagggccacgccgccaccggcgacaaggtcgagttcttcggcgtcgccgtgcttaaggtggacgatgagctgcgagcggaagacgtggaggtgtactacgacccgggcgagcttttgggaggccttctcaagggacccaaggtggcttcctccgaggaggaccgccgcgaggccgctgccgtgtcggcgtcaggtgctgtcccgccgccgctagcttgcccctttctcaaccccgggaagccacagtgatcaaccagcaccccccatttatgtagcggtttggtgaataagtgaaagcttaaaatgacggtgttcctggtcgtccatggacatcactgagggtacttgtaccccattgattaattgatgtttcatgaccagaagaaattgttcgcgtaataattgtgtgatattccttcacccaaaaataaataaaaataaagcaacgcgtaattgttcc

SEQ ID NO: 18038 - protein, 256 aa, Zea mays subsp. mays
  peptide (1)..(256): Ceres Seq. ID no. 12416179
METPAADSSGGDRYRSHLAGEGEKHTVWRHGAPPSYDAVNALFEAERTQEWPAGSLEEIVQNAIKTWEMELSHKARLSDFKSVSPGRFRLSVNGGRARSGEETLAVGSYNALLDSPLLARAGAYDASAETFRSSHDLFRAAFPRGFAWEVLKVYSGPPLLAFKFRHWGHKEGPYKGHAATGDKVEFFGVAVLKVDDELRAEDVEVYYDPGELLGGLLKGPKVASSEEDRREAAAVSASGAVPPPLACPFLNPGKPQ

SEQ ID NO: 18039 - protein, 188 aa, Zea mays subsp. mays
  peptide (1)..(188): Ceres Seq. ID no. 12416180
MELSHKARLSDFKSVSPGRFRLSVNGGRARSGEETLAVGSYNALLDSPLLARAGAYDASAETFRSSHDLFRAAFPRGFAWEVLKVYSGPPLLAFKFRHWGHKEGPYKGHAATGDKVEFFGVAVLKVDDELRAEDVEVYYDPGELLGGLLKGPKVASSEEDRREAAAVSASGAVPPPLACPFLNPGKPQ

SEQ ID NO: 18040 - DNA, 738 bp, Zea mays subsp. mays
  misc_feature (1)..(738): Ceres Seq. ID no. 12369342
  misc_feature (1)..(738): Ortholog of  Ceres SEQ ID NO 12784064 as cited in SEQ ID NO 66982
catggaagttgtcgattcctccgtcgccatctggcgctccgacgagtccgggatctggagcgtcctatacgtgctcgatgtcctctggagcctgctgaccggccgcctggtgcgagagaaggtggacccggccgtgcaaagcgccgtcgacagtcagatgaacgccgcggactcgcaggacatggcgccgacactggcggacatgttcgagacgggcgccgccgacgccaagggcatgccggccgccgccgtcgcggcgctccccatcatggccttcaccgagcacaccgtcgccgacggctccggggagcccatcggctgctccgtctgccttcaggacttcgaggcaggcgagacggcgcggagcttgccggagtgcgggcacacgttccacctgccgtgcatcgacgtctggctgctccggccacgcctcgtgcccactgtgtcgtcgcgcggtctaagccggttcgcacacttttcgttaggatgtctttgggcaaccgtgagccgatgcgcgtgcacacgtgtcccagaccaggagcacagtatagtagggtagtaggagtgcaggacacctggttctttcttgcataccttgattatttttttccttcttttttctacgtcttgagcacgcatgtacagatacagtacgtggctcacattgtctcacacacactgtggatgtaaatatgtatagggtaaatgttgtaaacaatgtaatatacttgtacattg

SEQ ID NO: 18041 - protein, 229 aa, Zea mays subsp. mays
  peptide (1)..(229): Ceres Seq. ID no. 12369343
HGSCRFLRRHLALRRVRDLERPIRARCPLEPADRPPGAREGGPGRAKRRRQSDERRGLAGHGADTGGHVRDGRRRRQGHAGRRRRGAPHHGLHRAHRRRRLRGAHRLLRLPSGLRGRRDGAELAGVRAHVPPAVHRRLAAPATPRAHCVVARSKPVRTLFVRMSLGNREPMRVHTCPRPGAQYSRVVGVQDTWFFLAYLDYFFPSFFYVLSTHVQIQYVAHIVSHTLWM

SEQ ID NO: 18042 - protein, 185 aa, Zea mays subsp. mays
  peptide (1)..(185): Ceres Seq. ID no. 12369344
MEVVDSSVAIWRSDESGIWSVLYVLDVLWSLLTGRLVREKVDPAVQSAVDSQMNAADSQDMAPTLADMFETGAADAKGMPAAAVAALPIMAFTEHTVADGSGEPIGCSVCLQDFEAGETARSLPECGHTFHLPCIDVWLLRPRLVPTVSSRGLSRFAHFSLGCLWATVSRCACTRVPDQEHSIVG

SEQ ID NO: 18043 - protein, 133 aa, Zea mays subsp. mays
  peptide (1)..(133): Ceres Seq. ID no. 12369345
MNAADSQDMAPTLADMFETGAADAKGMPAAAVAALPIMAFTEHTVADGSGEPIGCSVCLQDFEAGETARSLPECGHTFHLPCIDVWLLRPRLVPTVSSRGLSRFAHFSLGCLWATVSRCACTRVPDQEHSIVG

SEQ ID NO: 18044 - DNA, 711 bp, Zea mays subsp. mays
  misc_feature (1)..(711): Ceres Seq. ID no. 12416722
  misc_feature (1)..(711): Ortholog of  Ceres SEQ ID NO 13655766 as cited in SEQ ID NO 64583
gtctggatggcccaggaacggcgcaccgtggagtccctctctgatttttggcgagcagaacatacctgagacgacaggtagaagacgactgactgcctcgagcagcagagatcagggaggccgagggcgggatgacgatccggttcgtgctgttcgtcaacaagcagggccagacgcggctggcgcagtactacgagcacctctccctcgacgagcgacgggccctcgagggcgagatcgtccgcaagtgcctcgcccgcactgaccagcagtgttcgtttgtggagcaccggaactacaaggtcgtttacagacgctacgcctcccttttcttcctcgtcggcgtcgacagcgatgagaatgagttagctatccttgaattcatacatcttctggtggaaactatggatcgccacttcggcaatgtgtgcgagctcgatatcatgttccatctggagaaagtgcacttcatgttggaagagatggtgatgaatggttgcattgtggagacaagtaaacagaacatcttggcaccaatacaacttatggagaaaacttcctaaaatagtgatatccatttgtgtagttttacatccacttcttagcacatttgcctgtctgcccctttccataaaatttccctctgtatgtgagagtgcaaaacaatctctgtaaccatggagtattgaattgacctgattgtgtgctttc

SEQ ID NO: 18045 - protein, 143 aa, Zea mays subsp. mays
  peptide (1)..(143): Ceres Seq. ID no. 12416723
MTIRFVLFVNKQGQTRLAQYYEHLSLDERRALEGEIVRKCLARTDQQCSFVEHRNYKVVYRRYASLFFLVGVDSDENELAILEFIHLLVETMDRHFGNVCELDIMFHLEKVHFMLEEMVMNGCIVETSKQNILAPIQLMEKTS

SEQ ID NO: 18046 - protein, 87 aa, Zea mays subsp. mays
  peptide (1)..(87): Ceres Seq. ID no. 12416724
SGWPRNGAPWSPSLIFGEQNIPETTGRRRLTASSSRDQGGRGRDDDPVRAVRQQAGPDAAGAVLRAPLPRRATGPRGRDRPQVPRPH

SEQ ID NO: 18047 - DNA, 758 bp, Zea mays subsp. mays
  misc_feature (1)..(758): Ceres Seq. ID no. 12416542
  misc_feature (1)..(758): Ortholog of  Ceres SEQ ID NO 14307896 as cited in SEQ ID NO 66915
atttggtatgaacgtgcttgatctggttgaatggaggaacaagaatgtgacaggcatatatcattattggcaggagcgcaatgctgatcataccctatggaagcttgggtctttaccacctggacttcttgctttctatggcttggttgaagcattggatcccaaatggcatgttttgggacttggctacacaactgttgatcttgctactatcaaggaaggggcagtactgcactacaatggaaatatgaagccatggctcaaaataggaatggagaagtacaagagcttttgggataactatgtggactattcacatcctttgattcagcagtgcttcatgcgttgattgatgtgtatcgacattataaatttttgtaagctctgtggtagatatgttccaagcgcatgctccaactgccacacggaaacattgtaattaaatcagtgggcttcgctctcaagttataatctctgacaaaacatcagtggctgtctatagtatctgtatttgatgaaatacagcaatcacatatctccagagtccagccacaggtaaacaacacatgagctaagaccgcgatgtagtaggctgctacttgaatacatccattacatacattcattacttgtgaccattgatgtaattttccattttttatttattgggtgagacaaccacagaatggagataatgtagaattgattttaaattattgacttgttacaagttttcagttatgtatccatatttattg

SEQ ID NO: 18048 - protein, 115 aa, Zea mays subsp. mays
  peptide (1)..(115): Ceres Seq. ID no. 12416543
FGMNVLDLVEWRNKNVTGIYHYWQERNADHTLWKLGSLPPGLLAFYGLVEALDPKWHVLGLGYTTVDLATIKEGAVLHYNGNMKPWLKIGMEKYKSFWDNYVDYSHPLIQQCFMR

SEQ ID NO: 18049 - protein, 113 aa, Zea mays subsp. mays
  peptide (1)..(113): Ceres Seq. ID no. 12416544
MNVLDLVEWRNKNVTGIYHYWQERNADHTLWKLGSLPPGLLAFYGLVEALDPKWHVLGLGYTTVDLATIKEGAVLHYNGNMKPWLKIGMEKYKSFWDNYVDYSHPLIQQCFMR

SEQ ID NO: 18050 - DNA, 475 bp, Zea mays subsp. mays
  misc_feature (1)..(475): Ceres Seq. ID no. 5006193
  misc_feature (1)..(475): Ortholog of  Ceres SEQ ID NO 13657914 as cited in SEQ ID NO 66230
acccacgcccccaacgccaagaacgtcgacgggcgcgacggcatggcggcggcggacccggacaccgaggtgcaggcggagttcccacccctcgtccgccagtacaaaagcggttcttcaacctggccccgctcccggccggcaccgacccggccacgggcgtcgtgtccaaggacgtcgtcgtcgacccggccaccggcctctgggcgcgcctcttcctccccgccggcagccacgggaagaagctccccgtcgtcgtctactaccatggcggcgcctacgtgatcggctcggcggccgacccgatgacgcacggctacctcaacgcgctcgtcgccaaggccggcgtcctcgcggtcgcgctcgagtaccgcctcgcgccggagcacccgctcccggccgcctacgaggactcatgggagggactcaagtgggtggccacccacgcctccgcctccgccgccgcgggaggagg

SEQ ID NO: 18051 - protein, 158 aa, Zea mays subsp. mays
  peptide (1)..(158): Ceres Seq. ID no. 5006194
PTPPTPRTSTGATAWRRRTRTPRCRRSSHPSSASTKAVLQPGPAPGRHRPGHGRRVQGRRRRPGHRPLGAPLPPRRQPREEAPRRRLLPWRRLRDRLGGRPDDARLPQRARRQGRRPRGRARVPPRAGAPAPGRLRGLMGGTQVGGHPRLRLRRRGRR

SEQ ID NO: 18052 - protein, 157 aa, Zea mays subsp. mays
  peptide (1)..(157): Ceres Seq. ID no. 5006195
PRPQRQERRRARRHGGGGPGHRGAGGVPTPRPPVQKRFFNLAPLPAGTDPATGVVSKDVVVDPATGLWARLFLPAGSHGKKLPVVVYYHGGAYVIGSAADPMTHGYLNALVAKAGVLAVALEYRLAPEHPLPAAYEDSWEGLKWVATHASASAAAGG

SEQ ID NO: 18053 - protein, 94 aa, Zea mays subsp. mays
  peptide (1)..(94): Ceres Seq. ID no. 5006196
THAPNAKNVDGRDGMAAADPDTEVQAEFPPLVRQYKSGSSTWPRSRPAPTRPRASCPRTSSSTRPPASGRASSSPPAATGRSSPSSSTTMAAPT

SEQ ID NO: 18054 - DNA, 417 bp, Zea mays subsp. mays
  misc_feature (1)..(417): Ceres Seq. ID no. 1682636
  misc_feature (1)..(417): Ortholog of  Ceres SEQ ID NO 14315067 as cited in SEQ ID NO 57249
  misc_feature (1)..(417): Ortholog of  Ceres SEQ ID NO 15173278 as cited in SEQ ID NO 58144
agtgaggagggactagggagacagggggagggaacaagccgggcgcagtcacggcatcaaacacgagccgcggcatgggcaacagcctgcggtgctgcctggcgtgcgtgctgccgtgcggcgcgctggacctggtgcggatcgtgcacctcagcggccgcgtcgacgagtacggccgcgccgtgtcggccggggaggtgctggcggcgcaccccaaccacgtgctcagctggccctgctcgtcgccgcagggggtcgtgcgcaggatcctcatcgtgtcgccggactcggagctcgagcgcggggagatctacttcctcatcccggccgcgtccgtgcccgacgccaagaagggcggcggcggggctagcacgccaggccgccacgtgcgcagcaagtccgaaggcagcgtcgtcg

SEQ ID NO: 18055 - protein, 139 aa, Zea mays subsp. mays
  peptide (1)..(139): Ceres Seq. ID no. 1682637
SEEGLGRQGEGTSRAQSRHQTRAAAWATACGAAWRACCRAARWTWCGSCTSAAASTSTAAPCRPGRCWRRTPTTCSAGPARRRRGSCAGSSSCRRTRSSSAGRSTSSSRPRPCPTPRRAAAGLARQAATCAASPKAASS

SEQ ID NO: 18056 - protein, 114 aa, Zea mays subsp. mays
  peptide (1)..(114): Ceres Seq. ID no. 1682638
MGNSLRCCLACVLPCGALDLVRIVHLSGRVDEYGRAVSAGEVLAAHPNHVLSWPCSSPQGVVRRILIVSPDSELERGEIYFLIPAASVPDAKKGGGGASTPGRHVRSKSEGSVV

SEQ ID NO: 18057 - DNA, 1019 bp, Zea mays subsp. mays
  misc_feature (1)..(1019): Ceres Seq. ID no. 13492109
  misc_feature (1)..(1019): Ortholog of  Ceres SEQ ID NO 12619664 as cited in SEQ ID NO 66048
acttcacaccatttcagcattgtaccctatgttcatgccaccatggaagggcttcgtattggagcaccgattatgcaggtttatcatgagaaatcttttatcttacctgatgtttcaagggtgcttgcttgcctttatgagaaggatgtcaagtttgagactcacacagcctcatacaggagcctactcggattgcaggcatcatctcatgctccagttccattctatgaaggccctacttttctagaagaatccagagaaatctgccgttatatagcagaaaagtatgaaaatcaaggatatccgttcctccttggaaaggatgcccttgagagggcttcaattgaacaatggctccacaacgaggagcatgctttcaaccctccgagccgggccttgttctttcatttggcctttcccctgggtgaaggagaagatgatgatattgatgttcatacaaggaagctagaagaggttctggaagtttatgagcaaaggctcagtgacagcgaattccttgttggaaacaagttcactcttgccgaccttgttcacctgccaaattcccactatatcaaagcatctaacaagtttctttacctttatgattcgaggaaaaatgtaaggaggtggtgggatgctatttctgaccggagttcttggaagaaagtgctgaggtatatgaagagcgtggaggagaagaacaaacaagaagaactcaagaagcagcagcagcagcaggaagaggctcctagaacctccaccgacccaactcgggtagactcgagaaagcagagcagaacagagcctcggacaatattggttcctcctgctgataacgagtcatcagcttcgatagttcctcgaacaaagaagcctcttcctggtgatcacttagtgtctactcaacaaattgatggtgttggtatgccagccacaaattgatggtgatggtcgtcttagtggtgtttgtcttgtcttttattgtttggttctttaacaagagttatatttttacc

SEQ ID NO: 18058 - protein, 314 aa, Zea mays subsp. mays
  peptide (1)..(314): Ceres Seq. ID no. 13492110
TSHHFSIVPYVHATMEGLRIGAPIMQVYHEKSFILPDVSRVLACLYEKDVKFETHTASYRSLLGLQASSHAPVPFYEGPTFLEESREICRYIAEKYENQGYPFLLGKDALERASIEQWLHNEEHAFNPPSRALFFHLAFPLGEGEDDDIDVHTRKLEEVLEVYEQRLSDSEFLVGNKFTLADLVHLPNSHYIKASNKFLYLYDSRKNVRRWWDAISDRSSWKKVLRYMKSVEEKNKQEELKKQQQQQEEAPRTSTDPTRVDSRKQSRTEPRTILVPPADNESSASIVPRTKKPLPGDHLVSTQQIDGVGMPATN

SEQ ID NO: 18059 - protein, 300 aa, Zea mays subsp. mays; identical to SEQ ID NO: 7800
  peptide (1)..(300): Ceres Seq. ID no. 13492111

SEQ ID NO: 18060 - protein, 290 aa, Zea mays subsp. mays; identical to SEQ ID NO: 7801
  peptide (1)..(290): Ceres Seq. ID no. 13492112

SEQ ID NO: 18061 - DNA, 774 bp, Zea mays subsp. mays
  misc_feature (1)..(774): Ceres Seq. ID no. 12363622
  misc_feature (1)..(774): Ortholog of  Ceres SEQ ID NO 14316176 as cited in SEQ ID NO 57814
  misc_feature (1)..(774): Ortholog of  Ceres SEQ ID NO 13660037 as cited in SEQ ID NO 66990
gcgagccgaaccggagcgtcaagcaaacatccgtcgatcccgattccgaccactgcgctcgcgccatcgcgccatccacccggcattgtgcgcccgagccgggctcgttggatggcgtccggaggcgccgcccgcggtcgccttgctgaggagcgcaaggcgtggcgcaagagccatcccctcggctttgtggccaagccggcgatgctgccggatggttctgtcaatctcatgctctggaactgcgtcgtccccggcaagtaaggcactgattgggaaggtggatatttcccggtcactctccatttcactgaaaattacccaagtaaccccccaacctgcaagttcccacgaaggtttttccatgtcaatgtctatgattctggggatgtatgcctgtcaatacttggtgatgcatgggcgccttctatcacagtgcggcaaattctaataggcatccaggagctgctggagaacccaaacccagcctctcccgcacaggattttgcttacgatgtttttgcagagaatatgccagaatacaagagacgcgtccgtgagcaagccaagaggtatccgtcgctcgtgtagccgtggacctctgcaacacaattgctgctaaccaagtagtcactcactttggtgtagtggaacttgttcatgacgtgcttaactatggtgtctagttagccgtacgcttgttggaactgctaaagtgcagcttattggaactgctaaaatgcccttgactacgtcttattattatggtttatc

SEQ ID NO: 18062 - protein, 149 aa, Zea mays subsp. mays
  peptide (1)..(149): Ceres Seq. ID no. 12363623
RAEPERQANIRRSRFRPLRSRHRAIHPALCARAGLVGWRPEAPPAVALLRSARRGARAIPSALWPSRRCCRMVLSISCSGTASSPASKALIGKVDISRSLSISLKITQVTPQPASSHEGFSMSMSMILGMYACQYLVMHGRLLSQCGKF

SEQ ID NO: 18063 - protein, 87 aa, Zea mays subsp. mays
  peptide (1)..(87): Ceres Seq. ID no. 12363624
ASRTGASSKHPSIPIPTTALAPSRHPPGIVRPSRARWMASGGAARGRLAEERKAWRKSHPLGFVAKPAMLPDGSVNLMLWNCVVPGK

SEQ ID NO: 18064 - protein, 78 aa, Zea mays subsp. mays
  peptide (1)..(78): Ceres Seq. ID no. 12363625
MVLSISCSGTASSPASKALIGKVDISRSLSISLKITQVTPQPASSHEGFSMSMSMILGMYACQYLVMHGRLLSQCGKF

SEQ ID NO: 18065 - DNA, 475 bp, Zea mays subsp. mays
  misc_feature (1)..(475): Ceres Seq. ID no. 1680426
  misc_feature (1)..(475): Ortholog of  Ceres SEQ ID NO 13596108 as cited in SEQ ID NO 68591
gtattctgtcgtaatcctgccattcatttccatccagacgaccagaggccagagggcgttgctgcgctgcgttccgctctcccttttctgctgcgacgacggctggtcgagcgccgccacactttgcagcttccttggctcttcgcaggtgacgagcgcccaccagtcagacatgggacaaggtggacaagagaagtcgttcaatttccttcaagttttgctagagggcagcatagctggaggaactgctggtgttgtggtggaaacagcactttacccgattgatactataaaaaccaggcttcaggctgctcgaggtggaagccggattgaatggaaaggcttgtattctggattagctggaaatctcactggcgtccttccggcctctgcgatatttgtcggggtgtatgagccaactaaaagamaattactggaaacccttcctgaaaatctgagtgcagttgcncatttt

SEQ ID NO: 18066 - protein, 94 aa, Zea mays subsp. mays
  peptide (1)..(94): Ceres Seq. ID no. 1680427
VFCRNPAIHFHPDDQRPEGVAALRSALPFLLRRRLVERRHTLQLPWLFAGDERPPVRHGTRWTREVVQFPSSFARGQHSWRNCWCCGGNSTLPD

SEQ ID NO: 18067 - protein, 158 aa, Zea mays subsp. mays
  peptide (1)..(158): Ceres Seq. ID no. 1680428
  misc_feature (143)..(143): Xaa is any aa, unknown or other
  misc_feature (156)..(156): Xaa is any aa, unknown or other
YSVVILPFISIQTTRGQRALLRCVPLSLFCCDDGWSSAATLCSFLGSSQVTSAHQSDMGQGGQEKSFNFLQVLLEGSIAGGTAGVVVETALYPIDTIKTRLQAARGGSRIEWKGLYSGLAGNLTGVLPASAIFVGVYEPTKRXLLETLPENLSAVXHF

SEQ ID NO: 18068 - protein, 101 aa, Zea mays subsp. mays
  peptide (1)..(101): Ceres Seq. ID no. 1680429
  misc_feature (86)..(86): Xaa is any aa, unknown or other
  misc_feature (99)..(99): Xaa is any aa, unknown or other
MGQGGQEKSFNFLQVLLEGSIAGGTAGVVVETALYPIDTIKTRLQAARGGSRIEWKGLYSGLAGNLTGVLPASAIFVGVYEPTKRXLLETLPENLSAVXHF

SEQ ID NO: 18069 - DNA, 738 bp, Zea mays subsp. mays
  misc_feature (1)..(738): Ceres Seq. ID no. 13566549
  misc_feature (1)..(738): Ortholog of  Ceres SEQ ID NO 15179121 as cited in SEQ ID NO 0
tttcaaaatggtgttggttgtgaggaatgatctgaagatggggaaggggaagattgccgcacagtgcagtcatgcaactcttgggctattcaaaaaactccaacagagagctccaaaatcactaagaaggtgggagcggtgtgggcaagttaaagtggttgtgaaaatagaaagcgaggaagacatgctagttttacaagggagagcaaaagtctttaaatctgccaactcacataaccatagacgctggaagaacacagattgctccaaattcaaggacagtcatggctattctggggccagctgatatggttgatgatgttactggcggtctgaagcttttgtagaaaaccaccttgtcagcattttcaacttgggtcttcatagagcagtgctgggactttgcagggccacagtggtctctgcacttgtactgatgtgcggcagaagaatgaaccttggccccgttggttgacctgagtttcttgtccatgaatttatttggaaggagagcttgcattcttttttcacttgtaccgaccgttatctttggagttgtgatgttagcagttcgaattctggtgttgacaacttatagaccatcatttcttctgtaacatagataagaaaatactatttgactattgtccatttccccttttttattttctttttaataattcgtgcagtagtggacacaatactgagttgctttggagaagtcatcttgattgcggc

SEQ ID NO: 18070 - protein, 101 aa, Zea mays subsp. mays
  peptide (1)..(101): Ceres Seq. ID no. 13566550
FKMVLVVRNDLKMGKGKIAAQCSHATLGLFKKLQQRAPKSLRRWERCGQVKVVVKIESEEDMLVLQGRAKVFKSANSHNHRRWKNTDCSKFKDSHGYSGAS

SEQ ID NO: 18071 - protein, 99 aa, Zea mays subsp. mays
  peptide (1)..(99): Ceres Seq. ID no. 13566551
MVLVVRNDLKMGKGKIAAQCSHATLGLFKKLQQRAPKSLRRWERCGQVKVVVKIESEEDMLVLQGRAKVFKSANSHNHRRWKNTDCSKFKDSHGYSGAS

SEQ ID NO: 18072 - protein, 89 aa, Zea mays subsp. mays
  peptide (1)..(89): Ceres Seq. ID no. 13566552
MGKGKIAAQCSHATLGLFKKLQQRAPKSLRRWERCGQVKVVVKIESEEDMLVLQGRAKVFKSANSHNHRRWKNTDCSKFKDSHGYSGAS

SEQ ID NO: 18073 - DNA, 529 bp, Zea mays subsp. mays
  misc_feature (1)..(529): Ceres Seq. ID no. 12416340
  misc_feature (1)..(529): Ortholog of  Ceres SEQ ID NO 14302734 as cited in SEQ ID NO 66748
atcccctcctcagccatcgcctccctctcccctcaacccagcgcccccctcccgccgccgctagggtttctcctccctccccgcccacccccaaatcatttccgaagcttccagtgcgccgcagtcatgagcgacggcaaggactccctcgacctctccgccctcggcgctgccatccccaactcggccgagctcagcgcggaggacaaggctaaccttgtggcgtcgatcaagaacacgctcgagggattggcgtcgcggcataccgacgtgctcgagagcctcgagcccaaggtcaggaagcgcgtcgagaagctcagggagatccagggcgaacacgacgaacttgaggcaaaatttttcgaggagagagctgctctagaagctaagtatcagaagttgtatgaaccactttactcaaagcgttacgaaattgtcaatggtgtggtcgaggttgagggtatcacagtagaaagtgcagctgaaacccctgcggagcaanngagtggagatgagacctctgctgatc

SEQ ID NO: 18074 - protein, 176 aa, Zea mays subsp. mays
  peptide (1)..(176): Ceres Seq. ID no. 12416341
  misc_feature (168)..(168): Xaa is any aa, unknown or other
IPSSAIASLSPQPSAPLPPPLGFLLPPRPPPNHFRSFQCAAVMSDGKDSLDLSALGAAIPNSAELSAEDKANLVASIKNTLEGLASRHTDVLESLEPKVRKRVEKLREIQGEHDELEAKFFEERAALEAKYQKLYEPLYSKRYEIVNGVVEVEGITVESAAETPAEQXSGDETSAD

SEQ ID NO: 18075 - protein, 134 aa, Zea mays subsp. mays
  peptide (1)..(134): Ceres Seq. ID no. 12416342
  misc_feature (126)..(126): Xaa is any aa, unknown or other
MSDGKDSLDLSALGAAIPNSAELSAEDKANLVASIKNTLEGLASRHTDVLESLEPKVRKRVEKLREIQGEHDELEAKFFEERAALEAKYQKLYEPLYSKRYEIVNGVVEVEGITVESAAETPAEQXSGDETSAD

SEQ ID NO: 18076 - DNA, 1046 bp, Zea mays subsp. mays
  misc_feature (1)..(1046): Ceres Seq. ID no. 13493323
  misc_feature (1)..(1046): Ortholog of  Ceres SEQ ID NO 13637457 as cited in SEQ ID NO 53156
  misc_feature (1)..(1046): Ortholog of  Ceres SEQ ID NO 13658653 as cited in SEQ ID NO 66616
taatcgaaaaatcgccgccgcatccacccacgggcccaccaaacgacctcgctgcgcccacccgtccgcccccatctagctcagcggtcccgcacaaccgaccactcggcagaatgccgccgcttcggcctccgccgccgcggctcctgctcaacaacgtctcgtgcatgcggaacgcgcagacggtgctccgcgacatcaacctcagcgtccacgacggcacagccctcgtcctgaccggtgcgaacggctccggcaagaccaccctcctccgcatgctggcgggcttttcgcgtccctcggcgggggagatcctctggaatggtcacgacatcacctccccgggcgttttccagcagtacaagctgcagctcaactggatgtcgctcaaggacgccgtcaaagagaagctcacggtgctcgagaacgtccagtggttcgagctcctcgaggggaaggacggcagcaggtcgggcccagccatcgagctcatgggcctcggcaggctcatgaacgagaaggccaggatgctctccatggggcagaggaagcggctgcagctcgccaggctgctcgctatcgaccgacccatctggctgctggacgagccctcagtcgcgctggacgcagagggtaccaggctgcttgaatacattatcgcagagcatcggaagaagggtggcatcgtgtttgtggccacacatctgcccattcagattgaggattctatgtcgcttcggcttccgcagaggtttccccggaggaagacgctggttgatcttgtccgctgatgtcaatgtgagattgtgagcacaggaatttagctgtatctctctaattcctctccagctatctgtctgattgctgttggagcaattactctggtgctgcatttgtcatcctatttttgacaacatggcaacacattgtcgatgttgataatctgtaggggtctttgtgatcaccgattcgatgcattggcccatgtatttggggacactagaaagcatttgccatggctgatatatgtatggctgttctttgtg

SEQ ID NO: 18077 - protein, 262 aa, Zea mays subsp. mays
  peptide (1)..(262): Ceres Seq. ID no. 13493324
IEKSPPHPPTGPPNDLAAPTRPPPSSSAVPHNRPLGRMPPLRPPPPRLLLNNVSCMRNAQTVLRDINLSVHDGTALVLTGANGSGKTTLLRMLAGFSRPSAGEILWNGHDITSPGVFQQYKLQLNWMSLKDAVKEKLTVLENVQWFELLEGKDGSRSGPAIELMGLGRLMNEKARMLSMGQRKRLQLARLLAIDRPIWLLDEPSVALDAEGTRLLEYIIAEHRKKGGIVFVATHLPIQIEDSMSLRLPQRFPRRKTLVDLVR

SEQ ID NO: 18078 - protein, 225 aa, Zea mays subsp. mays
  peptide (1)..(225): Ceres Seq. ID no. 13493325
MPPLRPPPPRLLLNNVSCMRNAQTVLRDINLSVHDGTALVLTGANGSGKTTLLRMLAGFSRPSAGEILWNGHDITSPGVFQQYKLQLNWMSLKDAVKEKLTVLENVQWFELLEGKDGSRSGPAIELMGLGRLMNEKARMLSMGQRKRLQLARLLAIDRPIWLLDEPSVALDAEGTRLLEYIIAEHRKKGGIVFVATHLPIQIEDSMSLRLPQRFPRRKTLVDLVR

SEQ ID NO: 18079 - protein, 207 aa, Zea mays subsp. mays
  peptide (1)..(207): Ceres Seq. ID no. 13493326
MRNAQTVLRDINLSVHDGTALVLTGANGSGKTTLLRMLAGFSRPSAGEILWNGHDITSPGVFQQYKLQLNWMSLKDAVKEKLTVLENVQWFELLEGKDGSRSGPAIELMGLGRLMNEKARMLSMGQRKRLQLARLLAIDRPIWLLDEPSVALDAEGTRLLEYIIAEHRKKGGIVFVATHLPIQIEDSMSLRLPQRFPRRKTLVDLVR

SEQ ID NO: 18080 - DNA, 926 bp, Zea mays subsp. mays
  misc_feature (1)..(926): Ceres Seq. ID no. 12416929
  misc_feature (1)..(926): Ortholog of  Ceres SEQ ID NO 15226850 as cited in SEQ ID NO 62501
accagcgcagaatcagcaaacgcgccattgacgcgcactcgtagtcttgactcttgcgtgcttccctcgtcttctcggacgttccgttccatcgccatggcggaccagcttagcgaggagcagattgccgagttcaaggaagctttcagcctcttcgacaaggacggcgacggttgcatcacaaccaaggagctcggaaccgtgatgcggtctctcgggcagaaccccaccgaggcggagctgcaggacatgatcgccgaggtggacagcaacggcagcggcaccatcgacgagcaggagttcctgggcctgatggcgcgcaagatgagggacgcggagtcggaggaggagctcagggaggcgttccgcgtgttcgacaaggaccagaacggggtgatctccgcggccgagctccggcacgtgatgaccaacctcggggagaagctgagcgagcaggaggtggccgagatggtccgcgaggccgacgtggaccgcgacggccacatcaactacgacgagttcgtcaaggtcatgncggccaagcgaaggagcaagaggacggaggagaaggcgacgcgcggcaagaagaagccggcggcggcgccgtccgacgccggcaagcgtggccagaaatgcgtgatcctgtgagccggagcttcggtcgtccagtacatgctggtgctgcgtgcgtgtcacccgctcgacctntgcttccggcacaccagctgcgggaagctccacttctgctgttntgcaggtgaatgtagctgtttgtaaacttatcagagcgtgtttgggagcatgattgaatgggaaccccctcagttcctccaatccaagggattttagtcatctcgatctcctctaatctccttgcccccaaacaaaccattaaataagaaaaacggaggaagtaactgtttgcc

SEQ ID NO: 18081 - protein, 215 aa, Zea mays subsp. mays
  peptide (1)..(215): Ceres Seq. ID no. 12416930
  misc_feature (179)..(179): Xaa is any aa, unknown or other
TSAESANAPLTRTRSLDSCVLPSSSRTFRSIAMADQLSEEQIAEFKEAFSLFDKDGDGCITTKELGTVMRSLGQNPTEAELQDMIAEVDSNGSGTIDEQEFLGLMARKMRDAESEEELREAFRVFDKDQNGVISAAELRHVMTNLGEKLSEQEVAEMVREADVDRDGHINYDEFVKVMXAKRRSKRTEEKATRGKKKPAAAPSDAGKRGQKCVIL

SEQ ID NO: 18082 - protein, 183 aa, Zea mays subsp. mays
  peptide (1)..(183): Ceres Seq. ID no. 12416931
  misc_feature (147)..(147): Xaa is any aa, unknown or other
MADQLSEEQIAEFKEAFSLFDKDGDGCITTKELGTVMRSLGQNPTEAELQDMIAEVDSNGSGTIDEQEFLGLMARKMRDAESEEELREAFRVFDKDQNGVISAAELRHVMTNLGEKLSEQEVAEMVREADVDRDGHINYDEFVKVMXAKRRSKRTEEKATRGKKKPAAAPSDAGKRGQKCVIL

SEQ ID NO: 18083 - protein, 147 aa, Zea mays subsp. mays
  peptide (1)..(147): Ceres Seq. ID no. 12416932
  misc_feature (111)..(111): Xaa is any aa, unknown or other
MRSLGQNPTEAELQDMIAEVDSNGSGTIDEQEFLGLMARKMRDAESEEELREAFRVFDKDQNGVISAAELRHVMTNLGEKLSEQEVAEMVREADVDRDGHINYDEFVKVMXAKRRSKRTEEKATRGKKKPAAAPSDAGKRGQKCVIL

SEQ ID NO: 18084 - DNA, 891 bp, Zea mays subsp. mays
  misc_feature (1)..(891): Ceres Seq. ID no. 12416118
  misc_feature (1)..(891): Ortholog of  Ceres SEQ ID NO 13585332 as cited in SEQ ID NO 60654
  misc_feature (1)..(891): Ortholog of  Ceres SEQ ID NO 13502874 as cited in SEQ ID NO 66298
  misc_feature (1)..(891): Ortholog of  Ceres SEQ ID NO 12614124 as cited in SEQ ID NO 68392
taatccgaactatttcttttcgtcaaactaaagtgaagacaacgttttgctccgcaggacatgttcacggcgggtacggacacgtcgtcgatcatcgtggagtgggcgatggcggagatgctcaagaacccgagcgtcatggcgcgcgcgcaggaggagctggaccgcgcggtgggccggggccggcgcctggaggagtcggacctgcccggcctcccctacctgcaggcggtgtgcaaggaggccatgcggctgcacccgtccacgccgctcagcctcccgcacttctccttggacgcctgcgacgacgtcgacggctaccgcgtcccggccaacacccgcctgctcgtcaacgtctgggccatcggccgggacccggaggcctgggagaggcccctcgacttccgccccgagcgcttcctgcccgggggcggcgcggagaaggtcgacccgctggggaactgcttcgagctcatcccgttcggcgccggccggaggatntgcgcggggaagctggcgggcatggtgttcgtgcagtacttcctgggcacgctgctgcacgcgttcgactggcgcctgcctgacggcgaggagaagctggacatgagcgagacgttcggcctcgcgctgcccaaggcagtgccgctccgcgccgtcgccacgccacggctcgtgccggaagcctatgcctgagcctgagttagctgtcagagttnttcacgcgtgctgtcccaacaagcatggtttggcttggatggtttactctgttggtgttgctgccttcctgcatacgtgngcatacactagtattctgtgttgatcctacacttgttgcctggtatagtacacaacatttgaacagatgatggttgatntgaactnnnnggagtt

SEQ ID NO: 18085 - protein, 210 aa, Zea mays subsp. mays
  peptide (1)..(210): Ceres Seq. ID no. 12416119
  misc_feature (147)..(147): Xaa is any aa, unknown or other
MFTAGTDTSSIIVEWAMAEMLKNPSVMARAQEELDRAVGRGRRLEESDLPGLPYLQAVCKEAMRLHPSTPLSLPHFSLDACDDVDGYRVPANTRLLVNVWAIGRDPEAWERPLDFRPERFLPGGGAEKVDPLGNCFELIPFGAGRRXCAGKLAGMVFVQYFLGTLLHAFDWRLPDGEEKLDMSETFGLALPKAVPLRAVATPRLVPEAYA

SEQ ID NO: 18086 - protein, 194 aa, Zea mays subsp. mays
  peptide (1)..(194): Ceres Seq. ID no. 12416120
  misc_feature (131)..(131): Xaa is any aa, unknown or other
MAEMLKNPSVMARAQEELDRAVGRGRRLEESDLPGLPYLQAVCKEAMRLHPSTPLSLPHFSLDACDDVDGYRVPANTRLLVNVWAIGRDPEAWERPLDFRPERFLPGGGAEKVDPLGNCFELIPFGAGRRXCAGKLAGMVFVQYFLGTLLHAFDWRLPDGEEKLDMSETFGLALPKAVPLRAVATPRLVPEAYA

SEQ ID NO: 18087 - protein, 193 aa, Zea mays subsp. mays
  peptide (1)..(193): Ceres Seq. ID no. 12416121
  misc_feature (167)..(167): Xaa is any aa, unknown or other
IRTISFRQTKVKTTFCSAGHVHGGYGHVVDHRGVGDGGDAQEPERHGARAGGAGPRGGPGPAPGGVGPARPPLPAGGVQGGHAAAPVHAAQPPALLLGRLRRRRRLPRPGQHPPARQRLGHRPGPGGLGEAPRLPPRALPARGRRGEGRPAGELLRAHPVRRRPEDXRGEAGGHGVRAVLPGHAAARVRLAPA

SEQ ID NO: 18088 - DNA, 1254 bp, Zea mays subsp. mays; identical to SEQ ID NO: 6716
  misc_feature (1)..(1254): Ceres Seq. ID no. 13498495
  misc_feature (1)..(1254): Ortholog of  Ceres SEQ ID NO 14303282 as cited in SEQ ID NO 0

SEQ ID NO: 18089 - protein, 417 aa, Zea mays subsp. mays; identical to SEQ ID NO: 6717
  peptide (1)..(417): Ceres Seq. ID no. 13498496

SEQ ID NO: 18090 - protein, 397 aa, Zea mays subsp. mays; identical to SEQ ID NO: 6718
  peptide (1)..(397): Ceres Seq. ID no. 13498497

SEQ ID NO: 18091 - protein, 385 aa, Zea mays subsp. mays; identical to SEQ ID NO: 6719
  peptide (1)..(385): Ceres Seq. ID no. 13498498

SEQ ID NO: 18092 - DNA, 1142 bp, Zea mays subsp. mays
  misc_feature (1)..(1142): Ceres Seq. ID no. 13499219
  misc_feature (1)..(1142): Ortholog of  Ceres SEQ ID NO 14310358 as cited in SEQ ID NO 54582
  misc_feature (1)..(1142): Ortholog of  Ceres SEQ ID NO 15176085 as cited in SEQ ID NO 69305
tagaacatcctaatcgaaaaatgacaatacccggcggcgagcaacggatcctccctgtcccggccgtgctcttcatccgccgcccgggcgcgcctttcggcaacgcgatgcacgagcgcttccgcgtgctggagctgccctcgccggcctcgggcgagcaggcagcggctttcctcgccgccgccgcggcagagccggacccgcctcgcgccgcggtcgtcatgggaggcggcgccgtccgcgcggacgcggcgttcctcgacgccgtcccctcggtccgctgcctcgtcagcacggccgcgggcgttgaccacatcgacctcgccgagtgcgcgcgccgcggcgtcgccgtcgccaactctgggacagtctacgccgccgacgtcgcagaccacgccgtccgcatgctcatcgacgtgcttcgccgcgtgtcggcggcggggcggttcgtacggcgcgggctatggccgctgcaggagggcgagtaccctctcggctccaagctagggggcaagcgtgtgggcatcatcggattggggaacattggttcgctggttgcaaagaggctggaagctttcggctgtgtcatctgctacaattccagaagacgcatggactcagtctcctacagatacttctccaacgttcagcgtcttgcttccgaatcagacgtgctcgttgtcgcatgcgcactgaacaaagagacacgccacattgtgaatgaggatgtcctggaggccctggggaaggatggggtcgtcataaacattggccgaggcgcaagcatcgacgaggcggccttagtcagcgcgctgaaagagggaaggatcgctggagctgggctcgaagtctttgagaacgaacccaaggtgcctccggagctcatgtccatggacagtgtggtgctgacgcctcattcagcggttttcacgacggagtcgagggcggacctgtgtcagcacctgatttgcaacctggaagcgttctttgccggtaagccactcatcacgcccgtgctgcgtttgacagagtaggtcgtgttgcaggctagttaagctattgggaggtaactaaattgttatttgtatatatagctgcaaactatagggctgtgttccttataaaatggatccattgattcg

SEQ ID NO: 18093 - protein, 343 aa, Zea mays subsp. mays
  peptide (1)..(343): Ceres Seq. ID no. 13499220
EHPNRKMTIPGGEQRILPVPAVLFIRRPGAPFGNAMHERFRVLELPSPASGEQAAAFLAAAAAEPDPPRAAVVMGGGAVRADAAFLDAVPSVRCLVSTAAGVDHIDLAECARRGVAVANSGTVYAADVADHAVRMLIDVLRRVSAAGRFVRRGLWPLQEGEYPLGSKLGGKRVGIIGLGNIGSLVAKRLEAFGCVICYNSRRRMDSVSYRYFSNVQRLASESDVLVVACALNKETRHIVNEDVLEALGKDGVVINIGRGASIDEAALVSALKEGRIAGAGLEVFENEPKVPPELMSMDSVVLTPHSAVFTTESRADLCQHLICNLEAFFAGKPLITPVLRLTE

SEQ ID NO: 18094 - protein, 337 aa, Zea mays subsp. mays
  peptide (1)..(337): Ceres Seq. ID no. 13499221
MTIPGGEQRILPVPAVLFIRRPGAPFGNAMHERFRVLELPSPASGEQAAAFLAAAAAEPDPPRAAVVMGGGAVRADAAFLDAVPSVRCLVSTAAGVDHIDLAECARRGVAVANSGTVYAADVADHAVRMLIDVLRRVSAAGRFVRRGLWPLQEGEYPLGSKLGGKRVGIIGLGNIGSLVAKRLEAFGCVICYNSRRRMDSVSYRYFSNVQRLASESDVLVVACALNKETRHIVNEDVLEALGKDGVVINIGRGASIDEAALVSALKEGRIAGAGLEVFENEPKVPPELMSMDSVVLTPHSAVFTTESRADLCQHLICNLEAFFAGKPLITPVLRLTE

SEQ ID NO: 18095 - protein, 308 aa, Zea mays subsp. mays
  peptide (1)..(308): Ceres Seq. ID no. 13499222
MHERFRVLELPSPASGEQAAAFLAAAAAEPDPPRAAVVMGGGAVRADAAFLDAVPSVRCLVSTAAGVDHIDLAECARRGVAVANSGTVYAADVADHAVRMLIDVLRRVSAAGRFVRRGLWPLQEGEYPLGSKLGGKRVGIIGLGNIGSLVAKRLEAFGCVICYNSRRRMDSVSYRYFSNVQRLASESDVLVVACALNKETRHIVNEDVLEALGKDGVVINIGRGASIDEAALVSALKEGRIAGAGLEVFENEPKVPPELMSMDSVVLTPHSAVFTTESRADLCQHLICNLEAFFAGKPLITPVLRLTE

SEQ ID NO: 18096 - DNA, 868 bp, Zea mays subsp. mays
  misc_feature (1)..(868): Ceres Seq. ID no. 12358010
  misc_feature (1)..(868): Ortholog of  Ceres SEQ ID NO 14305026 as cited in SEQ ID NO 52980
  misc_feature (1)..(868): Ortholog of  Ceres SEQ ID NO 15175670 as cited in SEQ ID NO 55204
  misc_feature (1)..(868): Ortholog of  Ceres SEQ ID NO 13655712 as cited in SEQ ID NO 63394
  misc_feature (1)..(868): Ortholog of  Ceres SEQ ID NO 13662391 as cited in SEQ ID NO 68631
gtattgcgggaactgaaagcaaaccaaaaaagaaagagagggggagagacacagaggcctcactccacacactgtcttgtctctcagtcccagagctttcttggatcgcgaggaatccactggaaattttgcaattgtagtagagaactgtatcgtccgacgaaggtgcatggtgttggccatgggtcacggcagggaacagagacgagcaggtcggcgctctccccccagctcattgatcctgtcctcgctataaggtagtcctgcggtggcctccgaatttcactcaatcgaacacgacatgaagcggccacgcggcgccagtccccctctggctgcgatgaccaatccgaacgatgatggttacggcgtggtcgggatggaggcggacgcagacgcggacgcggacgaggagatgatggcgtgcggcggcggcggggagaagaagcggcgcctgagctccgagcaggtgcgcgcgctggagcggagcttcgaggtggagaacaagctggagccggagcgcaaggcgcggctggcgcgcgacctcggcctgcagccgcgccaggtcgccgtctggttccagaaccgccgcgcccgctggaagaccaagcagctggagcgcgactactccgcgctccgccagtcctacgacgcgctgcggcacgaccacgacgcgctgcgccgcgacaaggacgccctcctcgccgagatcaaggagctcaaggcgaagctcggggacgaggaggcagcggcgagcttcacgtcggtcaaggcggagccggcggcctcggacgggcctccccccgtaggggtggggtcgtccgagagtgactccagcgcggtgctgaacgacgcggacccgcccgtg

SEQ ID NO: 18097 - protein, 189 aa, Zea mays subsp. mays
  peptide (1)..(189): Ceres Seq. ID no. 12358011
MKRPRGASPPLAAMTNPNDDGYGVVGMEADADADADEEMMACGGGGEKKRRLSSEQVRALERSFEVENKLEPERKARLARDLGLQPRQVAVWFQNRRARWKTKQLERDYSALRQSYDALRHDHDALRRDKDALLAEIKELKAKLGDEEAAASFTSVKAEPAASDGPPPVGVGSSESDSSAVLNDADPPV

SEQ ID NO: 18098 - protein, 176 aa, Zea mays subsp. mays
  peptide (1)..(176): Ceres Seq. ID no. 12358012
MTNPNDDGYGVVGMEADADADADEEMMACGGGGEKKRRLSSEQVRALERSFEVENKLEPERKARLARDLGLQPRQVAVWFQNRRARWKTKQLERDYSALRQSYDALRHDHDALRRDKDALLAEIKELKAKLGDEEAAASFTSVKAEPAASDGPPPVGVGSSESDSSAVLNDADPPV

SEQ ID NO: 18099 - protein, 163 aa, Zea mays subsp. mays
  peptide (1)..(163): Ceres Seq. ID no. 12358013
MEADADADADEEMMACGGGGEKKRRLSSEQVRALERSFEVENKLEPERKARLARDLGLQPRQVAVWFQNRRARWKTKQLERDYSALRQSYDALRHDHDALRRDKDALLAEIKELKAKLGDEEAAASFTSVKAEPAASDGPPPVGVGSSESDSSAVLNDADPPV

SEQ ID NO: 18100 - DNA, 1182 bp, Zea mays subsp. mays
  misc_feature (1)..(1182): Ceres Seq. ID no. 12359313
  misc_feature (1)..(1182): Ortholog of  Ceres SEQ ID NO 15175368 as cited in SEQ ID NO 60071
acggactggggaccgtctctctcctgtcgagctcccacgtactcgtgcacacaacacagctgctgctcaaagagccacatgcctagtagactagtcttagtagctagcttagagagagggaggggagaggatcagaggaggcgaggggaaggaaggagaggagaagaagcaaccaaccaagaacaagagaaggtaagaaggcgttagctaggctaccggagaggaggagagccggcgcaccatggatcaacagcagcaccaggagcggccgtgggaggtgtaccgggagtgcatgcgcaaccacgcggcgaagctcgggacatacgcctccgacggatgctgcgagtacacccccgacgacggccagcccgcagcgatgctctgcgccgcctgcggctgccaccgcaacttccaccggaaggcgttcctcgccgacgctgcggcgggagcgcacggcggcgcgcacggggcaatgctgccctctcccggcgcgtccccgggctacggcatgcaccacatggcgattgctgcggccggcatgggcggtgacgccggcgcgcacggctcctgctccgggtccgggggcaggcgccggacgcggaccaagttcacggacgagcagaaggagcgcatggcgcggttggcggagcggctcggctggcggatgcccaagcgggagcccggccgcgcgctgggggacgacgaggtgggccgcttctgccgggagatcggggtcaccaggcaggtcttcaaggtatggatgcacaaccacaagtccggtggtggcggcagccagggcgagggcgccagcgctggcgctgccggagccgctcagacgacgtcgtcgtccacgacgcgtggcggcggcggcggcggcgttgttggaggaggcgggagcatgtccacggcgatgatgggcgccgacgtcgaggacgacgaggaggtgaggggcagcgagatgtgcatgtaggctgtagccgcgccccgcgttacgtacgtggcatgcgcggcggcaatggcacggcacggcattgcctcgcccttggctgcgatcgaggattaacatctccttttgctgctaattcctttgggtccttttgcttcgatgtgttgatgattgattgtttatgatgagatattcattgttatcacggctatgctaattaatgctgtgtcagtgtc

SEQ ID NO: 18101 - protein, 242 aa, Zea mays subsp. mays
  peptide (1)..(242): Ceres Seq. ID no. 12359314
MDQQQHQERPWEVYRECMRNHAAKLGTYASDGCCEYTPDDGQPAAMLCAACGCHRNFHRKAFLADAAAGAHGGAHGAMLPSPGASPGYGMHHMAIAAAGMGGDAGAHGSCSGSGGRRRTRTKFTDEQKERMARLAERLGWRMPKREPGRALGDDEVGRFCREIGVTRQVFKVWMHNHKSGGGGSQGEGASAGAAGAAQTTSSSTTRGGGGGGVVGGGGSMSTAMMGADVEDDEEVRGSEMCM

SEQ ID NO: 18102 - protein, 225 aa, Zea mays subsp. mays
  peptide (1)..(225): Ceres Seq. ID no. 12359315
MRNHAAKLGTYASDGCCEYTPDDGQPAAMLCAACGCHRNFHRKAFLADAAAGAHGGAHGAMLPSPGASPGYGMHHMAIAAAGMGGDAGAHGSCSGSGGRRRTRTKFTDEQKERMARLAERLGWRMPKREPGRALGDDEVGRFCREIGVTRQVFKVWMHNHKSGGGGSQGEGASAGAAGAAQTTSSSTTRGGGGGGVVGGGGSMSTAMMGADVEDDEEVRGSEMCM

SEQ ID NO: 18103 - protein, 197 aa, Zea mays subsp. mays
  peptide (1)..(197): Ceres Seq. ID no. 12359316
MLCAACGCHRNFHRKAFLADAAAGAHGGAHGAMLPSPGASPGYGMHHMAIAAAGMGGDAGAHGSCSGSGGRRRTRTKFTDEQKERMARLAERLGWRMPKREPGRALGDDEVGRFCREIGVTRQVFKVWMHNHKSGGGGSQGEGASAGAAGAAQTTSSSTTRGGGGGGVVGGGGSMSTAMMGADVEDDEEVRGSEMCM

SEQ ID NO: 18104 - DNA, 704 bp, Zea mays subsp. mays
  misc_feature (1)..(704): Ceres Seq. ID no. 12416245
  misc_feature (1)..(704): Ortholog of  Ceres SEQ ID NO 13596025 as cited in SEQ ID NO 62024
gtgtgcacatgtgtctggcagcgtgccccaaggagctgcaggtggagcgcggtggcacggtggcgtgccggagcgcgtgtgaggcgttcgggcaggaccagtactgctgcagcggcgcgtacgcgacgccggcggcgtgccgcccgacggcctactcgtccatcttcaagtcggcgtgcccgcgcgcgtacagctacgcctacgacgacggctccagcaccttcacctgccacagcgccgccggctacaccatcgccttctgcctccctccgtcgtccgggttgcacggctctgatgtcactcccctcgtttcgccgccggcgtctgggcaaagcaccggcagagttggcggcgatggcgtcggaagcgccgaccagccgcctcatcctgctactggcaacagtgatggagggggctaccatcagctgtggatgacgatgtcgctagccagcacgctccacgatcagctgtggcttctgctgcctctgcctgcagtgctcttgctcctcctctgaccaccctcccggcctcccctcgctcaccatgaagatgaaatgaagctcttgtactgtaaggttcactcattgacggtatagtccccatgcgtagcagcggtagtaaaaccatccatcatgcccagtggggacggaaacatgtacagaatacagatacagactggatccgtttacgtatagattacgacg

SEQ ID NO: 18105 - protein, 170 aa, Zea mays subsp. mays
  peptide (1)..(170): Ceres Seq. ID no. 12416246
VHMCLAACPKELQVERGGTVACRSACEAFGQDQYCCSGAYATPAACRPTAYSSIFKSACPRAYSYAYDDGSSTFTCHSAAGYTIAFCLPPSSGLHGSDVTPLVSPPASGQSTGRVGGDGVGSADQPPHPATGNSDGGGYHQLWMTMSLASTLHDQLWLLLPLPAVLLLLL

SEQ ID NO: 18106 - protein, 168 aa, Zea mays subsp. mays
  peptide (1)..(168): Ceres Seq. ID no. 12416247
MCLAACPKELQVERGGTVACRSACEAFGQDQYCCSGAYATPAACRPTAYSSIFKSACPRAYSYAYDDGSSTFTCHSAAGYTIAFCLPPSSGLHGSDVTPLVSPPASGQSTGRVGGDGVGSADQPPHPATGNSDGGGYHQLWMTMSLASTLHDQLWLLLPLPAVLLLLL

SEQ ID NO: 18107 - protein, 144 aa, Zea mays subsp. mays
  peptide (1)..(144): Ceres Seq. ID no. 12416248
VCTCVWQRAPRSCRWSAVARWRAGARVRRSGRTSTAAAARTRRRRRAARRPTRPSSSRRARARTATPTTTAPAPSPATAPPATPSPSASLRRPGCTALMSLPSFRRRRLGKAPAELAAMASEAPTSRLILLLATVMEGATISCG

SEQ ID NO: 18108 - DNA, 1263 bp, Zea mays subsp. mays
  misc_feature (1)..(1263): Ceres Seq. ID no. 15180126
  misc_feature (1)..(1263): Ortholog of  Ceres SEQ ID NO 15177320 as cited in SEQ ID NO 52645
  misc_feature (1)..(1263): Ortholog of  Ceres SEQ ID NO 14313840 as cited in SEQ ID NO 59568
  misc_feature (1)..(1263): Ortholog of  Ceres SEQ ID NO 15168502 as cited in SEQ ID NO 60095
  misc_feature (1)..(1263): Ortholog of  Ceres SEQ ID NO 13662245 as cited in SEQ ID NO 62708
  misc_feature (1)..(1263): Ortholog of  Ceres SEQ ID NO 14314084 as cited in SEQ ID NO 63256
  misc_feature (1)..(1263): Ortholog of  Ceres SEQ ID NO 14303091 as cited in SEQ ID NO 66369
cagctgctcctggccgtcgacaccagcaactacgcctcgtggatcccttgcgccggctgcgcgggctgccccacgtcgtccgcggcgcccttcgacccggccgcgtccgcctcgtaccgcacggtgccctgcgggtcgccgctgtgcgcgcaggcacccaacgcggcgtccccgcccggcggcaaggcctgcggcttcagcctcacctacgccgactcctcgctgcaggccgcgctgtcgcaggactccctcgccgtcgcaggcaacgccgtgaaggcctacaccttcgggtgcctgcagagggccactggcacggctgcgccgccgcaggggctgctgggtctcggccgcggcccgctgtcgttcctttcgcagaccaaggacatgtacgaggccaccttctcgtactgtctccccagcttcaagtcgctcaacttctctggaacgctccggctcgggcgcaacggccagccgcagcgcatcaagacgacgccgctgctggccaacccgcaccggtcgtcgctctactacgtgaacatgaccggcgtccgcgtgggcaggaaggtggtgcccatcccggcgttcgacccggcgacgggcgcgggcaccgtgctggactctggcaccatgttcacccggctggtggcgccggcgtacgtggccgtgcgggacgaggtccggcgccgcgtcggcgcgcccgtatcctcgctgggagggttcgacacgtgcttcaacaccaccgccgtcgcgtggccgcccatgacgctgctgttcgacggcatgcaggtgacgttgccggaggagaacgtggtcatccacagcacgtacgcgaccatcagctgcctggccatggccgcggcgcccgacggcgtcaacaccgtgctcaacgtcatcccagcatgcagcagcagaaccaccgtgtgctcttcgacgtgcccaacggacgcgtcggcttcgcgcgcgagcgctgcactgccgcttgatcagcttgctcgcgcgcctgcgcgcgggctcggattcgggttatatttagttaaacctacgttctacggttgtggacgtcatgcactgctgtcggagtgggtgattaataatttaactttccttttctttttaatctcgttgctcttcagatttaccatatgtgtttcacattcaccgcgttatgtggtttaggggctgaatgattggggtctaaataatgtactgcatattccagttttggattaagcacggtcgtcgtttaggcttgatatgcctaac

SEQ ID NO: 18109 - protein, 391 aa, Zea mays subsp. mays
  peptide (1)..(391): Ceres Seq. ID no. 15180127
QLLLAVDTSNYASWIPCAGCAGCPTSSAAPFDPAASASYRTVPCGSPLCAQAPNAASPPGGKACGFSLTYADSSLQAALSQDSLAVAGNAVKAYTFGCLQRATGTAAPPQGLLGLGRGPLSFLSQTKDMYEATFSYCLPSFKSLNFSGTLRLGRNGQPQRIKTTPLLANPHRSSLYYVNMTGVRVGRKVVPIPAFDPATGAGTVLDSGTMFTRLVAPAYVAVRDEVRRRVGAPVSSLGGFDTCFNTTAVAWPPMTLLFDGMQVTLPEENVVIHSTYATISCLAMAAAPDGVNTVLNVIPACSSRTTVCSSTCPTDASASRASAALPLDQLARAPARGLGFGLYLVKPTFYGCGRHALLSEWVINNLTFLFFLISLLFRFTICVSHSPRYVV

SEQ ID NO: 18110 - protein, 326 aa, Zea mays subsp. mays
  peptide (1)..(326): Ceres Seq. ID no. 15180128
AAPGRRHQQLRLVDPLRRLRGLPHVVRGALRPGRVRLVPHGALRVAAVRAGTQRGVPARRQGLRLQPHLRRLLAAGRAVAGLPRRRRQRREGLHLRVPAEGHWHGCAAAGAAGSRPRPAVVPFADQGHVRGHLLVLSPQLQVAQLLWNAPARAQRPAAAHQDDAAAGQPAPVVALLREHDRRPRGQEGGAHPGVRPGDGRGHRAGLWHHVHPAGGAGVRGRAGRGPAPRRRARILAGRVRHVLQHHRRRVAAHDAAVRRHAGDVAGGERGHPQHVRDHQLPGHGRGARRRQHRAQRHPSMQQQNHRVLFDVPNGRVGFARERCTAA

SEQ ID NO: 18111 - protein, 263 aa, Zea mays subsp. mays
  peptide (1)..(263): Ceres Seq. ID no. 15180129
MYEATFSYCLPSFKSLNFSGTLRLGRNGQPQRIKTTPLLANPHRSSLYYVNMTGVRVGRKVVPIPAFDPATGAGTVLDSGTMFTRLVAPAYVAVRDEVRRRVGAPVSSLGGFDTCFNTTAVAWPPMTLLFDGMQVTLPEENVVIHSTYATISCLAMAAAPDGVNTVLNVIPACSSRTTVCSSTCPTDASASRASAALPLDQLARAPARGLGFGLYLVKPTFYGCGRHALLSEWVINNLTFLFFLISLLFRFTICVSHSPRYVV

SEQ ID NO: 18112 - DNA, 625 bp, Zea mays subsp. mays
  misc_feature (1)..(625): Ceres Seq. ID no. 13491331
  misc_feature (1)..(625): Ortholog of  Ceres SEQ ID NO 15170788 as cited in SEQ ID NO 52635
  misc_feature (1)..(625): Ortholog of  Ceres SEQ ID NO 13638058 as cited in SEQ ID NO 55054
  misc_feature (1)..(625): Ortholog of  Ceres SEQ ID NO 15170362 as cited in SEQ ID NO 57883
  misc_feature (1)..(625): Ortholog of  Ceres SEQ ID NO 14303297 as cited in SEQ ID NO 67765
atttgactgggattcaggtgacggcacaagaagtgtcaacgatgctccggtgggggcacaacagcatcatcttcctgataaacaatggagggtacacaatcgaggtggagattcacgatggcccttataacgttatcaagaactggaactacaccggtctggtggaagcgttccacaatggcgagggcgcgtgctacacagcaaaggttcgaacagaggaggagctgacggaggcactggaggcagctctgggacctaagaaggactgcttatgcttcatcgaggtcatcgtgcataaggatgacaccagcaaagagcttctcgagtggggatctagggtttctgcggcgaatagccgtccacctaatcctcagtgaatacatcaggtctcccgaattgtcctgtaaaccgatccgctttctggtgacgtccatagcaagaagtctcggcgatgacatgctgccgatttctgaataaatcgtccctgcaattcactggtgttgaagtcctcgttgtaaagatacaaagacgtttggaagaatcactgacaacgtaaactctacgtatcttacgtgaaatagccccgtgatctacatatatataaagcagattttgagagtactag

SEQ ID NO: 18113 - protein, 124 aa, Zea mays subsp. mays
  peptide (1)..(124): Ceres Seq. ID no. 13491332
LTGIQVTAQEVSTMLRWGHNSIIFLINNGGYTIEVEIHDGPYNVIKNWNYTGLVEAFHNGEGACYTAKVRTEEELTEALEAALGPKKDCLCFIEVIVHKDDTSKELLEWGSRVSAANSRPPNPQ

SEQ ID NO: 18114 - protein, 111 aa, Zea mays subsp. mays
  peptide (1)..(111): Ceres Seq. ID no. 13491333
MLRWGHNSIIFLINNGGYTIEVEIHDGPYNVIKNWNYTGLVEAFHNGEGACYTAKVRTEEELTEALEAALGPKKDCLCFIEVIVHKDDTSKELLEWGSRVSAANSRPPNPQ

SEQ ID NO: 18115 - DNA, 796 bp, Zea mays subsp. mays
  misc_feature (1)..(796): Ceres Seq. ID no. 12454792
  misc_feature (1)..(796): Ortholog of  Ceres SEQ ID NO 12584771 as cited in SEQ ID NO 62314
aacatcaacaccagacagcactacagtctacagcagcagggcaccaccaccacagcaatgcagcagaacgccgcccgcctgctggccgccgccgtggcctgcctggcgctggcgctggcgccatcctcggacgcgcaggggacggcggtgccgtcgtgcgcggcgaagcttgtgccgtgcacggggtacctcaactccacgtccacggcggcgcccgcggcggcctgctgcgggccgctcagggaggcagcggccaacgagacggcgtgcctctgcgccatgctgctcaacagggccgcgctgcgggcgttcggcgtggcgcccgagcagggcctggtcctcgcccggcggtgcaacgtcaccaccgacgcctccgcctgcgccgccgccggaggctcagccacgggcggcagtactgctgcatcttcagcttccaccggcagcgcttcctcctcctcctctttcttcttcagtggccaaaccaacagccaacggaggcggcgtggcgcgtcgcctgagcatgactggcgcgtcctcattgctaggcttcagtttcatctggtggtgggcggtcatggcgtaggagtatctgccgtggcaccggcgattttcctggctggatccagaattccagacttatatgtactactgttgagtagcaggtttcattgcttctttttatatataatatgccctgttgtaccactaccattgatgccgtgagcagaacaagagaaaaaaattgtcaagaacgatgcaaacaaccagaaggaaagaacgtactctcattttaaat

SEQ ID NO: 18116 - protein, 240 aa, Zea mays subsp. mays
  peptide (1)..(240): Ceres Seq. ID no. 12454793
NINTRQHYSLQQQGTTTTAMQQNAARLLAAAVACLALALAPSSDAQGTAVPSCAAKLVPCTGYLNSTSTAAPAAACCGPLREAAANETACLCAMLLNRAALRAFGVAPEQGLVLARRCNVTTDASACAAAGGSATGGSTAASSASTGSASSSSSFFFSGQTNSQRRRRGASPEHDWRVLIARLQFHLVVGGHGVGVSAVAPAIFLAGSRIPDLYVLLLSSRFHCFFLYIICPVVPLPLMP

SEQ ID NO: 18117 - protein, 221 aa, Zea mays subsp. mays
  peptide (1)..(221): Ceres Seq. ID no. 12454794
MQQNAARLLAAAVACLALALAPSSDAQGTAVPSCAAKLVPCTGYLNSTSTAAPAAACCGPLREAAANETACLCAMLLNRAALRAFGVAPEQGLVLARRCNVTTDASACAAAGGSATGGSTAASSASTGSASSSSSFFFSGQTNSQRRRRGASPEHDWRVLIARLQFHLVVGGHGVGVSAVAPAIFLAGSRIPDLYVLLLSSRFHCFFLYIICPVVPLPLMP

SEQ ID NO: 18118 - protein, 193 aa, Zea mays subsp. mays
  peptide (1)..(193): Ceres Seq. ID no. 12454795
TSTPDSTTVYSSRAPPPQQCSRTPPACWPPPWPAWRWRWRHPRTRRGRRCRRARRSLCRARGTSTPRPRRRPRRPAAGRSGRQRPTRRRASAPCCSTGPRCGRSAWRPSRAWSSPGGATSPPTPPPAPPPEAQPRAAVLLHLQLPPAALPPPPLSSSVAKPTANGGGVARRLSMTGASSLLGFSFIWWWAVMA

SEQ ID NO: 18119 - DNA, 468 bp, Zea mays subsp. mays
  misc_feature (1)..(468): Ceres Seq. ID no. 2790932
  misc_feature (1)..(468): Ortholog of  Ceres SEQ ID NO 13584899 as cited in SEQ ID NO 64830
  misc_feature (1)..(468): Ortholog of  Ceres SEQ ID NO 13596128 as cited in SEQ ID NO 67831
  misc_feature (1)..(468): Ortholog of  Ceres SEQ ID NO 12585194 as cited in SEQ ID NO 68878
  misc_feature (1)..(468): Ortholog of  Ceres SEQ ID NO 12589186 as cited in SEQ ID NO 0
gtagtacatcacgagtgctccaaacaaatagagttttccttcaccgagccagacccagaagaaggggagccggaggtagaaagaccagagaagatggcgaccaccgagccggcggcggtgaggctggtgggctccttcgccagcccgttcgtccaccgcgccgaggtggccctgcgcctcaaaggggtgccctacgagctcatcctggaggacctgggcaacaagagcgagctgctgctggcacacaaccccgtgcacaaactcgtgcccgtgctcctccacggcgacagggccatctccgagtcgctcgtcatcctcgagtacgtcgacgaggccttcgacgggccgcctctcctccccgcggaaccccacgcgagggcggacgcgcggttctgggcccacttcatcgaccaaaagttcgcgcggccgttctggatgtcgttctggacggacgacgaggagcgcagg

SEQ ID NO: 18120 - protein, 156 aa, Zea mays subsp. mays
  peptide (1)..(156): Ceres Seq. ID no. 2790933
VVHHECSKQIEFSFTEPDPEEGEPEVERPEKMATTEPAAVRLVGSFASPFVHRAEVALRLKGVPYELILEDLGNKSELLLAHNPVHKLVPVLLHGDRAISESLVILEYVDEAFDGPPLLPAEPHARADARFWAHFIDQKFARPFWMSFWTDDEERR

SEQ ID NO: 18121 - protein, 155 aa, Zea mays subsp. mays
  peptide (1)..(155): Ceres Seq. ID no. 2790934
STSRVLQTNRVFLHRARPRRRGAGGRKTREDGDHRAGGGEAGGLLRQPVRPPRRGGPAPQRGALRAHPGGPGQQERAAAGTQPRAQTRARAPPRRQGHLRVARHPRVRRRGLRRAASPPRGTPREGGRAVLGPLHRPKVRAAVLDVVLDGRRGAQ

SEQ ID NO: 18122 - protein, 125 aa, Zea mays subsp. mays
  peptide (1)..(125): Ceres Seq. ID no. 2790935
MATTEPAAVRLVGSFASPFVHRAEVALRLKGVPYELILEDLGNKSELLLAHNPVHKLVPVLLHGDRAISESLVILEYVDEAFDGPPLLPAEPHARADARFWAHFIDQKFARPFWMSFWTDDEERR

SEQ ID NO: 18123 - DNA, 693 bp, Zea mays subsp. mays
  misc_feature (1)..(693): Ceres Seq. ID no. 12359278
  misc_feature (1)..(693): Ortholog of  Ceres SEQ ID NO 15225415 as cited in SEQ ID NO 0
agcaaacaagagctaagctactagagacatggccgacaaccttatcaagcccgtggctttgctgctgctgctcctgaacctgtgcatgtacgtcatcctggccatcatcggcggctgggctctgaacgtggccatcgaccgcggcttcatcatcggcccggagctgcggcttcccgcgcatttccaccctatcttcttccccatcggcaacttcgccaccggcttcttcgtcctcttctccctcatagcgggcgtcgtcgggatcgcctccgccatggtgggcttcaaccacctccgcttctggaactacgaaagccagcagcccgcggcggcgttggggattgtggcgtgggcgctcacagtcctagccatgggcctagcttgtcaggaaatctctttcgaccgaagaaacgccaagctgggcaccatggagaccttcaccatcatcctaacagtgacgcagttcttctacgtgctcgcgatacgcgggggaaggcacggacccgtccacgtggagcgccgcggcaactttgcatgaaagaccaccgacaaatattcattcatttgtgcacgtaccgtccatggagaccttcactattaattcgtttgctggattcgttaattatttcattattgtttgacagtttcatatggatggaatggaatggactccaagattattggtttgattcc

SEQ ID NO: 18124 - protein, 169 aa, Zea mays subsp. mays
  peptide (1)..(169): Ceres Seq. ID no. 12359279
MADNLIKPVALLLLLLNLCMYVILAIIGGWALNVAIDRGFIIGPELRLPAHFHPIFFPIGNFATGFFVLFSLIAGVVGIASAMVGFNHLRFWNYESQQPAAALGIVAWALTVLAMGLACQEISFDRRNAKLGTMETFTIILTVTQFFYVLAIRGGRHGPVHVERRGNFA

SEQ ID NO: 18125 - protein, 150 aa, Zea mays subsp. mays
  peptide (1)..(150): Ceres Seq. ID no. 12359280
MYVILAIIGGWALNVAIDRGFIIGPELRLPAHFHPIFFPIGNFATGFFVLFSLIAGVVGIASAMVGFNHLRFWNYESQQPAAALGIVAWALTVLAMGLACQEISFDRRNAKLGTMETFTIILTVTQFFYVLAIRGGRHGPVHVERRGNFA

SEQ ID NO: 18126 - protein, 87 aa, Zea mays subsp. mays
  peptide (1)..(87): Ceres Seq. ID no. 12359281
MVGFNHLRFWNYESQQPAAALGIVAWALTVLAMGLACQEISFDRRNAKLGTMETFTIILTVTQFFYVLAIRGGRHGPVHVERRGNFA

SEQ ID NO: 18127 - DNA, 1071 bp, Zea mays subsp. mays
  misc_feature (1)..(1071): Ceres Seq. ID no. 13503114
  misc_feature (1)..(1071): Ortholog of  Ceres SEQ ID NO 15174082 as cited in SEQ ID NO 61896
  misc_feature (1)..(1071): Ortholog of  Ceres SEQ ID NO 13655598 as cited in SEQ ID NO 64077
atcagcggcctgataagctatagccatcttcttctcttctctgaattccagtccaagggccggaataccgtcagagcagagggagtgggaggaagaaaaaaaaaagatggtgaagctcgcatttggaagctttcgcgactctttgagcgccgcgtcgctcaaggcctatgtggccgagttcatcgccacgctgctcttcgtgttcgccggcgtcgggtccgccattgcctactcgcaattgacgaagggcggcgctctggaccccgccggcctggtggccatcgccatcgcccatgcgttcgcgctcttcgtcggcgtctccatggccgccaacatctccggcggccacctgaaccccgccgtcaccttcggcctcgccgtcggcggccacatcaccatcctcaccggcatcctctactgggttgcccagcttctcggcgcttccgtggcgtgctttctcctgcagtacgtcacacacggacaggctatcccgacgcacggcgtctccgggatcagcgagatcgagggcgtggtgatggagatcgtgatcaccttcgcgctggtgtacaccgtgtacgccaccgcggccgacccgaagaaggggtccctgggcaccatcgcgcccatggccatcggcttcatcgtcggcgccaacatcctggccgccggccccttcagcggcggctccatgaacccggcccgctccttcggccccgccgtggcggccggtaacttcgccggcaactgggtgtactgggtcggccccctcgtcggcggtggcctggcggggcccgtctacggcgacgtgttcatcgcctcctaccagccggtcggccagcaggagtacccatgaaagtccggagctagcccgatcgatccgtctgtgttgatttcaccatcgtcgtcgtcgtgtcacctggcgcttcgtgctgtaatcatgtttggtcctgtttgcatttcccaacgtctggttttcatttccattcaccaacggtgccaagatgccgtactgtaagcgagagaagtgttcggtctgtatctgtataaatgcaatgcacagttcggcgtttc

SEQ ID NO: 18128 - protein, 248 aa, Zea mays subsp. mays
  peptide (1)..(248): Ceres Seq. ID no. 13503115
MVKLAFGSFRDSLSAASLKAYVAEFIATLLFVFAGVGSAIAYSQLTKGGALDPAGLVAIAIAHAFALFVGVSMAANISGGHLNPAVTFGLAVGGHITILTGILYWVAQLLGASVACFLLQYVTHGQAIPTHGVSGISEIEGVVMEIVITFALVYTVYATAADPKKGSLGTIAPMAIGFIVGANILAAGPFSGGSMNPARSFGPAVAAGNFAGNWVYWVGPLVGGGLAGPVYGDVFIASYQPVGQQEYP

SEQ ID NO: 18129 - protein, 243 aa, Zea mays subsp. mays
  peptide (1)..(243): Ceres Seq. ID no. 13503116
ISGLISYSHLLLFSEFQSKGRNTVRAEGVGGRKKKDGEARIWKLSRLFERRVAQGLCGRVHRHAALRVRRRRVRHCLLAIDEGRRSGPRRPGGHRHRPCVRALRRRLHGRQHLRRPPEPRRHLRPRRRRPHHHPHRHPLLGCPASRRFRGVLSPAVRHTRTGYPDARRLRDQRDRGRGDGDRDHLRAGVHRVRHRGRPEEGVPGHHRAHGHRLHRRRQHPGRRPLQRRLHEPGPLLRPRRGGR

SEQ ID NO: 18130 - protein, 176 aa, Zea mays subsp. mays
  peptide (1)..(176): Ceres Seq. ID no. 13503117
MAANISGGHLNPAVTFGLAVGGHITILTGILYWVAQLLGASVACFLLQYVTHGQAIPTHGVSGISEIEGVVMEIVITFALVYTVYATAADPKKGSLGTIAPMAIGFIVGANILAAGPFSGGSMNPARSFGPAVAAGNFAGNWVYWVGPLVGGGLAGPVYGDVFIASYQPVGQQEYP

SEQ ID NO: 18131 - DNA, 938 bp, Zea mays subsp. mays
  misc_feature (1)..(938): Ceres Seq. ID no. 12359282
  misc_feature (1)..(938): Ortholog of  Ceres SEQ ID NO 13599568 as cited in SEQ ID NO 509
  misc_feature (1)..(938): Ortholog of  Ceres SEQ ID NO 15172903 as cited in SEQ ID NO 51839
  misc_feature (1)..(938): Ortholog of  Ceres SEQ ID NO 15177108 as cited in SEQ ID NO 52015
  misc_feature (1)..(938): Ortholog of  Ceres SEQ ID NO 13638595 as cited in SEQ ID NO 52050
  misc_feature (1)..(938): Ortholog of  Ceres SEQ ID NO 13594748 as cited in SEQ ID NO 52114
  misc_feature (1)..(938): Ortholog of  Ceres SEQ ID NO 15170313 as cited in SEQ ID NO 59293
  misc_feature (1)..(938): Ortholog of  Ceres SEQ ID NO 12623490 as cited in SEQ ID NO 61136
  misc_feature (1)..(938): Ortholog of  Ceres SEQ ID NO 15173596 as cited in SEQ ID NO 63267
  misc_feature (1)..(938): Ortholog of  Ceres SEQ ID NO 12583993 as cited in SEQ ID NO 68098
  misc_feature (1)..(938): Ortholog of  Ceres SEQ ID NO 13654535 as cited in SEQ ID NO 68227
  misc_feature (1)..(938): Ortholog of  Ceres SEQ ID NO 13589319 as cited in SEQ ID NO 0
acacttcactcacccatccaccgcaaacgccaaacggccggcacacaactacacaagccgctggcaaagatggcctcctccttggtcctcatcgcagcggccctgcttgcgctggcctcgtcgtggcagcaggccatcgcctacgatcctagccccctccaggacttctgtgtcgcagacaagaactcgcctgttcgcgtcaacgggttcccttgcaaggacccgatggcggtcaccccggacgacttcttcaacgcggcgatgatcatcgacaagcggagggacacgaacaacaaggtggggtccaacgtcaccaacgtgaacgtggagagcttcccggggctgaacacgctgggcatctcgctggcgcgcatcgactacgcgccgctcggggtgaacccgccgcacatccacccacgcgctaccgagctgctcaccgtgctcgagggcaccctctacctcggcttcgtcacgtccaaccccaaccgcctcttctccaaggtggtcaagaagggcgacgtcttcgtcttccccaaggccatgatccacttccagatgaacctggaccacgacaagcccgccgcggcgctctcgtcgctcagcagccagaaccctggcgtcatcaccatcgccagcgccgtcttcggctccaagccgcccatctcggacgacgtcttggccaaggcgttccaggtggagaagaaactcatcgactggctccagtctcagttctgggataccaactactagctgcctagctagctagtaatatacttgcttgcttatttgttgcatatacatgcaccaccaacacaagccttatattaattacgtacgtacatctatgtataatatcgaataaatggccggtatgcatttggaggagtgaaacttattactgtgcgtgattaataatatttaatgtaaacttttcattg

SEQ ID NO: 18132 - protein, 249 aa, Zea mays subsp. mays
  peptide (1)..(249): Ceres Seq. ID no. 12359283
TLHSPIHRKRQTAGTQLHKPLAKMASSLVLIAAALLALASSWQQAIAYDPSPLQDFCVADKNSPVRVNGFPCKDPMAVTPDDFFNAAMIIDKRRDTNNKVGSNVTNVNVESFPGLNTLGISLARIDYAPLGVNPPHIHPRATELLTVLEGTLYLGFVTSNPNRLFSKVVKKGDVFVFPKAMIHFQMNLDHDKPAAALSSLSSQNPGVITIASAVFGSKPPISDDVLAKAFQVEKKLIDWLQSQFWDTNY

SEQ ID NO: 18133 - protein, 226 aa, Zea mays subsp. mays
  peptide (1)..(226): Ceres Seq. ID no. 12359284
MASSLVLIAAALLALASSWQQAIAYDPSPLQDFCVADKNSPVRVNGFPCKDPMAVTPDDFFNAAMIIDKRRDTNNKVGSNVTNVNVESFPGLNTLGISLARIDYAPLGVNPPHIHPRATELLTVLEGTLYLGFVTSNPNRLFSKVVKKGDVFVFPKAMIHFQMNLDHDKPAAALSSLSSQNPGVITIASAVFGSKPPISDDVLAKAFQVEKKLIDWLQSQFWDTNY

SEQ ID NO: 18134 - protein, 174 aa, Zea mays subsp. mays
  peptide (1)..(174): Ceres Seq. ID no. 12359285
MAVTPDDFFNAAMIIDKRRDTNNKVGSNVTNVNVESFPGLNTLGISLARIDYAPLGVNPPHIHPRATELLTVLEGTLYLGFVTSNPNRLFSKVVKKGDVFVFPKAMIHFQMNLDHDKPAAALSSLSSQNPGVITIASAVFGSKPPISDDVLAKAFQVEKKLIDWLQSQFWDTNY

SEQ ID NO: 18135 - DNA, 679 bp, Zea mays subsp. mays
  misc_feature (1)..(679): Ceres Seq. ID no. 12377122
  misc_feature (1)..(679): Ortholog of  Ceres SEQ ID NO 13663426 as cited in SEQ ID NO 66312
aagggcgagcaaaactggaagcctacgaaaatggtggagctcacctccttatccccagggccaccacgtccttctcggctgactcctcgccgccggccgccgccgccgacacctcatgttcatacctcctcgcgtcgtcgcgggaggatcctcggcgccgcgaccgccacgcctggcgccgacgactaccactccaccatccgctccctcaactcccgcggccgccacgtcccccgaaaatccctcgggcaggtcatcccgctgaccccagaatccgcgccacccacaggcgggctcaccattcaccacgtaccgacgcgtctctcgtctccccgcagaactacacgctcaactccaaggtgaacgaggagctggtggcggcggcgggggtggaggagggtgacgtcgtgctcgagatcggcccaggcaccggctcgctcacttccgcgctgctccaggccggcgctaccgtctttgccgtcgagaaggtctgtaacgttgctttgctcggtgttccgtagctggactgctgaaagtgagagcgagccgctagggggaaaaattcgaaagatcttcctgagacgaaattgaaattgtgtgtaaaatggttactatcatctgtgtcactgtgtgtgattgtctcaaatctcaattgttgatgcctcaaaatgtagctctc

SEQ ID NO: 18136 - protein, 172 aa, Zea mays subsp. mays
  peptide (1)..(172): Ceres Seq. ID no. 12377123
GRAKLEAYENGGAHLLIPRATTSFSADSSPPAAAADTSCSYLLASSREDPRRRDRHAWRRRLPLHHPLPQLPRPPRPPKIPRAGHPADPRIRATHRRAHHSPRTDASLVSPQNYTLNSKVNEELVAAAGVEEGDVVLEIGPGTGSLTSALLQAGATVFAVEKVCNVALLGVP

SEQ ID NO: 18137 - protein, 120 aa, Zea mays subsp. mays
  peptide (1)..(120): Ceres Seq. ID no. 12377124
KGEQNWKPTKMVELTSLSPGPPRPSRLTPRRRPPPPTPHVHTSSRRRGRILGAATATPGADDYHSTIRSLNSRGRHVPRKSLGQVIPLTPESAPPTGGLTIHHVPTRLSSPRRTTRSTPR

SEQ ID NO: 18138 - protein, 110 aa, Zea mays subsp. mays
  peptide (1)..(110): Ceres Seq. ID no. 12377125
MVELTSLSPGPPRPSRLTPRRRPPPPTPHVHTSSRRRGRILGAATATPGADDYHSTIRSLNSRGRHVPRKSLGQVIPLTPESAPPTGGLTIHHVPTRLSSPRRTTRSTPR

SEQ ID NO: 18139 - DNA, 879 bp, Zea mays subsp. mays
  misc_feature (1)..(879): Ceres Seq. ID no. 12364309
  misc_feature (1)..(879): Ortholog of  Ceres SEQ ID NO 14311505 as cited in SEQ ID NO 51412
  misc_feature (1)..(879): Ortholog of  Ceres SEQ ID NO 13597462 as cited in SEQ ID NO 65069
gcacgagaccattacctagaacatcctaatcaaaaacacacctccgaagtcggaacctccctgccccaacacaatggcctcctccctcgccgcgcgccgcctcctctcccgcgcagccgccgtgcatggggtggagcgagtcggccatggtcgcgggggcgagggacgttggcgtgtcccctgccatcgtgggcgcatttccaaggaaggaggccgcccttgtggagtttttcatggatgactgcctccaacaactgatggatcgaattgatgctggagaaggagagcagttgaagaacttgatactgagtgagagactctcaaaacttgttcggatgaggctggaaatgcaggcaccttatatatctaagtggcctcaagcactgagtattcagtctcaaccagcaaacgtctcaacaagcttgaagcagcgagctatcctggtggatgagatatggcatgctgctggagattctgggtcagatattgattggtatgtgaaacgtacagtgcttggtggtatctactcaacctcagaggtgtatatgttgacagacaattctccagagttccgtgatacttggacgtttgtgaaccgcagaataaaggatgctcttgatcttcagaaaaccttccaagaggccgcatacctcgctgaagccgtgggagcaggcatgagcggtaccgtgcagggtgttctcaacagggtcttccagaaccgtagtggatgaactttctttttctcaaacacgtagtgtggatggactaattccgtcttttgcacgctgcacaggataaagcacattttcccgttgaccaactggcgtatgtttataataaagcaaatggtgatgtggttgagatgcatcacgttagggt

SEQ ID NO: 18140 - protein, 201 aa, Zea mays subsp. mays
  peptide (1)..(201): Ceres Seq. ID no. 12364310
MGWSESAMVAGARDVGVSPAIVGAFPRKEAALVEFFMDDCLQQLMDRIDAGEGEQLKNLILSERLSKLVRMRLEMQAPYISKWPQALSIQSQPANVSTSLKQRAILVDEIWHAAGDSGSDIDWYVKRTVLGGIYSTSEVYMLTDNSPEFRDTWTFVNRRIKDALDLQKTFQEAAYLAEAVGAGMSGTVQGVLNRVFQNRSG

SEQ ID NO: 18141 - protein, 194 aa, Zea mays subsp. mays
  peptide (1)..(194): Ceres Seq. ID no. 12364311
MVAGARDVGVSPAIVGAFPRKEAALVEFFMDDCLQQLMDRIDAGEGEQLKNLILSERLSKLVRMRLEMQAPYISKWPQALSIQSQPANVSTSLKQRAILVDEIWHAAGDSGSDIDWYVKRTVLGGIYSTSEVYMLTDNSPEFRDTWTFVNRRIKDALDLQKTFQEAAYLAEAVGAGMSGTVQGVLNRVFQNRSG

SEQ ID NO: 18142 - protein, 165 aa, Zea mays subsp. mays
  peptide (1)..(165): Ceres Seq. ID no. 12364312
MDDCLQQLMDRIDAGEGEQLKNLILSERLSKLVRMRLEMQAPYISKWPQALSIQSQPANVSTSLKQRAILVDEIWHAAGDSGSDIDWYVKRTVLGGIYSTSEVYMLTDNSPEFRDTWTFVNRRIKDALDLQKTFQEAAYLAEAVGAGMSGTVQGVLNRVFQNRSG

SEQ ID NO: 18143 - DNA, 1394 bp, Zea mays subsp. mays
  misc_feature (1)..(1394): Ceres Seq. ID no. 13494608
  misc_feature (1)..(1394): Ortholog of  Ceres SEQ ID NO 12616181 as cited in SEQ ID NO 63343
aatcgaaaagatttgttttgatttctgagccttctcttgtgtcgttctgtgttgggttgcggacgcgtcctcaactaggtttttcttccatcatttgtgtgttcgttcaactgagccgccatgcgccagccacggtccgggccggggaagaggcggggccgcggtccgcgcatccctgcggcgacgcttcagaagcagaaaacggcgttggcgaacgtcgaccagatcaccggcgccaagattccgaagagcttcgtattctcccgcggtaaactcccctccacgcttcgccatcttcagcaggacctccgcaaggtcatgctcccctacactgctctcaatctcaaggagaagaaacgaaataacctcaaggattttgtcaatgttgccggcccgatgggtgtgacacatttcttaatcctctcaaaccctcaaagcctgccacatttgcgctttgccaaatcaccgcagggcccaacattcacatttcagatagaggagtactcacttgcggcggacattgcaaactctcagaagcgcccaaggtgcccaccagggatattcaaaaactcaccactggttgtacttggtgggttgacaggtctcggcaaccctttcaggagtttggtcgaatacttccaacatatgttcccttccgttgacccaaccactgtcaagctggcaacatgccaaaggattctgttgttaaaacatgataaagagaaggatgttattgaattccggcattactccatcaagctccagcctgttggggtcagtcgcaggattagaaagctcatgcaaaacaatcaagtgcctgatctaggagaatttgaagatgttagtgagtttgtgaaaaaagctgggtatggatcagaaagtgaagcagacgatgaagcagcaatggtaagcttgccaagtgacattgacaaattaaaccgggcatccagaaaaagcgctgtcagactccaggagattggaccaaggatgactatgcgcctagttaaagttgaagctgggctatgttcaggagatgtcttatacccatggcctgtggaaaaggaagtggtgggaaagaaaggaacagaaactggggaagtagaagggcaagaagacgattctgaggccacagatgagtccgaggatgagatggtgtaggatttcagatgttttggacaggcagacgcaggtgttttgacagtcctggatgtttcatgctgaaaccaacgggccctgtgcccaataacgtggtgcattcatgccaattttgtcactgaaggtgcattgcattcgttgtaacgaagtgtaacattgttttgccgatggttacctcttttgtgttatgacaagtttggaggatagtttttggttcgcagtctaagatttctcattct

SEQ ID NO: 18144 - protein, 345 aa, Zea mays subsp. mays
  peptide (1)..(345): Ceres Seq. ID no. 13494609
MRQPRSGPGKRRGRGPRIPAATLQKQKTALANVDQITGAKIPKSFVFSRGKLPSTLRHLQQDLRKVMLPYTALNLKEKKRNNLKDFVNVAGPMGVTHFLILSNPQSLPHLRFAKSPQGPTFTFQIEEYSLAADIANSQKRPRCPPGIFKNSPLVVLGGLTGLGNPFRSLVEYFQHMFPSVDPTTVKLATCQRILLLKHDKEKDVIEFRHYSIKLQPVGVSRRIRKLMQNNQVPDLGEFEDVSEFVKKAGYGSESEADDEAAMVSLPSDIDKLNRASRKSAVRLQEIGPRMTMRLVKVEAGLCSGDVLYPWPVEKEVVGKKGTETGEVEGQEDDSEATDESEDEMV

SEQ ID NO: 18145 - protein, 279 aa, Zea mays subsp. mays
  peptide (1)..(279): Ceres Seq. ID no. 13494610
MLPYTALNLKEKKRNNLKDFVNVAGPMGVTHFLILSNPQSLPHLRFAKSPQGPTFTFQIEEYSLAADIANSQKRPRCPPGIFKNSPLVVLGGLTGLGNPFRSLVEYFQHMFPSVDPTTVKLATCQRILLLKHDKEKDVIEFRHYSIKLQPVGVSRRIRKLMQNNQVPDLGEFEDVSEFVKKAGYGSESEADDEAAMVSLPSDIDKLNRASRKSAVRLQEIGPRMTMRLVKVEAGLCSGDVLYPWPVEKEVVGKKGTETGEVEGQEDDSEATDESEDEMV

SEQ ID NO: 18146 - protein, 253 aa, Zea mays subsp. mays
  peptide (1)..(253): Ceres Seq. ID no. 13494611
MGVTHFLILSNPQSLPHLRFAKSPQGPTFTFQIEEYSLAADIANSQKRPRCPPGIFKNSPLVVLGGLTGLGNPFRSLVEYFQHMFPSVDPTTVKLATCQRILLLKHDKEKDVIEFRHYSIKLQPVGVSRRIRKLMQNNQVPDLGEFEDVSEFVKKAGYGSESEADDEAAMVSLPSDIDKLNRASRKSAVRLQEIGPRMTMRLVKVEAGLCSGDVLYPWPVEKEVVGKKGTETGEVEGQEDDSEATDESEDEMV

SEQ ID NO: 18147 - DNA, 1172 bp, Zea mays subsp. mays
  misc_feature (1)..(1172): Ceres Seq. ID no. 12350812
  misc_feature (1)..(1172): Ortholog of  Ceres SEQ ID NO 12625335 as cited in SEQ ID NO 63326
tgaatatgatgtttatacatggggttggaaagaatgtgttccaactggaagggttattggagaccagtcttcagttggaaccatggaaaaggatgaaaggcaaatggcaatggccactgaccaagtgagccctaggtcacaggtgtctaggacaagcagcggagcggcagctggttcctctgaaagcagaggcactgatgacagcacaaagcgacgaaagttgtctttagcaaaacatggacctgagagttcgacatccagtgatgaaagtctttcagcacccccttgtgttgtgacatttagtacaggagtgaaaatagtggctgtagccgctggtggtcgtcatacattagcactatcagatttaggtcaggtgtggggttggggatatggaggagaagggcaactaggtttgggttctagaatccgaactgtttcttctccccatcctgtaccgtgcattgaatcagcactatacaccaaggataggccatcagctatgaaaggtaacaaggctgctgaaggacatgtcagtaaagtcttgggaaattgcgtgagggcaattgcttgtggaggtcgtcacagtgctgtagtaacagattcaggagcacttcttacatttggatgggggctgtatggacagtgtggacaagggaatacagatgatgttttaagtccaacgtgtgtatcgtctatcctgggaatcaagatgcaagatgttgccgcaggtttgtggcacactgtatgtacatctgtagatggtgatgtgtattcgtttggaggaaaccagtttggacagcttggcactggttctgatcaggctgagactcttccaaaattggtagatgctacaagcctggagaataagaacgccagatccgtttcttgtggagctcgccatagtgctattataacagatgaaggtgaggtattctgctggggatggaacaagtatggccagcttggccttggcgactcaatggacaggaacgtgccttgcagtgtacgtgtggacgcttaccacccgctaaacgtatcatgtggctggtggcacaccttggtgctcgcggagtcgcctgcttgaaacctgacaaagaaattaccttagattgacaattttgttaggaacttgtaggctcgtgcaggtacggtgatgctgcatttcatcgtgt

SEQ ID NO: 18148 - protein, 360 aa, Zea mays subsp. mays
  peptide (1)..(360): Ceres Seq. ID no. 12350813
EYDVYTWGWKECVPTGRVIGDQSSVGTMEKDERQMAMATDQVSPRSQVSRTSSGAAAGSSESRGTDDSTKRRKLSLAKHGPESSTSSDESLSAPPCVVTFSTGVKIVAVAAGGRHTLALSDLGQVWGWGYGGEGQLGLGSRIRTVSSPHPVPCIESALYTKDRPSAMKGNKAAEGHVSKVLGNCVRAIACGGRHSAVVTDSGALLTFGWGLYGQCGQGNTDDVLSPTCVSSILGIKMQDVAAGLWHTVCTSVDGDVYSFGGNQFGQLGTGSDQAETLPKLVDATSLENKNARSVSCGARHSAIITDEGEVFCWGWNKYGQLGLGDSMDRNVPCSVRVDAYHPLNVSCGWWHTLVLAESPA

SEQ ID NO: 18149 - protein, 333 aa, Zea mays subsp. mays
  peptide (1)..(333): Ceres Seq. ID no. 12350814
MEKDERQMAMATDQVSPRSQVSRTSSGAAAGSSESRGTDDSTKRRKLSLAKHGPESSTSSDESLSAPPCVVTFSTGVKIVAVAAGGRHTLALSDLGQVWGWGYGGEGQLGLGSRIRTVSSPHPVPCIESALYTKDRPSAMKGNKAAEGHVSKVLGNCVRAIACGGRHSAVVTDSGALLTFGWGLYGQCGQGNTDDVLSPTCVSSILGIKMQDVAAGLWHTVCTSVDGDVYSFGGNQFGQLGTGSDQAETLPKLVDATSLENKNARSVSCGARHSAIITDEGEVFCWGWNKYGQLGLGDSMDRNVPCSVRVDAYHPLNVSCGWWHTLVLAESPA

SEQ ID NO: 18150 - protein, 326 aa, Zea mays subsp. mays
  peptide (1)..(326): Ceres Seq. ID no. 12350815
MAMATDQVSPRSQVSRTSSGAAAGSSESRGTDDSTKRRKLSLAKHGPESSTSSDESLSAPPCVVTFSTGVKIVAVAAGGRHTLALSDLGQVWGWGYGGEGQLGLGSRIRTVSSPHPVPCIESALYTKDRPSAMKGNKAAEGHVSKVLGNCVRAIACGGRHSAVVTDSGALLTFGWGLYGQCGQGNTDDVLSPTCVSSILGIKMQDVAAGLWHTVCTSVDGDVYSFGGNQFGQLGTGSDQAETLPKLVDATSLENKNARSVSCGARHSAIITDEGEVFCWGWNKYGQLGLGDSMDRNVPCSVRVDAYHPLNVSCGWWHTLVLAESPA

SEQ ID NO: 18151 - DNA, 740 bp, Zea mays subsp. mays
  misc_feature (1)..(740): Ceres Seq. ID no. 12337596
  misc_feature (1)..(740): Ortholog of  Ceres SEQ ID NO 14312216 as cited in SEQ ID NO 53930
  misc_feature (1)..(740): Ortholog of  Ceres SEQ ID NO 12779935 as cited in SEQ ID NO 66774
  misc_feature (1)..(740): Ortholog of  Ceres SEQ ID NO 13598695 as cited in SEQ ID NO 67368
  misc_feature (1)..(740): Ortholog of  Ceres SEQ ID NO 13591174 as cited in SEQ ID NO 68289
taccagcttcatgtacctcaaagccaaagcaatcacctgagctgtgtatgttcccacagtatgttgtcccgacaatgcgcacaccattgttcatacttaatgcagcctacgattcgtggcaggtcaagaacgtcctagcacctagtccagctgatccgaagaagacttgggcccaatgcaagcttgacatcaagagctgctccgccagccaactcacaaccttgcaaaatttcaggacagattttctggcagcactccctaaaacgcagtctgtaggcatgttcatcgactcatgcaatgctcactgccaatcaggatctcaagacacgtggctagccgatggttctcccacggttaacaagacgcaaattggtaaggcggtgggggactggtactacgatagggaggtccctcggcagattgattgcccgtatccctgcaacccaacttgcaagaaccgtgatgatgattggagcatttgtataagtagttcatgttatcgaaatgaaaacaataaaggatcacaacgcgcgcccgtagttgtagatgatgaattataaacacatatgactgagctcaaagttgtttaatcatcatctgttgcgaaatgaggaagacaattggtgtcttgaagctgtgttttcgactgtgtntaaagcgtaaatgtaacgtatattgtgtcttcgcctatgcttaagacattggactagttgattggtcaatttaatttattaaatgcc

SEQ ID NO: 18152 - protein, 185 aa, Zea mays subsp. mays
  peptide (1)..(185): Ceres Seq. ID no. 12337597
PASCTSKPKQSPELCMFPQYVVPTMRTPLFILNAAYDSWQVKNVLAPSPADPKKTWAQCKLDIKSCSASQLTTLQNFRTDFLAALPKTQSVGMFIDSCNAHCQSGSQDTWLADGSPTVNKTQIGKAVGDWYYDREVPRQIDCPYPCNPTCKNRDDDWSICISSSCYRNENNKGSQRAPVVVDDEL

SEQ ID NO: 18153 - protein, 170 aa, Zea mays subsp. mays
  peptide (1)..(170): Ceres Seq. ID no. 12337598
MFPQYVVPTMRTPLFILNAAYDSWQVKNVLAPSPADPKKTWAQCKLDIKSCSASQLTTLQNFRTDFLAALPKTQSVGMFIDSCNAHCQSGSQDTWLADGSPTVNKTQIGKAVGDWYYDREVPRQIDCPYPCNPTCKNRDDDWSICISSSCYRNENNKGSQRAPVVVDDEL

SEQ ID NO: 18154 - protein, 161 aa, Zea mays subsp. mays
  peptide (1)..(161): Ceres Seq. ID no. 12337599
MRTPLFILNAAYDSWQVKNVLAPSPADPKKTWAQCKLDIKSCSASQLTTLQNFRTDFLAALPKTQSVGMFIDSCNAHCQSGSQDTWLADGSPTVNKTQIGKAVGDWYYDREVPRQIDCPYPCNPTCKNRDDDWSICISSSCYRNENNKGSQRAPVVVDDEL

SEQ ID NO: 18155 - DNA, 658 bp, Zea mays subsp. mays
  misc_feature (1)..(658): Ceres Seq. ID no. 12435220
  misc_feature (1)..(658): Ortholog of  Ceres SEQ ID NO 14308107 as cited in SEQ ID NO 59030
  misc_feature (1)..(658): Ortholog of  Ceres SEQ ID NO 15226612 as cited in SEQ ID NO 62700
gagctgaacggttctgcttcctcccaatggccttgcaggatggcgacattatcaacatcgacgttactgtctacttaaacggataccatggggacacctcgaggacgtacctgtgcggagaagtcgacgacgcaactaagcagctcgtgaaggtcactgaagagtgcatgatgcgcggcatatcagcctgcaggcacggcgccagtttcaaggaaatcggccagagaataagtgagcacgcggagaagtacggatacggcatcgaccccttcgtggggcacggcgttgggaggatgttccactgcgagcccatcatatggcatacctacgattacgagcccgggttcatggtcgcaggccagacattcaccgtagagccgacgctgtcgatggggagcacgcagtgcgtggtgtgggacgacgggtggacggccgtggcggcggacggcagcctcagcgcgcagttcgagcacaccgtgctggtcaccggcgacggcgcggaggtcctgaccgggttcccgtagctgcctgcacgcatcacgtgagcggtgagcctgggtgggccactgcgtcggcgagggacggaactgcaggagcaggcatgcagctatgcgcacgctgacaattttattaaaaatctatgttggacggttgccgt

SEQ ID NO: 18156 - protein, 173 aa, Zea mays subsp. mays
  peptide (1)..(173): Ceres Seq. ID no. 12435221
AERFCFLPMALQDGDIINIDVTVYLNGYHGDTSRTYLCGEVDDATKQLVKVTEECMMRGISACRHGASFKEIGQRISEHAEKYGYGIDPFVGHGVGRMFHCEPIIWHTYDYEPGFMVAGQTFTVEPTLSMGSTQCVVWDDGWTAVAADGSLSAQFEHTVLVTGDGAEVLTGFP

SEQ ID NO: 18157 - protein, 165 aa, Zea mays subsp. mays
  peptide (1)..(165): Ceres Seq. ID no. 12435222
MALQDGDIINIDVTVYLNGYHGDTSRTYLCGEVDDATKQLVKVTEECMMRGISACRHGASFKEIGQRISEHAEKYGYGIDPFVGHGVGRMFHCEPIIWHTYDYEPGFMVAGQTFTVEPTLSMGSTQCVVWDDGWTAVAADGSLSAQFEHTVLVTGDGAEVLTGFP

SEQ ID NO: 18158 - protein, 118 aa, Zea mays subsp. mays
  peptide (1)..(118): Ceres Seq. ID no. 12435223
MMRGISACRHGASFKEIGQRISEHAEKYGYGIDPFVGHGVGRMFHCEPIIWHTYDYEPGFMVAGQTFTVEPTLSMGSTQCVVWDDGWTAVAADGSLSAQFEHTVLVTGDGAEVLTGFP

SEQ ID NO: 18159 - DNA, 760 bp, Zea mays subsp. mays
  misc_feature (1)..(760): Ceres Seq. ID no. 12416334
  misc_feature (1)..(760): Ortholog of  Ceres SEQ ID NO 14306309 as cited in SEQ ID NO 1394
  misc_feature (1)..(760): Ortholog of  Ceres SEQ ID NO 13595377 as cited in SEQ ID NO 56088
  misc_feature (1)..(760): Ortholog of  Ceres SEQ ID NO 13598648 as cited in SEQ ID NO 64497
acatcgcactctcctccagcctccaggcttggcaagcgtgcttcacatgaccacatccatgtcgaacagcgccgctagcgagaagcaatcgcagcaggcaggccacaggcagcggcccccggcggcgtcggccgcggacgcggagatgcagagggtgttctgccgcatcgacgcggacggcgacggccggatctccgcctcggagctggccgcggtgacgcgcgccatctccccgccagcgagctcctcgcacgggcgccgcgaggtggccgccatgatggacgagctggacacggaccgcgacggcttcgtggacctcggcgagttcagggcgttccacgcgcgcggcggcggcggcgtggacgacgacgccgagctccgcgccgccttcgacgtctacgacgtcgacggcgacggccgcgtcacggcggccgagctgggcaaggtgctcgcgcgcatcggcgagggcggatgcagcgccgaggagtgcgagcgggatggtcgccggcgtcgacgccgacggctgcgtcgggttcgaggacttcaagaagatgatgtgcccccagccgcaagccgaagccggcgccgccgggcgggacaaggcagaggccgaggccgaggacaaggaggagtgacgggtgtagtcaggggggaacgggaacggctggagttgtttgcgtctcgcgttcttttcacctgtacgcaggaaatactcctcctgcataagactacngnacttttggataaaaaattttatttc

SEQ ID NO: 18160 - protein, 253 aa, Zea mays subsp. mays
  peptide (1)..(253): Ceres Seq. ID no. 12416335
  misc_feature (244)..(244): Xaa is any aa, unknown or other
  misc_feature (245)..(245): Xaa is any aa, unknown or other
HRTLLQPPGLASVLHMTTSMSNSAASEKQSQQAGHRQRPPAASAADAEMQRVFCRIDADGDGRISASELAAVTRAISPPASSSHGRREVAAMMDELDTDRDGFVDLGEFRAFHARGGGGVDDDAELRAAFDVYDVDGDGRVTAAELGKVLARIGEGGCSAEECERDGRRRRRRRLRRVRGLQEDDVPPAASRSRRRRAGQGRGRGRGQGGVTGVVRGERERLELFASRVLFTCTQEILLLHKTXXLLDKKFYF

SEQ ID NO: 18161 - protein, 238 aa, Zea mays subsp. mays
  peptide (1)..(238): Ceres Seq. ID no. 12416336
  misc_feature (229)..(229): Xaa is any aa, unknown or other
  misc_feature (230)..(230): Xaa is any aa, unknown or other
MTTSMSNSAASEKQSQQAGHRQRPPAASAADAEMQRVFCRIDADGDGRISASELAAVTRAISPPASSSHGRREVAAMMDELDTDRDGFVDLGEFRAFHARGGGGVDDDAELRAAFDVYDVDGDGRVTAAELGKVLARIGEGGCSAEECERDGRRRRRRRLRRVRGLQEDDVPPAASRSRRRRAGQGRGRGRGQGGVTGVVRGERERLELFASRVLFTCTQEILLLHKTXXLLDKKFYF

SEQ ID NO: 18162 - protein, 234 aa, Zea mays subsp. mays
  peptide (1)..(234): Ceres Seq. ID no. 12416337
  misc_feature (225)..(225): Xaa is any aa, unknown or other
  misc_feature (226)..(226): Xaa is any aa, unknown or other
MSNSAASEKQSQQAGHRQRPPAASAADAEMQRVFCRIDADGDGRISASELAAVTRAISPPASSSHGRREVAAMMDELDTDRDGFVDLGEFRAFHARGGGGVDDDAELRAAFDVYDVDGDGRVTAAELGKVLARIGEGGCSAEECERDGRRRRRRRLRRVRGLQEDDVPPAASRSRRRRAGQGRGRGRGQGGVTGVVRGERERLELFASRVLFTCTQEILLLHKTXXLLDKKFYF

SEQ ID NO: 18163 - DNA, 765 bp, Zea mays subsp. mays
  misc_feature (1)..(765): Ceres Seq. ID no. 12367201
  misc_feature (1)..(765): Ortholog of  Ceres SEQ ID NO 13661767 as cited in SEQ ID NO 61423
gcacgagaccattacctagaacatcctaatcaaaaaggaacccactccaactgtgcggcgcgtccaaaaatacaaaaggcaagcgagcgagctccaagttcggctgctccaatttcactcggcatggctcctcaggcgtgggtcgtggcggagaacggcgaggacctccaacaacccagggaattcctgccgctctctaagcttgaagatgttggcgtgttgtattggcatttggaccctaagaagtctgaaagcgaggaggaactagcaaaaatccgcagagacagaggctacagttacatggatcttattgagatatgtcccgacaaactggaaaactatgaggagaaggtgaagaacttcttctgtgagcacatgcacgctgacgaagagatccgctattgcttggagggcagcgggtactttgacgtccgcgacaaagatgacaagtggattcgaattcggataagagaaggagacatgatcatcctaccagctggaatttatcatcggttcaccctcgacagcgctaaatacacgaagctcatgaggcttttcattggggaaccagtctggaccgcgttaaaccgccctcaggaggaccacccggcgaggcaagagtatgtcaagaatgtgagtgcgggcactggatttgctcttgcagcacactgaatatgttttttccctttcccgtgtataagaatatatggtcacttggattcatgtaccacgtcatagtatcatcatatggtatgacgcaaccgc

SEQ ID NO: 18164 - protein, 223 aa, Zea mays subsp. mays
  peptide (1)..(223): Ceres Seq. ID no. 12367202
ARDHYLEHPNQKGTHSNCAARPKIQKASERAPSSAAPISLGMAPQAWVVAENGEDLQQPREFLPLSKLEDVGVLYWHLDPKKSESEEELAKIRRDRGYSYMDLIEICPDKLENYEEKVKNFFCEHMHADEEIRYCLEGSGYFDVRDKDDKWIRIRIREGDMIILPAGIYHRFTLDSAKYTKLMRLFIGEPVWTALNRPQEDHPARQEYVKNVSAGTGFALAAH

SEQ ID NO: 18165 - protein, 182 aa, Zea mays subsp. mays
  peptide (1)..(182): Ceres Seq. ID no. 12367203
MAPQAWVVAENGEDLQQPREFLPLSKLEDVGVLYWHLDPKKSESEEELAKIRRDRGYSYMDLIEICPDKLENYEEKVKNFFCEHMHADEEIRYCLEGSGYFDVRDKDDKWIRIRIREGDMIILPAGIYHRFTLDSAKYTKLMRLFIGEPVWTALNRPQEDHPARQEYVKNVSAGTGFALAAH

SEQ ID NO: 18166 - protein, 123 aa, Zea mays subsp. mays
  peptide (1)..(123): Ceres Seq. ID no. 12367204
MDLIEICPDKLENYEEKVKNFFCEHMHADEEIRYCLEGSGYFDVRDKDDKWIRIRIREGDMIILPAGIYHRFTLDSAKYTKLMRLFIGEPVWTALNRPQEDHPARQEYVKNVSAGTGFALAAH

SEQ ID NO: 18167 - DNA, 1042 bp, Zea mays subsp. mays
  misc_feature (1)..(1042): Ceres Seq. ID no. 12416568
  misc_feature (1)..(1042): Ortholog of  Ceres SEQ ID NO 12626444 as cited in SEQ ID NO 66538
aattccacggaatctctcccagctgtcctgtttttccttccatggatccccctcgctagctgagcccgctggtgctcgcggtcgcgggtggtgagcgcggcctcgccggcggcgcagcggcgatggacctcccgtggctggatctgcccttcaccttcctgacgctgctccttgccacccgcctcgcctacgactactatggcgacgtcgccgccgccttcgccggcggcttctcgatccaggtcttcctcttctactgcttcgcgcgctggtaccgctacgccatcgccggccgcgccgccgccgccgctggggcccgcgacgacccgtcgccgtcggcgcggccgccgccgcagcaggaggaggacgcggacgccccgcccgtcctgacaccgctgctggggtcgccggacggcgcgcggccgtcgacgctggccaaccgttgcttcgccgtcgtgttcatggtcttcgtgccgctggtcatcgtcgtcttcgagcggagccaggccgacgtcgtggcctacgcgctctgcctcgccaacatcatcgtcatggtcgtctggctctcgccggacaccgggtcaacggtctcggccgccaagtcgctcctgcgtctcagcgacgacgaggatgaaggcagcgggggcagctccggcgcagaggacaagtgctgcgtctgcctcgccggcatgcgggaggaccaggcgcttcgggcgctgccgcggtgcggccacagcttccacgacaagtgcatcggcaagtggctcaaggcgcacccaacgtgccctgtgtgccgggccaccgccgtgccgccgccgctccacagcgggggcggcgatccgctagatgacgatattagccccgtctagctagcttcccctcagtgattcatccatcttatcttatctaacgaattttgtggacatttgttgggaaatttggtgaaaacctgtatagtaatccaaaacgttgtcaaggctcaattcaacatgtcaggtaggtgatttgtacatacggtcccgtttgtgcactctgagaaaag

SEQ ID NO: 18168 - protein, 248 aa, Zea mays subsp. mays
  peptide (1)..(248): Ceres Seq. ID no. 12416569
MDLPWLDLPFTFLTLLLATRLAYDYYGDVAAAFAGGFSIQVFLFYCFARWYRYAIAGRAAAAAGARDDPSPSARPPPQQEEDADAPPVLTPLLGSPDGARPSTLANRCFAVVFMVFVPLVIVVFERSQADVVAYALCLANIIVMVVWLSPDTGSTVSAAKSLLRLSDDEDEGSGGSSGAEDKCCVCLAGMREDQALRALPRCGHSFHDKCIGKWLKAHPTCPVCRATAVPPPLHSGGGDPLDDDISPV

SEQ ID NO: 18169 - protein, 135 aa, Zea mays subsp. mays
  peptide (1)..(135): Ceres Seq. ID no. 12416570
MVFVPLVIVVFERSQADVVAYALCLANIIVMVVWLSPDTGSTVSAAKSLLRLSDDEDEGSGGSSGAEDKCCVCLAGMREDQALRALPRCGHSFHDKCIGKWLKAHPTCPVCRATAVPPPLHSGGGDPLDDDISPV

SEQ ID NO: 18170 - DNA, 1052 bp, Zea mays subsp. mays
  misc_feature (1)..(1052): Ceres Seq. ID no. 12416671
  misc_feature (1)..(1052): Ortholog of  Ceres SEQ ID NO 12466401 as cited in SEQ ID NO 20698
  misc_feature (1)..(1052): Ortholog of  Ceres SEQ ID NO 15224731 as cited in SEQ ID NO 63650
agcccctctcccgcagccgcagtcccagtcccacgcgcattccgccccgcggctcccgagagagagagatggccaggcacgccaagacggactccgacgtgacgagcctggcggcgtccacgccgccgcggtccccgcgcggccgcccggcctactacgtgctcagccccgccgcctcccacccggacgtccacctgggcgcctccggcggcgtggcggggaccaccccggcggagtcgccgctccactaccacttccaccaccaccgccaccactcgagcggcggcgccggtgtcggcgtgggcggcacgcaccactcccgggagtcctcgacggggcggctgctcttctccgaccagctccgctccggcggcgacgtcgccgcggtggtgagcgtcccctggcgccggctcgggaacggcagcggcgcgggcagcgtcggggacgaggacgacgacggcgcgtccctgcgcggcgggtcgttcgcggagtcgccgtggcggtgctacgcgctcggcgcggtcgcgttcgtcgccgtgatcgccttcttcctgatcgtgctgtggggcgccagcaggtcgtacaagccccacgtcgtcgtcaagagggtggtgttcgagtcgtaccacatccagggcggcacggaccggacgggcgtccctacngaagatgatgtcggtcaacgcgacggtgcggntgcgcttccgcaaccgcggcaccttcttcagcctgcacgtcacggccacgccgttcctcctcttctacggcgacctcaccgtcgcctccggagagatggcggagttctaccagccgcggaagagcgggcggacggtgacggtgtccgtggtggggaagcaggtgccgctctacggcgcgggcgccagcctgcacagcaagcccaacaacgggcgcctcggccctgcggtggtgcccgtcaggctcggcttcgtgctgcgttgtggttgcggacgaactgtgtaatcgattcctacgaaccgttctaatgtaacggcggcgtcgacaagatcacagatcgtgggcgcagcttggct

SEQ ID NO: 18171 - protein, 333 aa, Zea mays subsp. mays
  peptide (1)..(333): Ceres Seq. ID no. 12416672
  misc_feature (221)..(221): Xaa is any aa, unknown or other
  misc_feature (232)..(232): Xaa is any aa, unknown or other
PLSRSRSPSPTRIPPRGSREREMARHAKTDSDVTSLAASTPPRSPRGRPAYYVLSPAASHPDVHLGASGGVAGTTPAESPLHYHFHHHRHHSSGGAGVGVGGTHHSRESSTGRLLFSDQLRSGGDVAAVVSVPWRRLGNGSGAGSVGDEDDDGASLRGGSFAESPWRCYALGAVAFVAVIAFFLIVLWGASRSYKPHVVVKRVVFESYHIQGGTDRTGVPXEDDVGQRDGAXALPQPRHLLQPARHGHAVPPLLRRPHRRLRRDGGVLPAAEERADGDGVRGGEAGAALRRGRQPAQQAQQRAPRPCGGARQARLRAALWLRTNCVIDSYEPF

SEQ ID NO: 18172 - protein, 311 aa, Zea mays subsp. mays
  peptide (1)..(311): Ceres Seq. ID no. 12416673
  misc_feature (199)..(199): Xaa is any aa, unknown or other
  misc_feature (210)..(210): Xaa is any aa, unknown or other
MARHAKTDSDVTSLAASTPPRSPRGRPAYYVLSPAASHPDVHLGASGGVAGTTPAESPLHYHFHHHRHHSSGGAGVGVGGTHHSRESSTGRLLFSDQLRSGGDVAAVVSVPWRRLGNGSGAGSVGDEDDDGASLRGGSFAESPWRCYALGAVAFVAVIAFFLIVLWGASRSYKPHVVVKRVVFESYHIQGGTDRTGVPXEDDVGQRDGAXALPQPRHLLQPARHGHAVPPLLRRPHRRLRRDGGVLPAAEERADGDGVRGGEAGAALRRGRQPAQQAQQRAPRPCGGARQARLRAALWLRTNCVIDSYEPF

SEQ ID NO: 18173 - protein, 223 aa, Zea mays subsp. mays
  peptide (1)..(223): Ceres Seq. ID no. 12416674
  misc_feature (222)..(222): Xaa is any aa, unknown or other
APLPQPQSQSHAHSAPRLPRERDGQARQDGLRRDEPGGVHAAAVPARPPGLLRAQPRRLPPGRPPGRLRRRGGDHPGGVAAPLPLPPPPPPLERRRRCRRGRHAPLPGVLDGAAALLRPAPLRRRRRRGGERPLAPARERQRRGQRRGRGRRRRVPARRVVRGVAVAVLRARRGRVRRRDRLLPDRAVGRQQVVQAPRRRQEGGVRVVPHPGRHGPDGRPYXR

SEQ ID NO: 18174 - DNA, 1000 bp, Zea mays subsp. mays
  misc_feature (1)..(1000): Ceres Seq. ID no. 12362563
  misc_feature (1)..(1000): Ortholog of  Ceres SEQ ID NO 15173936 as cited in SEQ ID NO 61736
  misc_feature (1)..(1000): Ortholog of  Ceres SEQ ID NO 13596373 as cited in SEQ ID NO 67991
atagcaaaactcgtgctgacacaacacacaagcacaaattgtgaagtgcgtgacgccgcgaggggttaagtcagcaagcaagcaggcagatagccatggcagtcgcaagcgccgagaacacgtcgtcgctgctcccgctcgacggccgcgtagcgctggtcactggcggctcccgcggcattggccgcgaggtgtcctcccaactcgccaccctgggcgcgcgcgtcgtggtcaactacgcgtccaattccgccagggcagacgagctcgtcgcggagctcgcctcccgcggccaccaggccgtggccgtccgcgccgacgtgtcggacccggacgccgtgcacgcgctcttcgaccgcgccgaggaggcgttcgggtccccgccgcacatcgtcgtctgctgcgcgggcctcctcaatgccaagtacccggcgctcgcggacaccgccgtcgacgacttcgacgccatgttcgcggtgaacgtgcgcgggacgttcctcgtgtgccgcgaggcggcgaaccgcgtcccagccaacagcggcggccgcatcgtgacgttctcgtcgtccatcgttggcacgctcctgccgggatacgcggcgtacacggcgaccaacgccgccgtggaggcgatgacgaagatcctggccaaggaggtggcggcgaagggggtgaccgcgaacgtggtcgcgccggggcccgtgcgcaccgagctgttcttggccgggaaggacgaagcgttcctgcggagggtggagcagcagtccatgggccgcatcgccgagacgacggacgtggcgccggtggtggcgttcctggccagcgacgccgcggcttgggtcaacggccaggtcatcagggtcaacggcggttttgtctaataagggtccaaatgcgccagatgttcagatatagtggtatctgccatacgcaagtttaaaaaaaaacgcaaaaatgtgagtggcgtgtgtgtgttttaataaaaaaaatcaagttatgc

SEQ ID NO: 18175 - protein, 261 aa, Zea mays subsp. mays
  peptide (1)..(261): Ceres Seq. ID no. 12362564
MAVASAENTSSLLPLDGRVALVTGGSRGIGREVSSQLATLGARVVVNYASNSARADELVAELASRGHQAVAVRADVSDPDAVHALFDRAEEAFGSPPHIVVCCAGLLNAKYPALADTAVDDFDAMFAVNVRGTFLVCREAANRVPANSGGRIVTFSSSIVGTLLPGYAAYTATNAAVEAMTKILAKEVAAKGVTANVVAPGPVRTELFLAGKDEAFLRRVEQQSMGRIAETTDVAPVVAFLASDAAAWVNGQVIRVNGGFV

SEQ ID NO: 18176 - protein, 137 aa, Zea mays subsp. mays
  peptide (1)..(137): Ceres Seq. ID no. 12362565
MFAVNVRGTFLVCREAANRVPANSGGRIVTFSSSIVGTLLPGYAAYTATNAAVEAMTKILAKEVAAKGVTANVVAPGPVRTELFLAGKDEAFLRRVEQQSMGRIAETTDVAPVVAFLASDAAAWVNGQVIRVNGGFV

SEQ ID NO: 18177 - DNA, 965 bp, Zea mays subsp. mays
  misc_feature (1)..(965): Ceres Seq. ID no. 12391896
  misc_feature (1)..(965): Ortholog of  Ceres SEQ ID NO 15173803 as cited in SEQ ID NO 61759
atccacaatatgatccctggcctctcatcctccgaaaactccactccttcgtcatccatgcgtcccctccccgccgcggccatggccaccgcgacgctgcccctccgcctcctcccctccaaaacgctgactctctccactctcccctccctgcgccgctccctctccgtcgccgctttggagccccggcgctggcgcctccgagccgccgccgaggaggcgcctgaggccgtggaggttgagttcgtggagcccgagacggaggctgaggagaaacccgcggtaccggagcccatcgaggctcagctggccgccgcgggggccgggaaggacgcggacatcttcgctgttgtcatgattggttcaagacagtacatagtgatgccgggcaggtatatatacacacagagactgaaaggtgccaatgtcaatgatcagatcatattaaacaaggtgctactggtgtcaactagagaaaaagcttacattgggatgccagtggtgaccaatgctgctgttcacgcagtggttgaagaacagggacgggatgataaagttatagtgttcaagtacaagaagaagaagaagtaccagaggaaacttggtcacagacagccaaacacaaggttaagaatcacaggcataagtggatacgaagagtaccctgctgacccaatacttgaccctgctgcagctttaaattaaactgtaagttatgtagttacaaaacggctggtagtagagtagcatgctagttttcttgtttctttctttttttacttctctgtcttgaaaaaggaacacttttcatcacaattttccttgtttttgtgtgttccaaatgctgccagtcaaccaactgtaccatgagctatcttgttcttgttcttttttcacatcgtgtatgctactagccagttgtattgcacgaccggtcctaaagaagaggtttctttctttttgtt

SEQ ID NO: 18178 - protein, 234 aa, Zea mays subsp. mays
  peptide (1)..(234): Ceres Seq. ID no. 12391897
IHNMIPGLSSSENSTPSSSMRPLPAAAMATATLPLRLLPSKTLTLSTLPSLRRSLSVAALEPRRWRLRAAAEEAPEAVEVEFVEPETEAEEKPAVPEPIEAQLAAAGAGKDADIFAVVMIGSRQYIVMPGRYIYTQRLKGANVNDQIILNKVLLVSTREKAYIGMPVVTNAAVHAVVEEQGRDDKVIVFKYKKKKKYQRKLGHRQPNTRLRITGISGYEEYPADPILDPAAALN

SEQ ID NO: 18179 - protein, 231 aa, Zea mays subsp. mays
  peptide (1)..(231): Ceres Seq. ID no. 12391898
MIPGLSSSENSTPSSSMRPLPAAAMATATLPLRLLPSKTLTLSTLPSLRRSLSVAALEPRRWRLRAAAEEAPEAVEVEFVEPETEAEEKPAVPEPIEAQLAAAGAGKDADIFAVVMIGSRQYIVMPGRYIYTQRLKGANVNDQIILNKVLLVSTREKAYIGMPVVTNAAVHAVVEEQGRDDKVIVFKYKKKKKYQRKLGHRQPNTRLRITGISGYEEYPADPILDPAAALN

SEQ ID NO: 18180 - protein, 215 aa, Zea mays subsp. mays
  peptide (1)..(215): Ceres Seq. ID no. 12391899
MRPLPAAAMATATLPLRLLPSKTLTLSTLPSLRRSLSVAALEPRRWRLRAAAEEAPEAVEVEFVEPETEAEEKPAVPEPIEAQLAAAGAGKDADIFAVVMIGSRQYIVMPGRYIYTQRLKGANVNDQIILNKVLLVSTREKAYIGMPVVTNAAVHAVVEEQGRDDKVIVFKYKKKKKYQRKLGHRQPNTRLRITGISGYEEYPADPILDPAAALN

SEQ ID NO: 18181 - DNA, 802 bp, Zea mays subsp. mays
  misc_feature (1)..(802): Ceres Seq. ID no. 12416233
  misc_feature (1)..(802): Ortholog of  Ceres SEQ ID NO 12460981 as cited in SEQ ID NO 65146
acaaggtgatgagcccattcctgactcagcgcaccaagagcaagatcgtcttctgcagccccggcaagtcggcggagaccctcttcaggtacatcgccccggagcaagtccccgtccagttcggcggcctgtacaaggaggacgacaccgagttctccacctccgacgccgtcaccgagctcaccgtgaaaccgtcctccaaggagaccgtcgagatcccagccaccgagaactccaccgtggtgtgggagctccgcgtgctggggtgggaggtgagctacggcgccgagttcacccccgacgcggagggcggctacaccgtcatcgtgcagaagacgcggaaggtctccgcccacgaggagcccatcatgaagggcagcttcaaggccacggagcccggcaagctggtgctgggcgtgaacaacccggcgtccaggaagaagaagctgctgtgccggttcaaggtgaggagcgccnccgcctgatgagggtcgttggtctgggtcccagcaggtacagcctgccagctgcttgaccnccagcccgacatgtataattcgatcgatcgccaaccaggtccataccgccnccatttgaatgaacatgctgcattgcattacatgataggagagagagagagagagagagaggncaataaagagtttctgcttcctagctaggcccgttccgtgtcctggtcgttctttgattatttgttggcttgctgttcttttttttccttggggggagggtcgcgtttgnatgtgtttattncttgaatgaaaacaaaagtgagcttgtt

SEQ ID NO: 18182 - protein, 177 aa, Zea mays subsp. mays
  peptide (1)..(177): Ceres Seq. ID no. 12416234
  misc_feature (159)..(159): Xaa is any aa, unknown or other
QGDEPIPDSAHQEQDRLLQPRQVGGDPLQVHRPGASPRPVRRPVQGGRHRVLHLRRRHRAHRETVLQGDRRDPSHRELHRGVGAPRAGVGGELRRRVHPRRGGRLHRHRAEDAEGLRPRGAHHEGQLQGHGARQAGAGREQPGVQEEEAAVPVQGEERXRLMRVVGLGPSRYSLPAA

SEQ ID NO: 18183 - protein, 160 aa, Zea mays subsp. mays
  peptide (1)..(160): Ceres Seq. ID no. 12416235
  misc_feature (159)..(159): Xaa is any aa, unknown or other
KVMSPFLTQRTKSKIVFCSPGKSAETLFRYIAPEQVPVQFGGLYKEDDTEFSTSDAVTELTVKPSSKETVEIPATENSTVVWELRVLGWEVSYGAEFTPDAEGGYTVIVQKTRKVSAHEEPIMKGSFKATEPGKLVLGVNNPASRKKKLLCRFKVRSAXA

SEQ ID NO: 18184 - protein, 158 aa, Zea mays subsp. mays
  peptide (1)..(158): Ceres Seq. ID no. 12416236
  misc_feature (157)..(157): Xaa is any aa, unknown or other
MSPFLTQRTKSKIVFCSPGKSAETLFRYIAPEQVPVQFGGLYKEDDTEFSTSDAVTELTVKPSSKETVEIPATENSTVVWELRVLGWEVSYGAEFTPDAEGGYTVIVQKTRKVSAHEEPIMKGSFKATEPGKLVLGVNNPASRKKKLLCRFKVRSAXA

SEQ ID NO: 18185 - DNA, 968 bp, Zea mays subsp. mays
  misc_feature (1)..(968): Ceres Seq. ID no. 12377743
  misc_feature (1)..(968): Ortholog of  Ceres SEQ ID NO 15180424 as cited in SEQ ID NO 0
gagactcgatcgagagctaatgcaagaaaagaaagaggtgcgagcaagagggatgaacggcgccggcaatggtgagccctcccttgtagttgtagcggaggaagggccgccgaacgatggcaacggcgccggggttcacgcacccaacttcggcgcgaatgaagcggacacgctgctggtggtggcgacactgatcacagcgctgacgtaccagctgggcaccaacatcccgggcgggtactggcaggacgatctcaaggggcacgacggcctcgcggggcacgtcgccggagacccgatcatgcgtgacaagcaccggcggcggtactggctgttcatggcggcgagctgggtggggttcggcacctcgatgctgctcacggtggggttcatcacgggggtgcccgcgaggtcgcgcttcgtccggttcgcgttcctgctggcctactccagcctcgtgctcacgttcgtgacgtcgcagccgcgcacgtcgctcttctgggacctcatcatntgggctgtcgtcatggcgctgctcgccatcgccaccaagtacctgcgcctcgacaggctccccagatgggcgcgtaccctgtgccctgctcctccatccgngttntgctgctcacgttcgtgactcgtgagcgagctcaccatggacgatcgacctcgtcatntgggtcgccgtcatggcatcgacgcatcgtcgccatcgtcaccaagtaccagcacgtcgacagacctccccggctgggtgcacnccgtctatcttcagtaccagcttgctagtagcaacaatgtgtgtgttttcaaaaaaaaggaagaatgtgtttttatctttgtttaattttggccgtaatgtcttgtttagtggctgatgttcttgttctctgctactgtgtgcgtcctcattagttgatctgaatctgatgttaaatgtatcgctgttcagtnngtgctgttcttgt

SEQ ID NO: 18186 - protein, 211 aa, Zea mays subsp. mays
  peptide (1)..(211): Ceres Seq. ID no. 12377744
  misc_feature (171)..(171): Xaa is any aa, unknown or other
  misc_feature (205)..(205): Xaa is any aa, unknown or other
  misc_feature (206)..(206): Xaa is any aa, unknown or other
RLDRELMQEKKEVRARGMNGAGNGEPSLVVVAEEGPPNDGNGAGVHAPNFGANEADTLLVVATLITALTYQLGTNIPGGYWQDDLKGHDGLAGHVAGDPIMRDKHRRRYWLFMAASWVGFGTSMLLTVGFITGVPARSRFVRFAFLLAYSSLVLTFVTSQPRTSLFWDLIXWAVVMALLAIATKYLRLDRLPRWARTLCPAPPSXXCCSRS

SEQ ID NO: 18187 - protein, 205 aa, Zea mays subsp. mays
  peptide (1)..(205): Ceres Seq. ID no. 12377745
  misc_feature (165)..(165): Xaa is any aa, unknown or other
  misc_feature (199)..(199): Xaa is any aa, unknown or other
  misc_feature (200)..(200): Xaa is any aa, unknown or other
MQEKKEVRARGMNGAGNGEPSLVVVAEEGPPNDGNGAGVHAPNFGANEADTLLVVATLITALTYQLGTNIPGGYWQDDLKGHDGLAGHVAGDPIMRDKHRRRYWLFMAASWVGFGTSMLLTVGFITGVPARSRFVRFAFLLAYSSLVLTFVTSQPRTSLFWDLIXWAVVMALLAIATKYLRLDRLPRWARTLCPAPPSXXCCSRS

SEQ ID NO: 18188 - protein, 194 aa, Zea mays subsp. mays
  peptide (1)..(194): Ceres Seq. ID no. 12377746
  misc_feature (154)..(154): Xaa is any aa, unknown or other
  misc_feature (188)..(188): Xaa is any aa, unknown or other
  misc_feature (189)..(189): Xaa is any aa, unknown or other
MNGAGNGEPSLVVVAEEGPPNDGNGAGVHAPNFGANEADTLLVVATLITALTYQLGTNIPGGYWQDDLKGHDGLAGHVAGDPIMRDKHRRRYWLFMAASWVGFGTSMLLTVGFITGVPARSRFVRFAFLLAYSSLVLTFVTSQPRTSLFWDLIXWAVVMALLAIATKYLRLDRLPRWARTLCPAPPSXXCCSRS

SEQ ID NO: 18189 - DNA, 764 bp, Zea mays subsp. mays
  misc_feature (1)..(764): Ceres Seq. ID no. 12383783
  misc_feature (1)..(764): Ortholog of  Ceres SEQ ID NO 14315461 as cited in SEQ ID NO 57150
cttctagagctacttgcggtcgattggttcaaagttaatgaacgctttgattcagttgccttacatcccaaaagccttgtgcaatcagaagctgcaaagaaacttcctttcatattggttataaatttgcaggtgccagcgaaaccaaattataacttggttatgtactacgctgcagagagaccagtgaacaaagattctttgttgggtagattcattgatggaactgatgcataccgagatgccagatttaaacttataccaagcattgttgagggttattggatggttaagcgtgctgtaggaacaaaagcttgccttctgggtaaagcagtaacgtgcaattatcttcgccaggataactttctggagatagatgttgacatcggttcatcatctgttgcccggagcattattggtctagtattgggatatgtcacaagcatagttgttgatcttgctattcttattgaggccaaggaagagaaagagctccccgagtacattctgggcactgttcgtctgaaccgtgtgaatcccgacagtgctgtatcaatctaattacgtttctagccgatctgtgcaaatttactcttatcctcttttattctgagagaaacagcgtggcattttgaaaatgtgaaatagcattactatttgctgatccccattcgagggtaacatatgtaaattggcatgaggcatgactacgtgacgcctttcgtaaatagaataaatcaatggttatgtaatattaatatccc

SEQ ID NO: 18190 - protein, 186 aa, Zea mays subsp. mays
  peptide (1)..(186): Ceres Seq. ID no. 12383784
LLELLAVDWFKVNERFDSVALHPKSLVQSEAAKKLPFILVINLQVPAKPNYNLVMYYAAERPVNKDSLLGRFIDGTDAYRDARFKLIPSIVEGYWMVKRAVGTKACLLGKAVTCNYLRQDNFLEIDVDIGSSSVARSIIGLVLGYVTSIVVDLAILIEAKEEKELPEYILGTVRLNRVNPDSAVSI

SEQ ID NO: 18191 - protein, 132 aa, Zea mays subsp. mays
  peptide (1)..(132): Ceres Seq. ID no. 12383785
MYYAAERPVNKDSLLGRFIDGTDAYRDARFKLIPSIVEGYWMVKRAVGTKACLLGKAVTCNYLRQDNFLEIDVDIGSSSVARSIIGLVLGYVTSIVVDLAILIEAKEEKELPEYILGTVRLNRVNPDSAVSI

SEQ ID NO: 18192 - DNA, 502 bp, Zea mays subsp. mays
  misc_feature (1)..(502): Ceres Seq. ID no. 1683503
  misc_feature (1)..(502): Ortholog of  Ceres SEQ ID NO 12590304 as cited in SEQ ID NO 0
aggcccagagaaggctcgcgcagaacagagaggctgcccggaagagtcgcctgcggaagaaggcctacatccagcagctagagacaagccgcatgaagctgtcgcagctagagctggagcttcaacgggcgcggcagcagcagggtgcatatgcgaatagtggaagcatgggagactcggctctcggctacagatgcccgatagatccaggcgttgctgggttcgagatcgactacagccactgggtggacgagcagaagaggcacacaacggagctgacgtcggcgctccagggccagcagacgtcggagctggagctccgcctgctggtggagacggggctcagcaactacgagcgcctgttcaggatcaaggcggcggcggccaacgcggacgtgttctacgtcatgtcgggcttgtggaagacccccgccgagaggttcttcctctggatcggcgggttccggccgtcggaagtcctcaagatcctgagcccgcagct

SEQ ID NO: 18193 - protein, 166 aa, Zea mays subsp. mays
  peptide (1)..(166): Ceres Seq. ID no. 1683504
AQRRLAQNREAARKSRLRKKAYIQQLETSRMKLSQLELELQRARQQQGAYANSGSMGDSALGYRCPIDPGVAGFEIDYSHWVDEQKRHTTELTSALQGQQTSELELRLLVETGLSNYERLFRIKAAAANADVFYVMSGLWKTPAERFFLWIGGFRPSEVLKILSPQ

SEQ ID NO: 18194 - protein, 136 aa, Zea mays subsp. mays
  peptide (1)..(136): Ceres Seq. ID no. 1683505
MKLSQLELELQRARQQQGAYANSGSMGDSALGYRCPIDPGVAGFEIDYSHWVDEQKRHTTELTSALQGQQTSELELRLLVETGLSNYERLFRIKAAAANADVFYVMSGLWKTPAERFFLWIGGFRPSEVLKILSPQ

SEQ ID NO: 18195 - protein, 111 aa, Zea mays subsp. mays
  peptide (1)..(111): Ceres Seq. ID no. 1683506
MGDSALGYRCPIDPGVAGFEIDYSHWVDEQKRHTTELTSALQGQQTSELELRLLVETGLSNYERLFRIKAAAANADVFYVMSGLWKTPAERFFLWIGGFRPSEVLKILSPQ

SEQ ID NO: 18196 - DNA, 1087 bp, Zea mays subsp. mays
  misc_feature (1)..(1087): Ceres Seq. ID no. 12416462
  misc_feature (1)..(1087): Ortholog of  Ceres SEQ ID NO 14306675 as cited in SEQ ID NO 52939
  misc_feature (1)..(1087): Ortholog of  Ceres SEQ ID NO 12625980 as cited in SEQ ID NO 65586
gcacgagaccattacctagaacatcctaatcgaaaaagttccttcggttgctaacatctctagccgagacatttgacattttgacttgaacaatctgctcatctaccactccggcactcccacgccgggccgcgcggatcgcatcgagtttgagtggagtaggcggcgggcagcgaatcagcgatgaaggtgcagtgcgacgtgtgcgcggccgaggcggcctccgtcttctgctgcgccgacgaggccgcgctgtgcgacgcgtgcgacgaccgcgtccaccgcgccaacaagctcgcggggaagcaccgccgcttctccctcctccacccctgttcgtcctctgcgcagaagccgccgctctgcgacatctgccaggagcggagaggcttcttgttctgcaaggaggacagggcgatcctgtgccgggagtgcgacgcgccggtgcacagcgcgaacgacatgacgaggcggcacagccggttcctgctcaccggcgtgcgcctctcgtcagcgccggtggactctgctgacccatcagaaggggaggaggaggaggagcaggagaacagcagcaggcccggcaacggcgagtcctgcagcggcggcgccggcgccggcgcgaccacggcgaccgccagcgacgggagcagcatctccgagtacctgaccaagaccctgcccgggtggcacgtcgaggacttcctcgttgacgacgcgtacgccagcgacgtcggcgcctgctcagacggcctttatcagggacaagatggacagatcagcggggtgctgcaagaagcttacatgccgtggacggggcgggagctggtgccctctgacgtcgcagacgagcgggacaactgggagcggtgggtgccgcagatgcacgcggagttcgccggcgacagcaagcggcccagagcgtcgccttcgcctccctgttcgtactggtgaaaagctcgccgttattagtagagttgatttgtactgggtaccgtaggaacgaagagaaagatgagccaaaaaatcatggaacggaccggtgtttctctgttggattattattgggtcgatttcgatcgagctc

SEQ ID NO: 18197 - protein, 256 aa, Zea mays subsp. mays
  peptide (1)..(256): Ceres Seq. ID no. 12416463
MKVQCDVCAAEAASVFCCADEAALCDACDDRVHRANKLAGKHRRFSLLHPCSSSAQKPPLCDICQERRGFLFCKEDRAILCRECDAPVHSANDMTRRHSRFLLTGVRLSSAPVDSADPSEGEEEEEQENSSRPGNGESCSGGAGAGATTATASDGSSISEYLTKTLPGWHVEDFLVDDAYASDVGACSDGLYQGQDGQISGVLQEAYMPWTGRELVPSDVADERDNWERWVPQMHAEFAGDSKRPRASPSPPCSYW

SEQ ID NO: 18198 - protein, 163 aa, Zea mays subsp. mays
  peptide (1)..(163): Ceres Seq. ID no. 12416464
MTRRHSRFLLTGVRLSSAPVDSADPSEGEEEEEQENSSRPGNGESCSGGAGAGATTATASDGSSISEYLTKTLPGWHVEDFLVDDAYASDVGACSDGLYQGQDGQISGVLQEAYMPWTGRELVPSDVADERDNWERWVPQMHAEFAGDSKRPRASPSPPCSYW

SEQ ID NO: 18199 - DNA, 711 bp, Zea mays subsp. mays
  misc_feature (1)..(711): Ceres Seq. ID no. 12354862
  misc_feature (1)..(711): Ortholog of  Ceres SEQ ID NO 15169346 as cited in SEQ ID NO 53994
tcatttctacgacctcttggccatttggagttggacctaccagaggccccagaaaaagccccacgtcctcctgcacaagctgttgacccattctcaaaatttgggccgaaggcagagatattgcatatattccgtgccccagagaagaggccacccaaggaactctcgctcgcattcacgggtctcacgcttctgccttttatcggattcttgattgggctcgtgcgtcttggagtgaacgtgaagaacttcccgtccttgccgggaccggccgcatttgcctcagttttccatgctggaataggagcagtcttgctgctctacgttctcttctggctcaagttggaccttttcacaactctgaagtaccttggcttcctcggcatcttcctcgtgtttgtgggccataggaccctgtcctacctttcctcggcgtcagcaaaacagaagacggcatgagtggacagtgcaagcagagctttcccgatcatcaattcgttttttgaggtggccattccaggccactgggtgtctttgcttggtactctgaccgcaccctagtttttctttagctaacatgcattttgagggaggactcggtttatttcagttggctttgacgaatactgatactaggacaagtaacaggacctcacatcacagtttctgaatagaatggatgtttaatcatagcatttatatgatcattcg

SEQ ID NO: 18200 - protein, 152 aa, Zea mays subsp. mays
  peptide (1)..(152): Ceres Seq. ID no. 12354863
SFLRPLGHLELDLPEAPEKAPRPPAQAVDPFSKFGPKAEILHIFRAPEKRPPKELSLAFTGLTLLPFIGFLIGLVRLGVNVKNFPSLPGPAAFASVFHAGIGAVLLLYVLFWLKLDLFTTLKYLGFLGIFLVFVGHRTLSYLSSASAKQKTA

SEQ ID NO: 18201 - DNA, 917 bp, Zea mays subsp. mays
  misc_feature (1)..(917): Ceres Seq. ID no. 12416389
  misc_feature (1)..(917): Ortholog of  Ceres SEQ ID NO 15225188 as cited in SEQ ID NO 0
gaaagggacttctcctacgtgttcgatatgcttgttgctctgggcattcacgcagccaacgaggatgacctccttgacaactgctacttactggagtgctctgcaggccttgatttatacgatgacctcgaacagaagtacgacagcctcattttatggcctgtgcatgagaggaagctcttgtttgatatcacgaatgctgttcttggggacatgatcacctccgtgatgaacggctgctcgaagggactgatggcgaggtgctcgcctggatggaatcgggaagagtttgctgagctcgtgtggcaaagggtggtgcagctccggcaagagatagagttcaaccaggaagccctgctgttgagcgtagagtgggctggctctgaagatggcgccagtctagtcgggcgcgatatcgggaatatgttgcaagatgatctcgtacaggaaattatagctgactttctgggggcaactaaatccgccaagctccgtggctagaattgccagtgtttgcatccgaggccattgcaagcatatgcatatggattggtcgctggtgaactctagtggacgatgagccttcgatgaattgcttaaggaggggactgtaattcaaggaattcncctcatggctactgaagacatgagctaagatggcttaggtgatggtggggcatcaaacaagcagtgtcgaagtttgacctagttgtgtcatgctcgtcagctcatcaccattggccccgaactcagcaatagcgtacaactggatgatttcccccctctgaactttgaaaatattttttttcattaggttatcataatgctggaatatagatgcacaattttggtgtaaaataatctctggcggattttagtttgtttatcatgggatgcaataaggacagtgtcagttg

SEQ ID NO: 18202 - protein, 166 aa, Zea mays subsp. mays
  peptide (1)..(166): Ceres Seq. ID no. 12416390
ERDFSYVFDMLVALGIHAANEDDLLDNCYLLECSAGLDLYDDLEQKYDSLILWPVHERKLLFDITNAVLGDMITSVMNGCSKGLMARCSPGWNREEFAELVWQRVVQLRQEIEFNQEALLLSVEWAGSEDGASLVGRDIGNMLQDDLVQEIIADFLGATKSAKLRG

SEQ ID NO: 18203 - protein, 157 aa, Zea mays subsp. mays
  peptide (1)..(157): Ceres Seq. ID no. 12416391
MLVALGIHAANEDDLLDNCYLLECSAGLDLYDDLEQKYDSLILWPVHERKLLFDITNAVLGDMITSVMNGCSKGLMARCSPGWNREEFAELVWQRVVQLRQEIEFNQEALLLSVEWAGSEDGASLVGRDIGNMLQDDLVQEIIADFLGATKSAKLRG

SEQ ID NO: 18204 - protein, 95 aa, Zea mays subsp. mays
  peptide (1)..(95): Ceres Seq. ID no. 12416392
MITSVMNGCSKGLMARCSPGWNREEFAELVWQRVVQLRQEIEFNQEALLLSVEWAGSEDGASLVGRDIGNMLQDDLVQEIIADFLGATKSAKLRG

SEQ ID NO: 18205 - DNA, 1421 bp, Zea mays subsp. mays
  misc_feature (1)..(1421): Ceres Seq. ID no. 12391904
  misc_feature (1)..(1421): Ortholog of  Ceres SEQ ID NO 13581947 as cited in SEQ ID NO 51812
atgactactccaagcgcgcaattaaccctcactaaagggaacaaaagctggagctccaccgcggtggcggccgctctagaactagtggatcccccgggctgcaggaattcgcacgagaccattacctagaacatcctaatcgaaaaccttttgccgatccagttgtgccgatcggtattttcccgcgtccaccaaaacccgttgccgccgtttttttcgtcgccgccacggaccaggatcgaccggtgccgatgaagccagcggaggacgcggatgcgccggcgccggagacggcggcagcgcagacggtctggtacgaccccatgacttcgccgcaggcgccggcgccgcagcagcaaccggcgatagaggctgcgatgcggggggcctcgccgtcggtgagctccaacgcgcgggcctctcagggtgtacgccgacggcatctatgatctcttccacttcggccatgcgcgcgcgctcgaacaggccaagaagtcatttcccaacacctacttgctggtaggttgctgcagcgacgagatcacccacatgtacaaaggaaagaccgtcatgaccgaggacgagcgctacgaatcgcttcggcattgcaagtgggtcgacgaggtcataccggacgctccatgggtgatcaaccaggagttcatcgacaagcacgacatcgactacgtcgctcacgacgcgctcccatacgctgacacgagtggagctgccaatgatgtctatgaatttgtgaaagccatcgggaagttcaaggagacgaagcgcaccgagggcatctcgacgtcggacatcatcatgaggatcttgaaggactacaaccagtacatcatgcggaacctcacccgcgggtacagccgcaaagatctcggcgtcagctatgtcaaggagaagcagctgagagtcaacatggggatcagcaagctacgggagaaggtgaaggagcaccaggagaagttccacagcgcggcgaagatcgctgggaccaaccctgtggagtggatggagaacgcggaccgctggatcgttggcttccttgagaagttcgaggaaggctgccacatgatggaaactgccattaaaggtcggattcaggaggggttgaagcggcaaggcaggtcggagtcaaacctttctggagaggagttcgaatcgtagttctgtgatctcctccaaatgaaactagacaaaaggagaactggagatcatttcccagtctgtgtaacagtatgagattggttaattagcatgttattgtaggatgccatggatcattgtttagttgtacctggagatcatgtagttttgaagaacaatcgtgtttctgtatgcgatcagttgctccttcattgagcatatctgcatatggcacctgctaggaagtaggaactgctgttcatttg

SEQ ID NO: 18206 - protein, 208 aa, Zea mays subsp. mays
  peptide (1)..(208): Ceres Seq. ID no. 12391905
MYKGKTVMTEDERYESLRHCKWVDEVIPDAPWVINQEFIDKHDIDYVAHDALPYADTSGAANDVYEFVKAIGKFKETKRTEGISTSDIIMRILKDYNQYIMRNLTRGYSRKDLGVSYVKEKQLRVNMGISKLREKVKEHQEKFHSAAKIAGTNPVEWMENADRWIVGFLEKFEEGCHMMETAIKGRIQEGLKRQGRSESNLSGEEFES

SEQ ID NO: 18207 - protein, 201 aa, Zea mays subsp. mays
  peptide (1)..(201): Ceres Seq. ID no. 12391906
MTEDERYESLRHCKWVDEVIPDAPWVINQEFIDKHDIDYVAHDALPYADTSGAANDVYEFVKAIGKFKETKRTEGISTSDIIMRILKDYNQYIMRNLTRGYSRKDLGVSYVKEKQLRVNMGISKLREKVKEHQEKFHSAAKIAGTNPVEWMENADRWIVGFLEKFEEGCHMMETAIKGRIQEGLKRQGRSESNLSGEEFES

SEQ ID NO: 18208 - protein, 119 aa, Zea mays subsp. mays
  peptide (1)..(119): Ceres Seq. ID no. 12391907
MRILKDYNQYIMRNLTRGYSRKDLGVSYVKEKQLRVNMGISKLREKVKEHQEKFHSAAKIAGTNPVEWMENADRWIVGFLEKFEEGCHMMETAIKGRIQEGLKRQGRSESNLSGEEFES

SEQ ID NO: 18209 - DNA, 1081 bp, Zea mays subsp. mays
  misc_feature (1)..(1081): Ceres Seq. ID no. 12391425
  misc_feature (1)..(1081): Ortholog of  Ceres SEQ ID NO 13594727 as cited in SEQ ID NO 52169
  misc_feature (1)..(1081): Ortholog of  Ceres SEQ ID NO 13581579 as cited in SEQ ID NO 58361
  misc_feature (1)..(1081): Ortholog of  Ceres SEQ ID NO 13638746 as cited in SEQ ID NO 59296
  misc_feature (1)..(1081): Ortholog of  Ceres SEQ ID NO 13598714 as cited in SEQ ID NO 62656
  misc_feature (1)..(1081): Ortholog of  Ceres SEQ ID NO 13596969 as cited in SEQ ID NO 63375
  misc_feature (1)..(1081): Ortholog of  Ceres SEQ ID NO 13597519 as cited in SEQ ID NO 64759
  misc_feature (1)..(1081): Ortholog of  Ceres SEQ ID NO 13597870 as cited in SEQ ID NO 64982
  misc_feature (1)..(1081): Ortholog of  Ceres SEQ ID NO 13595926 as cited in SEQ ID NO 67778
  misc_feature (1)..(1081): Ortholog of  Ceres SEQ ID NO 12567001 as cited in SEQ ID NO 0
agacaataatggccgcctccgacaagtaggacctgatgaggatttcagcggcggcgctcctgctggcgctggccgcggcaggcagcgtctgctcggcgcagcagctccgtcgcaactactacgcgagcgtgtgcccaaacgtggagtccatcgtgcgcgacgcggtggcgaagaagtaccgggagacgttcatcacggtgggcgcgacggtgcacctcttcttccacgactgcttcgtggagggctgcgacgcctccgtggtggtggcgtccacgccaaacgccaccgcggagaaggaccaccccatcaacctgtccctggcgggcgatggcttcgacaccgtgatccgggccaaggccgccgtggacgccgtgccgcggtgccggaacagggtgtcctgcgccgacatcctggccatggccacccgggacgccatcgcgctggccggcgggcccgcgtacgcggtggagctgggccgcctggacgggctgtcctccacggcgaccagcgtgaacgggaagctggcgccgccgtcgtttggcctggaccagctcaccgcgctgttcgcgcgcaacgggctctcgcaggccgacatggtggcgctatcggcggggcacacggtggggttcgcgcactgcggaaccttctccgggcgggtccgcgcggcggacccgacgctgaaccggagcctggcggagaagctggcggcgtggtgccccgacggcgtggacccgcgggtggcggtgaccatggacgtggtcacgcccagggtgttcgacaaccagtacttccggaacctgcagagcgggatgggcctcctggcgtcggaccaggtgctgtacacggaccccaggtctaggcccaccgctcgacgcgttggcccggagtaaagtggcctttgaacgggcctttgtggaggggatcacgaagatgggccggatcggggtcaagacgggtgcccaagggaacatccgacgtaactgcgcagtgctcaattgaccgacctgatgatgtttgttgccctgcgcttgtactatctatgaacaaatttgccgtgtgtttatatatgaacaaattttcc

SEQ ID NO: 18210 - protein, 285 aa, Zea mays subsp. mays
  peptide (1)..(285): Ceres Seq. ID no. 12391426
DNNGRLRQVGPDEDFSGGAPAGAGRGRQRLLGAAAPSQLLRERVPKRGVHRARRGGEEVPGDVHHGGRDGAPLLPRLLRGGLRRLRGGGVHAKRHRGEGPPHQPVPGGRWLRHRDPGQGRRGRRAAVPEQGVLRRHPGHGHPGRHRAGRRARVRGGAGPPGRAVLHGDQREREAGAAVVWPGPAHRAVRAQRALAGRHGGAIGGAHGGVRALRNLLRAGPRGGPDAEPEPGGEAGGVVPRRRGPAGGGDHGRGHAQGVRQPVLPEPAERDGPPGVGPGAVHGPQV

SEQ ID NO: 18211 - protein, 284 aa, Zea mays subsp. mays
  peptide (1)..(284): Ceres Seq. ID no. 12391427
MRISAAALLLALAAAGSVCSAQQLRRNYYASVCPNVESIVRDAVAKKYRETFITVGATVHLFFHDCFVEGCDASVVVASTPNATAEKDHPINLSLAGDGFDTVIRAKAAVDAVPRCRNRVSCADILAMATRDAIALAGGPAYAVELGRLDGLSSTATSVNGKLAPPSFGLDQLTALFARNGLSQADMVALSAGHTVGFAHCGTFSGRVRAADPTLNRSLAEKLAAWCPDGVDPRVAVTMDVVTPRVFDNQYFRNLQSGMGLLASDQVLYTDPRSRPTARRVGPE

SEQ ID NO: 18212 - protein, 157 aa, Zea mays subsp. mays
  peptide (1)..(157): Ceres Seq. ID no. 12391428
MATRDAIALAGGPAYAVELGRLDGLSSTATSVNGKLAPPSFGLDQLTALFARNGLSQADMVALSAGHTVGFAHCGTFSGRVRAADPTLNRSLAEKLAAWCPDGVDPRVAVTMDVVTPRVFDNQYFRNLQSGMGLLASDQVLYTDPRSRPTARRVGPE

SEQ ID NO: 18213 - DNA, 1071 bp, Zea mays subsp. mays; identical to SEQ ID NO: 16479
  misc_feature (1)..(1071): Ceres Seq. ID no. 12406460
  misc_feature (1)..(1071): Ortholog of  Ceres SEQ ID NO 15176514 as cited in SEQ ID NO 1114
  misc_feature (1)..(1071): Ortholog of  Ceres SEQ ID NO 15173688 as cited in SEQ ID NO 61918
  misc_feature (1)..(1071): Ortholog of  Ceres SEQ ID NO 12778345 as cited in SEQ ID NO 62792
  misc_feature (1)..(1071): Ortholog of  Ceres SEQ ID NO 13662513 as cited in SEQ ID NO 63303
  misc_feature (1)..(1071): Ortholog of  Ceres SEQ ID NO 12616929 as cited in SEQ ID NO 63962
  misc_feature (1)..(1071): Ortholog of  Ceres SEQ ID NO 15225803 as cited in SEQ ID NO 67623
  misc_feature (1)..(1071): Ortholog of  Ceres SEQ ID NO 15174088 as cited in SEQ ID NO 0

SEQ ID NO: 18214 - protein, 238 aa, Zea mays subsp. mays; identical to SEQ ID NO: 16480
  peptide (1)..(238): Ceres Seq. ID no. 12406461

SEQ ID NO: 18215 - protein, 223 aa, Zea mays subsp. mays; identical to SEQ ID NO: 16481
  peptide (1)..(223): Ceres Seq. ID no. 12406462

SEQ ID NO: 18216 - protein, 164 aa, Zea mays subsp. mays; identical to SEQ ID NO: 16482
  peptide (1)..(164): Ceres Seq. ID no. 12406463

SEQ ID NO: 18217 - DNA, 735 bp, Zea mays subsp. mays
  misc_feature (1)..(735): Ceres Seq. ID no. 14305333
  misc_feature (1)..(735): Ortholog of  Ceres SEQ ID NO 12620202 as cited in SEQ ID NO 66011
gattacacagaattccctcccaatcggcggcgccacgatgcgcctccgcagccgggcaatctttcccctcgtccgcaccaccgccaccaccacatcggccgcgtcttcgtcgccggcggtgctgagcatcggccacgcgctgcgcgagcgccggctgttcacgggggacgacgtggcggcgtacgcggcgatcagcggtgaccgcaacccggtgcacctcgacgacgccgtcgcccgggagctgagcgggttccagcgaggccgcgtggtgcacggcatgctcgtggcgtccctcttcccttccatcatcgctgccacctggcgctgtgtacgcgagccagacgctcaagtttgcggcgccggtgtacgtcggggatgaggtggttgctcgagtccaggcactcaacatcaggacggcggcggcgacgaacagctgcacggcaagacgatatgtcgtcaagttcgcaaccaaatgcttcatggacgaagaggaaggctctgttgcgattgaaggcgaagcaatggctgtcctgcctacactggagctcagctctcagtcgactagaaactaggagtggcctcaaaccgggtgactagtcacaagttgctgttgcttaatcatacccgacctggtaatccctctcttctggaacactgtgtagaatgcgtgtaaactaaacttagtgtagcctttacattataagcgaggagtgaaataaagctgttgtttatgac

SEQ ID NO: 18218 - protein, 125 aa, Zea mays subsp. mays
  peptide (1)..(125): Ceres Seq. ID no. 14305334
ITQNSLPIGGATMRLRSRAIFPLVRTTATTTSAASSSPAVLSIGHALRERRLFTGDDVAAYAAISGDRNPVHLDDAVARELSGFQRGRVVHGMLVASLFPSIIAATWRCVREPDAQVCGAGVRRG

SEQ ID NO: 18219 - protein, 113 aa, Zea mays subsp. mays
  peptide (1)..(113): Ceres Seq. ID no. 14305335
MRLRSRAIFPLVRTTATTTSAASSSPAVLSIGHALRERRLFTGDDVAAYAAISGDRNPVHLDDAVARELSGFQRGRVVHGMLVASLFPSIIAATWRCVREPDAQVCGAGVRRG

SEQ ID NO: 18220 - protein, 73 aa, Zea mays subsp. mays
  peptide (1)..(73): Ceres Seq. ID no. 14305336
MRWLLESRHSTSGRRRRRTAARQDDMSSSSQPNASWTKRKALLRLKAKQWLSCLHWSSALSRLETRSGLKPGD

SEQ ID NO: 18221 - DNA, 802 bp, Zea mays subsp. mays
  misc_feature (1)..(802): Ceres Seq. ID no. 12381404
  misc_feature (1)..(802): Ortholog of  Ceres SEQ ID NO 15179486 as cited in SEQ ID NO 0
tctctacggggtaggctctgtccttcttacatggatgaagatatattctggaagatttactttaggttgcttgagtcaaacataaatgagcataattctgaggaagatatccggagcgtgccaaattctgtacatcacaacaatgagatagagtctgattctccacctcacgtctgtgagatagaaagtgtgaaaagcaaccaagaagggtaccaatcttcggatggtcgtgctttccccaagacaagatctgagcgaagcattgaccaatgggtatttgcaaagtcaaaatctgaggaaagcatggatcagtggtctgaaataccttcagatgtggaatccttcagagaaggtaaaaggtacctcagtagcgaggagctgagtgacgttgatagtgccaacgttgttgtcatggacaaatacatggattcagtcctctctgaccggaggaaccttccctacgctagctcctcggtgcgccgggattcagtcagacgaaaacctgcttcgtccgccgattacagccgccgacctccgcagccaactccacctgcatcgctgtcaaagaaggaatcgtgggatgtcattgaagattcggagttcgatatacttgacagttagtaattgagatctttgcgatctcaaggctgtttatccttctattttcttccatgtttccccacacttcacctcgtttgtaaatgtggacgtgcaggtggcgtcagtgatagtgggaaaggactaatgttctttttaccaatatattataacagtgtgtgcatataaatcttctgagctcgcc

SEQ ID NO: 18222 - protein, 206 aa, Zea mays subsp. mays
  peptide (1)..(206): Ceres Seq. ID no. 12381405
SLRGRLCPSYMDEDIFWKIYFRLLESNINEHNSEEDIRSVPNSVHHNNEIESDSPPHVCEIESVKSNQEGYQSSDGRAFPKTRSERSIDQWVFAKSKSEESMDQWSEIPSDVESFREGKRYLSSEELSDVDSANVVVMDKYMDSVLSDRRNLPYASSSVRRDSVRRKPASSADYSRRPPQPTPPASLSKKESWDVIEDSEFDILDS

SEQ ID NO: 18223 - protein, 196 aa, Zea mays subsp. mays
  peptide (1)..(196): Ceres Seq. ID no. 12381406
MDEDIFWKIYFRLLESNINEHNSEEDIRSVPNSVHHNNEIESDSPPHVCEIESVKSNQEGYQSSDGRAFPKTRSERSIDQWVFAKSKSEESMDQWSEIPSDVESFREGKRYLSSEELSDVDSANVVVMDKYMDSVLSDRRNLPYASSSVRRDSVRRKPASSADYSRRPPQPTPPASLSKKESWDVIEDSEFDILDS

SEQ ID NO: 18224 - protein, 105 aa, Zea mays subsp. mays
  peptide (1)..(105): Ceres Seq. ID no. 12381407
MDQWSEIPSDVESFREGKRYLSSEELSDVDSANVVVMDKYMDSVLSDRRNLPYASSSVRRDSVRRKPASSADYSRRPPQPTPPASLSKKESWDVIEDSEFDILDS

SEQ ID NO: 18225 - DNA, 1132 bp, Zea mays subsp. mays
  misc_feature (1)..(1132): Ceres Seq. ID no. 12416375
  misc_feature (1)..(1132): Ortholog of  Ceres SEQ ID NO 12611884 as cited in SEQ ID NO 51018
  misc_feature (1)..(1132): Ortholog of  Ceres SEQ ID NO 15177083 as cited in SEQ ID NO 51917
  misc_feature (1)..(1132): Ortholog of  Ceres SEQ ID NO 12609093 as cited in SEQ ID NO 52008
  misc_feature (1)..(1132): Ortholog of  Ceres SEQ ID NO 12609839 as cited in SEQ ID NO 52022
  misc_feature (1)..(1132): Ortholog of  Ceres SEQ ID NO 13638931 as cited in SEQ ID NO 52200
  misc_feature (1)..(1132): Ortholog of  Ceres SEQ ID NO 13638885 as cited in SEQ ID NO 55803
  misc_feature (1)..(1132): Ortholog of  Ceres SEQ ID NO 12587429 as cited in SEQ ID NO 63113
  misc_feature (1)..(1132): Ortholog of  Ceres SEQ ID NO 12615635 as cited in SEQ ID NO 63133
  misc_feature (1)..(1132): Ortholog of  Ceres SEQ ID NO 12586351 as cited in SEQ ID NO 64028
  misc_feature (1)..(1132): Ortholog of  Ceres SEQ ID NO 14301603 as cited in SEQ ID NO 67721
  misc_feature (1)..(1132): Ortholog of  Ceres SEQ ID NO 13654441 as cited in SEQ ID NO 67814
  misc_feature (1)..(1132): Ortholog of  Ceres SEQ ID NO 14309027 as cited in SEQ ID NO 0
caactttcagaacagccaaattaagaagcaaacatattcttctagttcttccgtggtaggacatggcagagagcatggggagagacggtggtgatggtgagctcaagctgctggggctgtgggcgagcccgttcgtagcgagagcgaagctcgcgctccagatcaagggcctaagctacgagtacgtcgaggaggatctcggcaacaagagcgagctgctgctcagctccaacccggtgcacaagacggtgccggtgctgatccacaacgggacgccggtctgcgagtcgacggtcatcgtccagtacatcgacgacgctttcgccggcactggcccgtccctcctccccgctgacccctaccagcgcgcccttgctcgcttctgggccgcctacctcgaagacaagattgtgacgccgtggcggcggtttttcatggtcaaggccgacgaggagaaggccgaggcgatgaggcagacggtcgcagccatggacgcgctggagggaggcctgaaggaatgctcttctgggggtgggggccagagccccttcttcggcggcgacagcgtcggctacgtggacgtccttctgggtggcatggtttcatgggtcaaggcatccgagccgctctccggcgccaagatcatcgacgcagccaggacgccgctcctggccgcgtggatggagcgcttctgcgagctggacgcggccaaggcggtcctgcaggacgtccatgaggttgtcgagtacgccaggacggtgcaggcacgggttgccgctgcgaccgcaagcaatcagtagtggaaacaccgtgaaccccgaacccagtaggcaacgtgatcccatcttctcagttggctcccgttcggctcagtgcgtcacctctgtcctgccctttgcacctgccctatccgcgtgttcgtaagccgtcgtcccaggaaacgtcgtgccatagacgatctcccggactgttgagactaccaacgtgtgtttttgaacaggaacatgtacctgcaattaccgatacgtccatcctcgttgagtcaatggcaacgatgcaagggtctgcatcattttggaattacctgaatctatgaactgggaatgataaggtgggccacatttgatcattt

SEQ ID NO: 18226 - protein, 245 aa, Zea mays subsp. mays
  peptide (1)..(245): Ceres Seq. ID no. 12416376
MAESMGRDGGDGELKLLGLWASPFVARAKLALQIKGLSYEYVEEDLGNKSELLLSSNPVHKTVPVLIHNGTPVCESTVIVQYIDDAFAGTGPSLLPADPYQRALARFWAAYLEDKIVTPWRRFFMVKADEEKAEAMRQTVAAMDALEGGLKECSSGGGGQSPFFGGDSVGYVDVLLGGMVSWVKASEPLSGAKIIDAARTPLLAAWMERFCELDAAKAVLQDVHEVVEYARTVQARVAAATASNQ

SEQ ID NO: 18227 - protein, 241 aa, Zea mays subsp. mays
  peptide (1)..(241): Ceres Seq. ID no. 12416377
MGRDGGDGELKLLGLWASPFVARAKLALQIKGLSYEYVEEDLGNKSELLLSSNPVHKTVPVLIHNGTPVCESTVIVQYIDDAFAGTGPSLLPADPYQRALARFWAAYLEDKIVTPWRRFFMVKADEEKAEAMRQTVAAMDALEGGLKECSSGGGGQSPFFGGDSVGYVDVLLGGMVSWVKASEPLSGAKIIDAARTPLLAAWMERFCELDAAKAVLQDVHEVVEYARTVQARVAAATASNQ

SEQ ID NO: 18228 - DNA, 699 bp, Zea mays subsp. mays
  misc_feature (1)..(699): Ceres Seq. ID no. 12358014
  misc_feature (1)..(699): Ortholog of  Ceres SEQ ID NO 13594385 as cited in SEQ ID NO 57993
aaaaaagtccccattagtaaggcaaaagccgcaaaggcttatccttccgagtctccaccaacgacaatggcgagcgctcccgccggctttgcccccaccgtcgctgcttccacaagcttcggcttcactatcgtggcatgccccttcccctcgcgcacgcatcttccagcggcctcctccgttggggttcgcaatcagcagcgcgcgtccactgccaccgcctgcctgccgccgccgagtacctcccatggcgccgccaccaggctgtacgtcagcggtctttcgttccgcacaaccgaacggagcctccgggacgcgttcgagaagtttggtgaccttacggaagtttgtctcgtgatggatagagtagcgaagcgaccgagaggtttcgctttcctttcttacaccggggaggaggaagccaggggcgccatggaagggatgcacgggaagttcctggatggcagagtgatctttgtcgaggttgcgaaacgaagagttgaagcctgaaggatcgtgcccaaatactgctcaaaaacttgattgttggttccagcaaagtccctggtgagacacacactgatgcaggcaaagtttagatgtgaacagaggaaccgaagaaaccttagcagcattcggtcgtgtagctgccatttcattgttttacaaaacaacattcgtaatttacatatataggtc

SEQ ID NO: 18229 - protein, 169 aa, Zea mays subsp. mays
  peptide (1)..(169): Ceres Seq. ID no. 12358015
KKVPISKAKAAKAYPSESPPTTMASAPAGFAPTVAASTSFGFTIVACPFPSRTHLPAASSVGVRNQQRASTATACLPPPSTSHGAATRLYVSGLSFRTTERSLRDAFEKFGDLTEVCLVMDRVAKRPRGFAFLSYTGEEEARGAMEGMHGKFLDGRVIFVEVAKRRVEA

SEQ ID NO: 18230 - protein, 147 aa, Zea mays subsp. mays
  peptide (1)..(147): Ceres Seq. ID no. 12358016
MASAPAGFAPTVAASTSFGFTIVACPFPSRTHLPAASSVGVRNQQRASTATACLPPPSTSHGAATRLYVSGLSFRTTERSLRDAFEKFGDLTEVCLVMDRVAKRPRGFAFLSYTGEEEARGAMEGMHGKFLDGRVIFVEVAKRRVEA

SEQ ID NO: 18231 - protein, 118 aa, Zea mays subsp. mays
  peptide (1)..(118): Ceres Seq. ID no. 12358017
KKSPLVRQKPQRLILPSLHQRQWRALPPALPPPSLLPQASASLSWHAPSPRARIFQRPPPLGFAISSARPLPPPACRRRVPPMAPPPGCTSAVFRSAQPNGASGTRSRSLVTLRKFVS

SEQ ID NO: 18232 - DNA, 1444 bp, Zea mays subsp. mays; identical to SEQ ID NO: 13725
  misc_feature (1)..(1444): Ceres Seq. ID no. 12455051
  misc_feature (1)..(1444): Ortholog of  Ceres SEQ ID NO 15174879 as cited in SEQ ID NO 53786
  misc_feature (1)..(1444): Ortholog of  Ceres SEQ ID NO 14313336 as cited in SEQ ID NO 55501
  misc_feature (1)..(1444): Ortholog of  Ceres SEQ ID NO 13655237 as cited in SEQ ID NO 62892
  misc_feature (1)..(1444): Ortholog of  Ceres SEQ ID NO 13597268 as cited in SEQ ID NO 63929

SEQ ID NO: 18233 - protein, 423 aa, Zea mays subsp. mays; identical to SEQ ID NO: 13726
  peptide (1)..(423): Ceres Seq. ID no. 12455052

SEQ ID NO: 18234 - protein, 417 aa, Zea mays subsp. mays; identical to SEQ ID NO: 13727
  peptide (1)..(417): Ceres Seq. ID no. 12455053

SEQ ID NO: 18235 - protein, 401 aa, Zea mays subsp. mays; identical to SEQ ID NO: 13728
  peptide (1)..(401): Ceres Seq. ID no. 12455054

SEQ ID NO: 18236 - DNA, 2211 bp, Zea mays subsp. mays; identical to SEQ ID NO: 13777
  misc_feature (1)..(2211): Ceres Seq. ID no. 12550712
  misc_feature (1)..(2211): Ortholog of  Ceres SEQ ID NO 14310841 as cited in SEQ ID NO 53666
  misc_feature (1)..(2211): Ortholog of  Ceres SEQ ID NO 15178736 as cited in SEQ ID NO 56439
  misc_feature (1)..(2211): Ortholog of  Ceres SEQ ID NO 14308493 as cited in SEQ ID NO 60320

SEQ ID NO: 18237 - protein, 544 aa, Zea mays subsp. mays; identical to SEQ ID NO: 13778
  peptide (1)..(544): Ceres Seq. ID no. 12550713
  misc_feature (295)..(295): Xaa is any aa, unknown or other

SEQ ID NO: 18238 - protein, 499 aa, Zea mays subsp. mays; identical to SEQ ID NO: 13779
  peptide (1)..(499): Ceres Seq. ID no. 12550714
  misc_feature (250)..(250): Xaa is any aa, unknown or other

SEQ ID NO: 18239 - protein, 496 aa, Zea mays subsp. mays; identical to SEQ ID NO: 13780
  peptide (1)..(496): Ceres Seq. ID no. 12550715
  misc_feature (247)..(247): Xaa is any aa, unknown or other

SEQ ID NO: 18240 - DNA, 2889 bp, Zea mays subsp. mays
  misc_feature (1)..(2889): Ceres Seq. ID no. 12435287
  misc_feature (1)..(2889): Ortholog of  Ceres SEQ ID NO 15174879 as cited in SEQ ID NO 53786
  misc_feature (1)..(2889): Ortholog of  Ceres SEQ ID NO 14313336 as cited in SEQ ID NO 55501
  misc_feature (1)..(2889): Ortholog of  Ceres SEQ ID NO 13582534 as cited in SEQ ID NO 57409
  misc_feature (1)..(2889): Ortholog of  Ceres SEQ ID NO 13655640 as cited in SEQ ID NO 63844
  misc_feature (1)..(2889): Ortholog of  Ceres SEQ ID NO 13597268 as cited in SEQ ID NO 63929
  misc_feature (1)..(2889): Ortholog of  Ceres SEQ ID NO 13656662 as cited in SEQ ID NO 65594
  misc_feature (1)..(2889): Ortholog of  Ceres SEQ ID NO 13659840 as cited in SEQ ID NO 66970
  misc_feature (1)..(2889): Ortholog of  Ceres SEQ ID NO 14302384 as cited in SEQ ID NO 67177
  misc_feature (1)..(2889): Ortholog of  Ceres SEQ ID NO 13660544 as cited in SEQ ID NO 67401
  misc_feature (1)..(2889): Ortholog of  Ceres SEQ ID NO 15180683 as cited in SEQ ID NO 0
gcacgagaccattacctagaacatcctaatcgaaaagcgattaatcaactccgccacgaccaacacgtacgtaaccagcggcggttcggcagcatgcggcgacgacggtgtccgctcctcgccgccgtcctcttcctcctccccctcttccaccgccaccacgccgccagcggcaccgacacggacacggtcacgctggccgcgccgctcatggggaaccggacgctggtgtccgccggcagcgccaagtacgtgctgggcttcttcgcgccggacccggacgccacgggatcaggacgggcgtacctcgggatatggttcaacggcatccccgcgcggaccgtcgtgtgggtggccaaccgcgagagccccgtcctgggcagcgtgggcgccgccgcgctcagggtcctcgccaacgggagcctggccatcgtcgtcgtggacgagaccgactacgaccacgaccagcagcccgtggtctgggcgacgccgccgccggccacgtccagcggcagcaacgccaccgcgcagctcctggacaacggcaacctcgtgctgcgggtcccgggcgccggcgtggtgtggcagagcttcgaccaccccacggacacgctcctgccgggcatgaagctgggcatcgacttccgcacggggctggaccggcgcatggtctcgtggcgcgccgcgggggacccgtcaccgggggagtactcgttccgcctggacccgagcggctcgccggagctcttcctctaccgcgggtccgcgcgcgtctacggcagcgggccctggaacggctaccagttcacgggcgtgcccaacctcaagtccaacagcctcctcaccttccgcttcgtctccgccgcggacgaggcctactacagctacggcgtggtcgacagcgccgccgtgctcacgcgcttcgtcctagactcgtcggggcagatccagcgcctcatgtggattgacatgacccgctcctggagcctcttctggtcctacccgctcgacgagtgcgacggctaccgcgcctgcgggccctacggcgtgtgcagcgtcgagcgcagccccatctgcggctgcgcgccgggcttcgacccgcgcttccccaaggagtgggcgctcagggacggctccggcgggtgcaggcgccgcacggacctcgcctgcgccggcgacggcttngccgcgctcaccaacatgaagctgccggagtcggccaacgccaccgtcgacatgtccctcaccctcgaccagtgccgagaggcctgcctcaggaactgcgcgtgccgggcctacgccggcgccaatgtcagcgcgccgggggccaccggctgcttcctgtggaccggcgacctcctcgacatgaggcagttcggcaaaggcgggcagaatctcttcgtccggctcgcggcgtccgacctacctctcagcagctcttcgccagcagacacggacgggcgaaccaagaggctcgtcgagatcatcgtcccgtcggttgccgcaccggcgctgctgctgctggccggactctgcatctgcgccgtgaggacgagaaggcgtaggacgaaggagaaggaggccatccccctggcgctgctgagagacgcgcagaggcagagcgcaccgttcggccgaaggaaccagattgccgcgtccaccgacgcgcaggacgagtccctgcacgacggccagcagggcggcagccaggactgcgacctgccgtcgttcgacgtcgagacgatccaggccgccacgggcaacttctcggctcacagcaagatcggccagggcgggttcgggcccgtctacatggggaagctggacagcgggcaggacatcgccgtgaaaaggctgtcgcggcggtccacgcaggggctccgggagttcaagaacgaggtgaagctgatagccaagctgcagcacaggaacctcgtcaggctcctcggctgctgcatcgacgggtcggagaggatgctggtctacgagtacatgcacaaccggagcctcaacaccttcctcttcaatgaggagaagcagccgatgctgagctgggagaaacggttcagcatcatcaacggcatcgcgaggggcatactgtacctgcaccaggattcggcgctgaggatcatccacagggacctcaaggccagcaacattctgctcgacaaggacatgaaccccaagatctccgacttcggtgtcgccaggatattcgggaccgaccagacggccgcgtacaccaagaaagtagtcggaacatatgggtatatgtctcctgagtacgccatggacggagtcttctccaccaagtccgacgtgttcagcttcggcgttctggtgctcgagatcgtcagcgggaagaagaacagagggttctaccacaccgagcttgacctcaacctcctaagatatgcgtggaggctgtggaaggacggcgagagcctggagttcatggaccagtccatcgcggacacgtccaacgcggcggaggtgctcaagtgcatccagatcgggctgctgtgcgtgcaggagcagccgaagcgccggcccaccatgtcggcggtgaccacgatgctcacctgcgagaaccccacgctgccggagccatgcgagccggcgttcagcacggggaggaaccacgacgacgacgacgaggacccggaggcgaaggcctgccggtctaacagcgccagcagctggacttgcaccgtcgtcgagggtagatgagatagattactgactgtttctgctgcgatgtgtactgtaaatatcaaagcatttttaacttcaacagcagtgagattaattcaattgaatttacctaaacattgaacagcagtgggcctcgtcaatgatggtccagataattcatattgcttttttcgc

SEQ ID NO: 18241 - protein, 909 aa, Zea mays subsp. mays
  peptide (1)..(909): Ceres Seq. ID no. 12435288
  misc_feature (395)..(395): Xaa is any aa, unknown or other
ARDHYLEHPNRKAINQLRHDQHVRNQRRFGSMRRRRCPLLAAVLFLLPLFHRHHAASGTDTDTVTLAAPLMGNRTLVSAGSAKYVLGFFAPDPDATGSGRAYLGIWFNGIPARTVVWVANRESPVLGSVGAAALRVLANGSLAIVVVDETDYDHDQQPVVWATPPPATSSGSNATAQLLDNGNLVLRVPGAGVVWQSFDHPTDTLLPGMKLGIDFRTGLDRRMVSWRAAGDPSPGEYSFRLDPSGSPELFLYRGSARVYGSGPWNGYQFTGVPNLKSNSLLTFRFVSAADEAYYSYGVVDSAAVLTRFVLDSSGQIQRLMWIDMTRSWSLFWSYPLDECDGYRACGPYGVCSVERSPICGCAPGFDPRFPKEWALRDGSGGCRRRTDLACAGDGXAALTNMKLPESANATVDMSLTLDQCREACLRNCACRAYAGANVSAPGATGCFLWTGDLLDMRQFGKGGQNLFVRLAASDLPLSSSSPADTDGRTKRLVEIIVPSVAAPALLLLAGLCICAVRTRRRRTKEKEAIPLALLRDAQRQSAPFGRRNQIAASTDAQDESLHDGQQGGSQDCDLPSFDVETIQAATGNFSAHSKIGQGGFGPVYMGKLDSGQDIAVKRLSRRSTQGLREFKNEVKLIAKLQHRNLVRLLGCCIDGSERMLVYEYMHNRSLNTFLFNEEKQPMLSWEKRFSIINGIARGILYLHQDSALRIIHRDLKASNILLDKDMNPKISDFGVARIFGTDQTAAYTKKVVGTYGYMSPEYAMDGVFSTKSDVFSFGVLVLEIVSGKKNRGFYHTELDLNLLRYAWRLWKDGESLEFMDQSIADTSNAAEVLKCIQIGLLCVQEQPKRRPTMSAVTTMLTCENPTLPEPCEPAFSTGRNHDDDDEDPEAKACRSNSASSWTCTVVEGR

SEQ ID NO: 18242 - protein, 878 aa, Zea mays subsp. mays
  peptide (1)..(878): Ceres Seq. ID no. 12435289
  misc_feature (364)..(364): Xaa is any aa, unknown or other
MRRRRCPLLAAVLFLLPLFHRHHAASGTDTDTVTLAAPLMGNRTLVSAGSAKYVLGFFAPDPDATGSGRAYLGIWFNGIPARTVVWVANRESPVLGSVGAAALRVLANGSLAIVVVDETDYDHDQQPVVWATPPPATSSGSNATAQLLDNGNLVLRVPGAGVVWQSFDHPTDTLLPGMKLGIDFRTGLDRRMVSWRAAGDPSPGEYSFRLDPSGSPELFLYRGSARVYGSGPWNGYQFTGVPNLKSNSLLTFRFVSAADEAYYSYGVVDSAAVLTRFVLDSSGQIQRLMWIDMTRSWSLFWSYPLDECDGYRACGPYGVCSVERSPICGCAPGFDPRFPKEWALRDGSGGCRRRTDLACAGDGXAALTNMKLPESANATVDMSLTLDQCREACLRNCACRAYAGANVSAPGATGCFLWTGDLLDMRQFGKGGQNLFVRLAASDLPLSSSSPADTDGRTKRLVEIIVPSVAAPALLLLAGLCICAVRTRRRRTKEKEAIPLALLRDAQRQSAPFGRRNQIAASTDAQDESLHDGQQGGSQDCDLPSFDVETIQAATGNFSAHSKIGQGGFGPVYMGKLDSGQDIAVKRLSRRSTQGLREFKNEVKLIAKLQHRNLVRLLGCCIDGSERMLVYEYMHNRSLNTFLFNEEKQPMLSWEKRFSIINGIARGILYLHQDSALRIIHRDLKASNILLDKDMNPKISDFGVARIFGTDQTAAYTKKVVGTYGYMSPEYAMDGVFSTKSDVFSFGVLVLEIVSGKKNRGFYHTELDLNLLRYAWRLWKDGESLEFMDQSIADTSNAAEVLKCIQIGLLCVQEQPKRRPTMSAVTTMLTCENPTLPEPCEPAFSTGRNHDDDDEDPEAKACRSNSASSWTCTVVEGR

SEQ ID NO: 18243 - protein, 839 aa, Zea mays subsp. mays
  peptide (1)..(839): Ceres Seq. ID no. 12435290
  misc_feature (325)..(325): Xaa is any aa, unknown or other
MGNRTLVSAGSAKYVLGFFAPDPDATGSGRAYLGIWFNGIPARTVVWVANRESPVLGSVGAAALRVLANGSLAIVVVDETDYDHDQQPVVWATPPPATSSGSNATAQLLDNGNLVLRVPGAGVVWQSFDHPTDTLLPGMKLGIDFRTGLDRRMVSWRAAGDPSPGEYSFRLDPSGSPELFLYRGSARVYGSGPWNGYQFTGVPNLKSNSLLTFRFVSAADEAYYSYGVVDSAAVLTRFVLDSSGQIQRLMWIDMTRSWSLFWSYPLDECDGYRACGPYGVCSVERSPICGCAPGFDPRFPKEWALRDGSGGCRRRTDLACAGDGXAALTNMKLPESANATVDMSLTLDQCREACLRNCACRAYAGANVSAPGATGCFLWTGDLLDMRQFGKGGQNLFVRLAASDLPLSSSSPADTDGRTKRLVEIIVPSVAAPALLLLAGLCICAVRTRRRRTKEKEAIPLALLRDAQRQSAPFGRRNQIAASTDAQDESLHDGQQGGSQDCDLPSFDVETIQAATGNFSAHSKIGQGGFGPVYMGKLDSGQDIAVKRLSRRSTQGLREFKNEVKLIAKLQHRNLVRLLGCCIDGSERMLVYEYMHNRSLNTFLFNEEKQPMLSWEKRFSIINGIARGILYLHQDSALRIIHRDLKASNILLDKDMNPKISDFGVARIFGTDQTAAYTKKVVGTYGYMSPEYAMDGVFSTKSDVFSFGVLVLEIVSGKKNRGFYHTELDLNLLRYAWRLWKDGESLEFMDQSIADTSNAAEVLKCIQIGLLCVQEQPKRRPTMSAVTTMLTCENPTLPEPCEPAFSTGRNHDDDDEDPEAKACRSNSASSWTCTVVEGR

SEQ ID NO: 18244 - DNA, 2442 bp, Zea mays subsp. mays
  misc_feature (1)..(2442): Ceres Seq. ID no. 13589290
  misc_feature (1)..(2442): Ortholog of  Ceres SEQ ID NO 14303276 as cited in SEQ ID NO 1264
  misc_feature (1)..(2442): Ortholog of  Ceres SEQ ID NO 12465083 as cited in SEQ ID NO 68239
actttcgcaagcccccttccgaccttgcccctgcggtctcccgagtcccgaagcatccccttccaaaaccctcgccgcgccgcagccacccttgcttccgcacgctatcgcccgggaccagccatctatggcggcgtccctgctcctccgcgccgtgcgccgaagggagcttgcgtcccctctcggatccctgggtgccagcatacagtcaacatgtgttgccaacatatgctcaaaatggggaaggtttgcaagacctttcagtgcaaaagctgctggaaatgaggttattgggattgatttggggacaacgaactcatgtgtttctgttatggagggaaagaacccaaaagttattgagaatgctgaaggtgcgagaacaacaccatctgttgtcgcatttactcagaagggtgaaagacttgttggaactccagccaagcgccaggcagtaaccaacccccagaatactttctttggaacaaagaggttaattgggcgacgctttgatgatccacagacacagaaagagatgaagatggtgccatacacaatcgtgaaggctccaaatggtgatgcttgggttcaaacaacagatggcaagcagtactcaccaagtcaggtcggtgcatttgtgctgaccaagatgaaggagacagctgaatcttaccttggcaagtctatctcaaaggcagtgattactgttccagcttatttcaatgacgctcagcgtcaggccacaaaggatgcaggccgcattgctggccttgatgttgaaaggatcatcaatgaacctacagcagccgctctgtcttatggaatgaacaacaaggaaggcttgatagcggtatttgatcttggaggaggaacttttgatatctctattctggagatctcaaatggagtttttgaggtcaaagcaacaaatggtgatactttcttgggtggtgaagattttgataatacactattggagttcttggtgagtgatttcaagaaaactgagggcatagatctgtcgaaagatagattggccctgcaaaggcttcgtgaagctgctgagaaggcaaaggttgaactttcgtcgacttctcagacagaaatcaatctgccattcataacagctgatgcttcaggggcaaaacatttgaacatcacactgacaaggtcaaaatttgaatctcttgtacacgatctgattgagagaactagagatccatgcaagaactgtttgaaggatgccggaatatctactaaagaggtggatgaagtacttcttgttggtggaatgactagggttccaaaggtgcaggaggtagtctctgaaatctttgggaagaacccaagcaaaggagtcaatccagatgaagctgtggccatgggtgctgcacttcagggtggcattctccgtggagatgttaaggagcttcttcttcttgatgttactcccctgtcactaggtattgagacgctcggtggtatcttcaccagattgatcaacagaaacactacaatccccacaaagaaaagtcaggtgttctcaactgctgctgacaaccagacccaagtgggtatccgggtgttgcaaggtgagcgtgaaatggctacagacaacaagctccttggtgaatttgacctcgtgggcattccacctgccccaagaggcttgcctcagattgaggttacattcgacatcgatgccaatggaattgtgaccgtctcagccaaagataaggctaccgggaaggagcagaacatcaccatacgatcctcgggtgggctgtcagaggctgacatccagaagatggtgcaagaagctgagctgcatgcccagaaggaccaggagcggaaagccctcattgacatcaggaacaatgccgacaccactatctacagcatcgagaagagtcttggagagtacagggacaagatcccggcagaggttgcatctgagatcgaggcagccatcgctgacctccgccaggagatggcctcggatgacattgagaagatcaaggccaagcttgaggctgccaacaaggctgtctcgaagattggacagcacatgtctggtggtggctctggcggctcgcagtcaggatctggacctcagggtggcggcgaccaggcgccggaggcagagtatgaggaggttaagaagtgaggctgcgggagttcaagggaattgtagcggcttgtttagaagtagctcgtttttttttttgggaacgcagatagtcagatgtctcagatgaggtgtaacctgtgttgcaataatctatgaacttacccctcttgttttctcctgcagtgaaacaggtcacacgacattgtcatggcttttattgcatatgaagccttgttctgcccgatgtactcgcacagcgaaaaccatcggcgagttctgttaatggattgaagtatatttgttcctgtgttttg

SEQ ID NO: 18245 - protein, 720 aa, Zea mays subsp. mays
  peptide (1)..(720): Ceres Seq. ID no. 13589291
LSQAPFRPCPCGLPSPEASPSKTLAAPQPPLLPHAIARDQPSMAASLLLRAVRRRELASPLGSLGASIQSTCVANICSKWGRFARPFSAKAAGNEVIGIDLGTTNSCVSVMEGKNPKVIENAEGARTTPSVVAFTQKGERLVGTPAKRQAVTNPQNTFFGTKRLIGRRFDDPQTQKEMKMVPYTIVKAPNGDAWVQTTDGKQYSPSQVGAFVLTKMKETAESYLGKSISKAVITVPAYFNDAQRQATKDAGRIAGLDVERIINEPTAAALSYGMNNKEGLIAVFDLGGGTFDISILEISNGVFEVKATNGDTFLGGEDFDNTLLEFLVSDFKKTEGIDLSKDRLALQRLREAAEKAKVELSSTSQTEINLPFITADASGAKHLNITLTRSKFESLVHDLIERTRDPCKNCLKDAGISTKEVDEVLLVGGMTRVPKVQEVVSEIFGKNPSKGVNPDEAVAMGAALQGGILRGDVKELLLLDVTPLSLGIETLGGIFTRLINRNTTIPTKKSQVFSTAADNQTQVGIRVLQGEREMATDNKLLGEFDLVGIPPAPRGLPQIEVTFDIDANGIVTVSAKDKATGKEQNITIRSSGGLSEADIQKMVQEAELHAQKDQERKALIDIRNNADTTIYSIEKSLGEYRDKIPAEVASEIEAAIADLRQEMASDDIEKIKAKLEAANKAVSKIGQHMSGGGSGGSQSGSGPQGGGDQAPEAEYEEVKK

SEQ ID NO: 18246 - protein, 678 aa, Zea mays subsp. mays
  peptide (1)..(678): Ceres Seq. ID no. 13589292
MAASLLLRAVRRRELASPLGSLGASIQSTCVANICSKWGRFARPFSAKAAGNEVIGIDLGTTNSCVSVMEGKNPKVIENAEGARTTPSVVAFTQKGERLVGTPAKRQAVTNPQNTFFGTKRLIGRRFDDPQTQKEMKMVPYTIVKAPNGDAWVQTTDGKQYSPSQVGAFVLTKMKETAESYLGKSISKAVITVPAYFNDAQRQATKDAGRIAGLDVERIINEPTAAALSYGMNNKEGLIAVFDLGGGTFDISILEISNGVFEVKATNGDTFLGGEDFDNTLLEFLVSDFKKTEGIDLSKDRLALQRLREAAEKAKVELSSTSQTEINLPFITADASGAKHLNITLTRSKFESLVHDLIERTRDPCKNCLKDAGISTKEVDEVLLVGGMTRVPKVQEVVSEIFGKNPSKGVNPDEAVAMGAALQGGILRGDVKELLLLDVTPLSLGIETLGGIFTRLINRNTTIPTKKSQVFSTAADNQTQVGIRVLQGEREMATDNKLLGEFDLVGIPPAPRGLPQIEVTFDIDANGIVTVSAKDKATGKEQNITIRSSGGLSEADIQKMVQEAELHAQKDQERKALIDIRNNADTTIYSIEKSLGEYRDKIPAEVASEIEAAIADLRQEMASDDIEKIKAKLEAANKAVSKIGQHMSGGGSGGSQSGSGPQGGGDQAPEAEYEEVKK

SEQ ID NO: 18247 - protein, 610 aa, Zea mays subsp. mays
  peptide (1)..(610): Ceres Seq. ID no. 13589293
MEGKNPKVIENAEGARTTPSVVAFTQKGERLVGTPAKRQAVTNPQNTFFGTKRLIGRRFDDPQTQKEMKMVPYTIVKAPNGDAWVQTTDGKQYSPSQVGAFVLTKMKETAESYLGKSISKAVITVPAYFNDAQRQATKDAGRIAGLDVERIINEPTAAALSYGMNNKEGLIAVFDLGGGTFDISILEISNGVFEVKATNGDTFLGGEDFDNTLLEFLVSDFKKTEGIDLSKDRLALQRLREAAEKAKVELSSTSQTEINLPFITADASGAKHLNITLTRSKFESLVHDLIERTRDPCKNCLKDAGISTKEVDEVLLVGGMTRVPKVQEVVSEIFGKNPSKGVNPDEAVAMGAALQGGILRGDVKELLLLDVTPLSLGIETLGGIFTRLINRNTTIPTKKSQVFSTAADNQTQVGIRVLQGEREMATDNKLLGEFDLVGIPPAPRGLPQIEVTFDIDANGIVTVSAKDKATGKEQNITIRSSGGLSEADIQKMVQEAELHAQKDQERKALIDIRNNADTTIYSIEKSLGEYRDKIPAEVASEIEAAIADLRQEMASDDIEKIKAKLEAANKAVSKIGQHMSGGGSGGSQSGSGPQGGGDQAPEAEYEEVKK

SEQ ID NO: 18248 - DNA, 1114 bp, Zea mays subsp. mays
  misc_feature (1)..(1114): Ceres Seq. ID no. 12350235
  misc_feature (1)..(1114): Ortholog of  Ceres SEQ ID NO 13660394 as cited in SEQ ID NO 66895
aacgctcaggcacactgtgcaggtgacggcgaaccaggtaaccagctgccgagggaggaaccctagcggaacactgtgcaggtgacggcggcgcgctaccggtgacgggggatacggcggcatcgtccccctcggcccctcctccatccccggcgtggcggcgcaggcagccagcctgcagggttttctgactcagattacttgttcactgtggggtgcaagcttaatcggccaccatggatgttgataagcaagaaacaatggaggagaccatccttgttggtgatgatctcatgcgtgggccgccatcccctgtcataccgaaagagatcgcatcacatgtccttgaagatgttgagctttgtgatggtatactcaagaaccttttcttatgcctacagatcaatgatattgagccattctgccaagatgaaattgtgctatatcgacagtgtgctgagaaaagggacaaggaaataagagagcggatgcaaaatagtgaatataaattgggtttttcgatgcccctgaaacaagcgaaggagagagctactcaactccaatcagaagtaacactgctagaaaggcgcatgattcttgctagtggacttgagggtatggaaggatttcgccagagatggagcttgcacggacagcttgaagacacaaggaaaaggctagaagcactgaaccatggcatggaaaaacgagagaaccaaagttctacggcggagaggacaaaatctccagctgggaagaagtggttcttttggtagtacgtgttgtgtgcaatatgcaaactccaacgatggtccagctgtgtggtccaaatgggatgacttgttaggcaagttgcattctaagcggctaagcctgaagcaatgtgatagcagctaacaaagctacaatttgtttgcaacatgtacctctagggtctactccccctaaagtttgtgccatactcatgtgtttccatttgcatctggtcctctttggatgcaaagtagcattggataaagctagggttttgtaaaatatgtttgttttttaaaaagcgacgaactctgtttggatatgacaaatcttggtagtttataaaagccatggttttatt

SEQ ID NO: 18249 - protein, 179 aa, Zea mays subsp. mays
  peptide (1)..(179): Ceres Seq. ID no. 12350236
MDVDKQETMEETILVGDDLMRGPPSPVIPKEIASHVLEDVELCDGILKNLFLCLQINDIEPFCQDEIVLYRQCAEKRDKEIRERMQNSEYKLGFSMPLKQAKERATQLQSEVTLLERRMILASGLEGMEGFRQRWSLHGQLEDTRKRLEALNHGMEKRENQSSTAERTKSPAGKKWFFW

SEQ ID NO: 18250 - protein, 171 aa, Zea mays subsp. mays
  peptide (1)..(171): Ceres Seq. ID no. 12350237
MEETILVGDDLMRGPPSPVIPKEIASHVLEDVELCDGILKNLFLCLQINDIEPFCQDEIVLYRQCAEKRDKEIRERMQNSEYKLGFSMPLKQAKERATQLQSEVTLLERRMILASGLEGMEGFRQRWSLHGQLEDTRKRLEALNHGMEKRENQSSTAERTKSPAGKKWFFW

SEQ ID NO: 18251 - protein, 160 aa, Zea mays subsp. mays
  peptide (1)..(160): Ceres Seq. ID no. 12350238
MRGPPSPVIPKEIASHVLEDVELCDGILKNLFLCLQINDIEPFCQDEIVLYRQCAEKRDKEIRERMQNSEYKLGFSMPLKQAKERATQLQSEVTLLERRMILASGLEGMEGFRQRWSLHGQLEDTRKRLEALNHGMEKRENQSSTAERTKSPAGKKWFFW

SEQ ID NO: 18252 - DNA, 1069 bp, Zea mays subsp. mays
  misc_feature (1)..(1069): Ceres Seq. ID no. 12383353
  misc_feature (1)..(1069): Ortholog of  Ceres SEQ ID NO 15178112 as cited in SEQ ID NO 1156
gcacgagaccattacctagaacatcctaatcaaaaaaagacggttcgagtccgttctagaatctagacacggcaatgaagcccaggcctctcggttgcggttgcggttgcgtcccggcggcggtagggtgcgtcggctgggcatggaggccgactccgaggccgcgcgggggagggagggcagcaggggtgtcgcccaagtgctcgcactcggcggcggcggcgggagcggtacagtcggaggaccgccgccgcgaggtgctgtaccgcccggtggagctgcccgggacggggtacgggtcggagctggaggcgcggatcgagaaggtcatctacgcctgccgcttcatgaccttcttcggaatttgtggcttgctcctcggctctgtcccatgcttcctcaagggatgcgttttcgtgatggatgccttcgtcgagtactaccggcacggcggagggaaggtcatcctcctgctggtggaagccattgagatgtttctcattgcaacggtcacgtttgtcttggggacgggcttgtacgagctcttcatcagtaacatggactccttttacgggtccaacctcttcggcctgttcagccttccggaacggcccaagtgggttgaaatcaagtcggtaaatgatctcaagacaaagctgggccatgtcattgtcatggttctgctggttggcatcttcgagaagagcaagagggtgaccatcacatcctgtgctgacctcttgtgctttgctggatcgattttcctgtcttcagtttgcctctacctgctttccaagctccataccaccaagggaggcagccaggcctgaaatgagagtgtttgtatgtaagtgatatgtcttgttctgttgctgtgcaacgcctgcctccggttctgttcgtgtagtaaataattaggcagtggggaggtaccgatttcccatgtactcatgttcatgtatggctagggagtttcagttaggcacaaaccaaactacattgagtatcatcctgtatgtgtagctcgatgtaatgcaatcaataactgatattctctttnagtaagctt

SEQ ID NO: 18253 - protein, 251 aa, Zea mays subsp. mays
  peptide (1)..(251): Ceres Seq. ID no. 12383354
MKPRPLGCGCGCVPAAVGCVGWAWRPTPRPRGGGRAAGVSPKCSHSAAAAGAVQSEDRRREVLYRPVELPGTGYGSELEARIEKVIYACRFMTFFGICGLLLGSVPCFLKGCVFVMDAFVEYYRHGGGKVILLLVEAIEMFLIATVTFVLGTGLYELFISNMDSFYGSNLFGLFSLPERPKWVEIKSVNDLKTKLGHVIVMVLLVGIFEKSKRVTITSCADLLCFAGSIFLSSVCLYLLSKLHTTKGGSQA

SEQ ID NO: 18254 - protein, 160 aa, Zea mays subsp. mays
  peptide (1)..(160): Ceres Seq. ID no. 12383355
MTFFGICGLLLGSVPCFLKGCVFVMDAFVEYYRHGGGKVILLLVEAIEMFLIATVTFVLGTGLYELFISNMDSFYGSNLFGLFSLPERPKWVEIKSVNDLKTKLGHVIVMVLLVGIFEKSKRVTITSCADLLCFAGSIFLSSVCLYLLSKLHTTKGGSQA

SEQ ID NO: 18255 - protein, 136 aa, Zea mays subsp. mays
  peptide (1)..(136): Ceres Seq. ID no. 12383356
MDAFVEYYRHGGGKVILLLVEAIEMFLIATVTFVLGTGLYELFISNMDSFYGSNLFGLFSLPERPKWVEIKSVNDLKTKLGHVIVMVLLVGIFEKSKRVTITSCADLLCFAGSIFLSSVCLYLLSKLHTTKGGSQA

SEQ ID NO: 18256 - DNA, 1005 bp, Zea mays subsp. mays; identical to SEQ ID NO: 2042
  misc_feature (1)..(1005): Ceres Seq. ID no. 13492805
  misc_feature (1)..(1005): Ortholog of  Ceres SEQ ID NO 14310291 as cited in SEQ ID NO 20682
  misc_feature (1)..(1005): Ortholog of  Ceres SEQ ID NO 14311256 as cited in SEQ ID NO 59050
  misc_feature (1)..(1005): Ortholog of  Ceres SEQ ID NO 13656079 as cited in SEQ ID NO 64220

SEQ ID NO: 18257 - protein, 284 aa, Zea mays subsp. mays; identical to SEQ ID NO: 2043
  peptide (1)..(284): Ceres Seq. ID no. 13492806

SEQ ID NO: 18258 - protein, 268 aa, Zea mays subsp. mays; identical to SEQ ID NO: 2044
  peptide (1)..(268): Ceres Seq. ID no. 13492807

SEQ ID NO: 18259 - protein, 198 aa, Zea mays subsp. mays; identical to SEQ ID NO: 2045
  peptide (1)..(198): Ceres Seq. ID no. 13492808

SEQ ID NO: 18260 - DNA, 2116 bp, Zea mays subsp. mays
  misc_feature (1)..(2116): Ceres Seq. ID no. 13566658
  misc_feature (1)..(2116): Ortholog of  Ceres SEQ ID NO 14313167 as cited in SEQ ID NO 54354
aacacaagaagaaactgacggaggagcggagcggagccgagccacggccagtgccaggagcgaaaataaaaaggggtaggagttcctcctccccaacctcacaagtaaagcagcagcagcagaccttcttgacctagcaagcaatggggccgccgttcctcgccgtcgccgtcatcgtcgccttcctggccgccgccgcgcaggccgccgaccccttcgccttcttcgactgggacgtctcctacatcaccgcctcccctctcggcgtcccgcagcaggtcattgcagtcaacaagcagttcccaggccctatcatgaacgtcactaccaactacaatgtggtcgtcaatgtgctcaacagcttagacgagcccctgctcatcacttgggatgggatccagcagcgcaagaattgctggcaggatggggttctcggcaccacctgccccataccgccaggttggaactggacctacaacttccaggtcaaggaccagattggcagcttcttctacttcccaccccttggtatgcagcgtgccgcgggggggttcggaggtatcactgtcaacaaccgcgcggtcatctcggtcccattcgacacgcccgatggggacatcacgctcttcatcggggactggtacaagatgaaccacacgcacctgaggaagatgctcgacgacggcaaggaactggggatgccagacggtgttttgatgaatggcaaggggccatataggtataatgactcgctagtgccagatggcattgagcacgagactatcaaagttgagccaggaaaaacataccgtttccgtgtccacaatgttggtgtctccacaagcttgaacttacggattcagaatcacaacatggcccttgttgaaacagaaggttcatacacgatgaagcagaattttactaatctcgacatccacgtgggccagtcttactcatttctggtcactatggatcagaacgcaagcagtgattattacatcgtggccagtgctaggtttgtgaacgaatcgctttggaccagagtcaccggtgttgcaattttgcaatattcaaattcaaagggaaaagcatctggtcctcttcctgatccaccaaatgatgagtatgacaaaactttttcaatgaaccaggcacgttccatcaggatgaacgtgagcactggtgctgctcgtccgaatcctcaaggatcatttcactatgggtctatcaatgtgagccaagtttacaagctgaggaatgaaccacctgttatcatcaatgggaagaaacggactacactgagtggtatctcttattccccacccgacactcctctaaggttggcagatctgtacgacaagaaggatgtctacacacttgacttccctacaatgccaattgatggaccgccagtgatcagaacatctgtcattaactccacatacaagaactttttggaaattgtatttcagaacaatgactcaactgtccagacctaccacattgatggatatgcattctgggttgtaggaatggactatggcgagtggactgagaatagccgtgggacttacaacaagtgggatggtgtttctcgttgcacgactcangtgtttccgggagcatggactgctgtgatgctgtcacttgacagcccaggattttggaatgtacggacagaaaacctggacacgtggtatctgggtcaggagacttacatcagggtggtggatccaaatggaggctataatgttactgagatggtggctccagacaacatgctctactgtggcctcctcaaggataaacagaaggctcagaagcctcatggttcgaggtcatcagcctctgcagcaaaactgaactatcatgtgctcgcggctttggtctctttggtggtagccttggtgttgggccattgacaagaactgcctccagcttgtggtcagctgctgtttgcaggttgattaggcgtttgacagaaatactgttagtaggtcagtcgaattcgtaggttccattcatgatttgtctggcaattgagaaaaaaaaatgctgtgccattgcgcatcttcgtccatcggaattgattaacatgctgaagaactgtgcagtt

SEQ ID NO: 18261 - protein, 592 aa, Zea mays subsp. mays
  peptide (1)..(592): Ceres Seq. ID no. 13566659
  misc_feature (489)..(489): Xaa is any aa, unknown or other
MGPPFLAVAVIVAFLAAAAQAADPFAFFDWDVSYITASPLGVPQQVIAVNKQFPGPIMNVTTNYNVVVNVLNSLDEPLLITWDGIQQRKNCWQDGVLGTTCPIPPGWNWTYNFQVKDQIGSFFYFPPLGMQRAAGGFGGITVNNRAVISVPFDTPDGDITLFIGDWYKMNHTHLRKMLDDGKELGMPDGVLMNGKGPYRYNDSLVPDGIEHETIKVEPGKTYRFRVHNVGVSTSLNLRIQNHNMALVETEGSYTMKQNFTNLDIHVGQSYSFLVTMDQNASSDYYIVASARFVNESLWTRVTGVAILQYSNSKGKASGPLPDPPNDEYDKTFSMNQARSIRMNVSTGAARPNPQGSFHYGSINVSQVYKLRNEPPVIINGKKRTTLSGISYSPPDTPLRLADLYDKKDVYTLDFPTMPIDGPPVIRTSVINSTYKNFLEIVFQNNDSTVQTYHIDGYAFWVVGMDYGEWTENSRGTYNKWDGVSRCTTXVFPGAWTAVMLSLDSPGFWNVRTENLDTWYLGQETYIRVVDPNGGYNVTEMVAPDNMLYCGLLKDKQKAQKPHGSRSSASAAKLNYHVLAALVSLVVALVLGH

SEQ ID NO: 18262 - protein, 535 aa, Zea mays subsp. mays
  peptide (1)..(535): Ceres Seq. ID no. 13566660
  misc_feature (432)..(432): Xaa is any aa, unknown or other
MNVTTNYNVVVNVLNSLDEPLLITWDGIQQRKNCWQDGVLGTTCPIPPGWNWTYNFQVKDQIGSFFYFPPLGMQRAAGGFGGITVNNRAVISVPFDTPDGDITLFIGDWYKMNHTHLRKMLDDGKELGMPDGVLMNGKGPYRYNDSLVPDGIEHETIKVEPGKTYRFRVHNVGVSTSLNLRIQNHNMALVETEGSYTMKQNFTNLDIHVGQSYSFLVTMDQNASSDYYIVASARFVNESLWTRVTGVAILQYSNSKGKASGPLPDPPNDEYDKTFSMNQARSIRMNVSTGAARPNPQGSFHYGSINVSQVYKLRNEPPVIINGKKRTTLSGISYSPPDTPLRLADLYDKKDVYTLDFPTMPIDGPPVIRTSVINSTYKNFLEIVFQNNDSTVQTYHIDGYAFWVVGMDYGEWTENSRGTYNKWDGVSRCTTXVFPGAWTAVMLSLDSPGFWNVRTENLDTWYLGQETYIRVVDPNGGYNVTEMVAPDNMLYCGLLKDKQKAQKPHGSRSSASAAKLNYHVLAALVSLVVALVLGH

SEQ ID NO: 18263 - protein, 463 aa, Zea mays subsp. mays
  peptide (1)..(463): Ceres Seq. ID no. 13566661
  misc_feature (360)..(360): Xaa is any aa, unknown or other
MQRAAGGFGGITVNNRAVISVPFDTPDGDITLFIGDWYKMNHTHLRKMLDDGKELGMPDGVLMNGKGPYRYNDSLVPDGIEHETIKVEPGKTYRFRVHNVGVSTSLNLRIQNHNMALVETEGSYTMKQNFTNLDIHVGQSYSFLVTMDQNASSDYYIVASARFVNESLWTRVTGVAILQYSNSKGKASGPLPDPPNDEYDKTFSMNQARSIRMNVSTGAARPNPQGSFHYGSINVSQVYKLRNEPPVIINGKKRTTLSGISYSPPDTPLRLADLYDKKDVYTLDFPTMPIDGPPVIRTSVINSTYKNFLEIVFQNNDSTVQTYHIDGYAFWVVGMDYGEWTENSRGTYNKWDGVSRCTTXVFPGAWTAVMLSLDSPGFWNVRTENLDTWYLGQETYIRVVDPNGGYNVTEMVAPDNMLYCGLLKDKQKAQKPHGSRSSASAAKLNYHVLAALVSLVVALVLGH

SEQ ID NO: 18264 - DNA, 1403 bp, Zea mays subsp. mays
  misc_feature (1)..(1403): Ceres Seq. ID no. 12363423
  misc_feature (1)..(1403): Ortholog of  Ceres SEQ ID NO 14304983 as cited in SEQ ID NO 53862
  misc_feature (1)..(1403): Ortholog of  Ceres SEQ ID NO 14310483 as cited in SEQ ID NO 58376
  misc_feature (1)..(1403): Ortholog of  Ceres SEQ ID NO 13597528 as cited in SEQ ID NO 64802
gcacgagaccattacctagaacatcctaatcgaaaaatacatacccaccggccggcgtcacagacacgcgagcagagcacagacacagagcacacagcacagaggcagccaccaccacaggcactcacccgcaccgctcggtcaccgaggagtggaggagctttgcagtcgcagcagcagcagtacagtgtgtgagtgtgaagggactagagcagggcacacagcgcaggccgcatgggcgaggcggaggtggagaagcccaaggaggcggcagaggaggagaagaagaaggaagacaagcccatggacgccacggcggcggcggaggacaagcccaaggacgccgcggcggcggaggacaagcccaaggacggggaggagaagaaggacgacgcgccccctcccccgccgccgccgccgcctgaggaggtcgagatgcgggtctacatgcactgcgagggatgcgcccgcaaggtcaagaagatcctcaagcgcttcgacggagtggaggacgtggtcgccgactccaagtcgcacaaggtggtggtgaaggggaagaaggcggccgccgaccccatgagggtggtggagcgcgtgcagaagaagaccggccgcaaggtggagttgctgtcgccgatcccgccgccaacgccgccggaggagaagaaggcagaggaggagcccgagccgccaaagccggaggagaagaaggagccgccggtgatcgccgtggtgctgaaggtgcacatgcactgcgaggcctgcgcccaggggatcaggaagaggatcctcaagatgaaaggcgtgcaatctgcagagccagacctcaaggcgtcggaggtggcagtgaagggcgtgttcgaggagtccaagctggcggagtacgtgtacaagcgcaccggcaagcacgcggccgtcgtcaagtccgagccggtcccggcgccaccgccggagagcggcgccggcgacaacacgggggccaaggaggaggagaaggggcaggaggaggagaaggagaaggaaggaggaggcgatgncggtggcgaggagaagaagaaggaagggggcaaggaggaagagaagaaggacggcgagaagcaggaggaggagaaggagnncgncggtggcggcgagaaggtggaggaaaaggagggagataaagacgctgccgctgccgccgccgccagcatgtacatgcactacccgaggttcccgttcccgggaggctactacgcgccgcctccggggtacgtctaccagccggtgtacccggcgccggcgtacgcggcgtacgcgccgccgcaccaccagcccatggcgccgcagatcttcagcgacgagaaccccaacgcatgctccgtcatgtaactaaaaaacagaaggagccttggcgagagaggggg

SEQ ID NO: 18265 - protein, 377 aa, Zea mays subsp. mays
  peptide (1)..(377): Ceres Seq. ID no. 12363424
  misc_feature (268)..(268): Xaa is any aa, unknown or other
  misc_feature (295)..(295): Xaa is any aa, unknown or other
  misc_feature (296)..(296): Xaa is any aa, unknown or other
MGEAEVEKPKEAAEEEKKKEDKPMDATAAAEDKPKDAAAAEDKPKDGEEKKDDAPPPPPPPPPEEVEMRVYMHCEGCARKVKKILKRFDGVEDVVADSKSHKVVVKGKKAAADPMRVVERVQKKTGRKVELLSPIPPPTPPEEKKAEEEPEPPKPEEKKEPPVIAVVLKVHMHCEACAQGIRKRILKMKGVQSAEPDLKASEVAVKGVFEESKLAEYVYKRTGKHAAVVKSEPVPAPPPESGAGDNTGAKEEEKGQEEEKEKEGGGDXGGEEKKKEGGKEEEKKDGEKQEEEKEXXGGGEKVEEKEGDKDAAAAAAASMYMHYPRFPFPGGYYAPPPGYVYQPVYPAPAYAAYAPPHHQPMAPQIFSDENPNACSVM

SEQ ID NO: 18266 - protein, 354 aa, Zea mays subsp. mays
  peptide (1)..(354): Ceres Seq. ID no. 12363425
  misc_feature (245)..(245): Xaa is any aa, unknown or other
  misc_feature (272)..(272): Xaa is any aa, unknown or other
  misc_feature (273)..(273): Xaa is any aa, unknown or other
MDATAAAEDKPKDAAAAEDKPKDGEEKKDDAPPPPPPPPPEEVEMRVYMHCEGCARKVKKILKRFDGVEDVVADSKSHKVVVKGKKAAADPMRVVERVQKKTGRKVELLSPIPPPTPPEEKKAEEEPEPPKPEEKKEPPVIAVVLKVHMHCEACAQGIRKRILKMKGVQSAEPDLKASEVAVKGVFEESKLAEYVYKRTGKHAAVVKSEPVPAPPPESGAGDNTGAKEEEKGQEEEKEKEGGGDXGGEEKKKEGGKEEEKKDGEKQEEEKEXXGGGEKVEEKEGDKDAAAAAAASMYMHYPRFPFPGGYYAPPPGYVYQPVYPAPAYAAYAPPHHQPMAPQIFSDENPNACSVM

SEQ ID NO: 18267 - protein, 310 aa, Zea mays subsp. mays
  peptide (1)..(310): Ceres Seq. ID no. 12363426
  misc_feature (201)..(201): Xaa is any aa, unknown or other
  misc_feature (228)..(228): Xaa is any aa, unknown or other
  misc_feature (229)..(229): Xaa is any aa, unknown or other
MRVYMHCEGCARKVKKILKRFDGVEDVVADSKSHKVVVKGKKAAADPMRVVERVQKKTGRKVELLSPIPPPTPPEEKKAEEEPEPPKPEEKKEPPVIAVVLKVHMHCEACAQGIRKRILKMKGVQSAEPDLKASEVAVKGVFEESKLAEYVYKRTGKHAAVVKSEPVPAPPPESGAGDNTGAKEEEKGQEEEKEKEGGGDXGGEEKKKEGGKEEEKKDGEKQEEEKEXXGGGEKVEEKEGDKDAAAAAAASMYMHYPRFPFPGGYYAPPPGYVYQPVYPAPAYAAYAPPHHQPMAPQIFSDENPNACSVM

SEQ ID NO: 18268 - DNA, 1293 bp, Zea mays subsp. mays
  misc_feature (1)..(1293): Ceres Seq. ID no. 12425298
  misc_feature (1)..(1293): Ortholog of  Ceres SEQ ID NO 14310880 as cited in SEQ ID NO 55342
  misc_feature (1)..(1293): Ortholog of  Ceres SEQ ID NO 14313451 as cited in SEQ ID NO 62474
gtgtgttctctgcgcggtcggcccggcaaacttcctctggttcctgatgatggatgtatcgcaagttgccgcagccgtggcgctgatggcgttcgcggtcgcgtttccggcgtcgggcttcccgtcaggcttcccgccagggacaccagcagcgttcccgaacccgtgggcggcgttccagaacctgtctggctgtcacatgggggaggagcggcagggcctggccgggctcaaggactacctcagccacttcggctacctcccgccgccgccgccgtcgtcccccttcagcgacgcgttcgaccagaacctggaggcggccatcgcgacgtaccagcgcaacttcggtctcaacgccaccggcgcgctggacccgtccaccgtctcgcagatggtcgcgcctcgctgcggcgtggccgacgtcatcaacggcacgtccaccatggcgaggagctcctccgccgacgcccacggcaggcacctgtacgcctacttccccggcgggccgacgtggccgccgttccggcgggacctcaagtacgcgatcaccgcgacctcggccgcgtccatcgaccggtccacgctgagcgacgtcttcgcgcgcgccttctcccggtgggccgcggccaccaacctgcggttcgcggagaccgcgtcggagtccgacgccgacatcaccatcggcttctactcgggctcgcacggcgacggcgagccgttcgacgggccgctgggaacgctggcgcacgccttctcgcccacggacggccggttccacctggacgccgcggaggcgtgggtggccggcagcgacgtgtcacgctcgtcggcgaccggggcggtggacctagagtccgtggcggtgcacgagatcggccacctcctggggctcggccactcctcggtgccggacgccatcatgtacccgacgatccggacggggacgaggaaggtggagctggaggccgacgacgtccaggggatacagagcctgtacgggagcaaccccaacttcaagggcgcgaccccgacttcgccggcgacgagcagccgcgagatggacagtagcgccggcgcgggatgccgaccagatagagtcttcgtcggagtagttgcggcagttggcctgctcctcctagtcctctagtgccgtagacctctagtgtttgccattttttttcggccacgtccttccttgtatcgatttgttgctcgattagctgattcttggatagattcttgtgtacataatatggttatcactattacagaataatataatatctgatacct

SEQ ID NO: 18269 - protein, 381 aa, Zea mays subsp. mays
  peptide (1)..(381): Ceres Seq. ID no. 12425299
CVLCAVGPANFLWFLMMDVSQVAAAVALMAFAVAFPASGFPSGFPPGTPAAFPNPWAAFQNLSGCHMGEERQGLAGLKDYLSHFGYLPPPPPSSPFSDAFDQNLEAAIATYQRNFGLNATGALDPSTVSQMVAPRCGVADVINGTSTMARSSSADAHGRHLYAYFPGGPTWPPFRRDLKYAITATSAASIDRSTLSDVFARAFSRWAAATNLRFAETASESDADITIGFYSGSHGDGEPFDGPLGTLAHAFSPTDGRFHLDAAEAWVAGSDVSRSSATGAVDLESVAVHEIGHLLGLGHSSVPDAIMYPTIRTGTRKVELEADDVQGIQSLYGSNPNFKGATPTSPATSSREMDSSAGAGCRPDRVFVGVVAAVGLLLLVL

SEQ ID NO: 18270 - protein, 366 aa, Zea mays subsp. mays
  peptide (1)..(366): Ceres Seq. ID no. 12425300
MMDVSQVAAAVALMAFAVAFPASGFPSGFPPGTPAAFPNPWAAFQNLSGCHMGEERQGLAGLKDYLSHFGYLPPPPPSSPFSDAFDQNLEAAIATYQRNFGLNATGALDPSTVSQMVAPRCGVADVINGTSTMARSSSADAHGRHLYAYFPGGPTWPPFRRDLKYAITATSAASIDRSTLSDVFARAFSRWAAATNLRFAETASESDADITIGFYSGSHGDGEPFDGPLGTLAHAFSPTDGRFHLDAAEAWVAGSDVSRSSATGAVDLESVAVHEIGHLLGLGHSSVPDAIMYPTIRTGTRKVELEADDVQGIQSLYGSNPNFKGATPTSPATSSREMDSSAGAGCRPDRVFVGVVAAVGLLLLVL

SEQ ID NO: 18271 - protein, 365 aa, Zea mays subsp. mays
  peptide (1)..(365): Ceres Seq. ID no. 12425301
MDVSQVAAAVALMAFAVAFPASGFPSGFPPGTPAAFPNPWAAFQNLSGCHMGEERQGLAGLKDYLSHFGYLPPPPPSSPFSDAFDQNLEAAIATYQRNFGLNATGALDPSTVSQMVAPRCGVADVINGTSTMARSSSADAHGRHLYAYFPGGPTWPPFRRDLKYAITATSAASIDRSTLSDVFARAFSRWAAATNLRFAETASESDADITIGFYSGSHGDGEPFDGPLGTLAHAFSPTDGRFHLDAAEAWVAGSDVSRSSATGAVDLESVAVHEIGHLLGLGHSSVPDAIMYPTIRTGTRKVELEADDVQGIQSLYGSNPNFKGATPTSPATSSREMDSSAGAGCRPDRVFVGVVAAVGLLLLVL

SEQ ID NO: 18272 - DNA, 2506 bp, Zea mays subsp. mays
  misc_feature (1)..(2506): Ceres Seq. ID no. 12375134
  misc_feature (1)..(2506): Ortholog of  Ceres SEQ ID NO 13656435 as cited in SEQ ID NO 65853
  misc_feature (1)..(2506): Ortholog of  Ceres SEQ ID NO 13657610 as cited in SEQ ID NO 66165
  misc_feature (1)..(2506): Ortholog of  Ceres SEQ ID NO 15179123 as cited in SEQ ID NO 0
  misc_feature (1)..(2506): Ortholog of  Ceres SEQ ID NO 15180188 as cited in SEQ ID NO 0
gcacgagaccattacctagaacatcctaatcgaaaaagaagagcacgcccactcctccggctcttcttctccaccggcaccagtccaccacctcctgccaccgcgcggccccaaccaaccacaccgcagcgcagcaatggcgggcaacggcgccatcgtggagagcgacccgctgaactggggcgcggcggcggcggagctggccgggagccacctggacgaggtgaagcgcatggtggcgcaggcccggcagcccgtggtgaagatcgagggctccaccctccgcgtcggccaggtggccgccgtcgcctccgccaaggacgcgtccggcgtcgccgtcgagctcgacgaggaggcccgcccccgcgtcaaggccagcagcgagtggatcctcgactgcatcgcccacggcggcgacatctacggcgtcaccaccggcttcggcggcacctcccaccgccgcaccaaggacgggcccgcgctccaggtcgagctgctcaggcatctcaacgccggaatcttcggcaccggcagcgacgggcacacgctgccgtcggaggtcacccgcgcggcgatgctggtgcgcatcaacaccctcctccagggctactccggcatccgcttcgagatcctcgaggccatcacgaagctgctcaacaccggtgtcagcccctgcctgccgctccggggcaccatcaccgcgtcgggcgacctggtcccgctctcctacatcgccggcctcatcacgggccgccccaacgcgcaggccgtcaccgtcgacggaaggaaggtggacgccgccgaggcgttcaagatcgccggcatcgagggcggcttcttcaagctcaaccccaaggagggcctcgccatcgtcaacggcacgtccgtgggctccgcgctcgcggccaccgtgatgtacgacgccaacgtcctggccgtcctgtcggaggtcctgtccgccgtcttctgcgaggtcatgaacggcaagcccgagtacacggaccacctgacccacaagctgaagcaccacccggggtccatcgaggccgcggccatcatggagcacatcctggatggcagctccttcatgaagcaggccaagaaggtgaacgagctggacccgctgctgaagcccaagcaggacaggtacgcgctccgcacgtcgccgcagtggctgggcccccagatcgaggtcatccgcgccgccaccaagtccatcgagcgcgaggtcaactccgtgaacgacaacccggtcatcgacgtccaccgcggcaaggcgctgcacggcggcaacttccagggcacccccatcggcgtgtccatggacaacgcccgcctcgccatcgccaacatcggcaagctcatgttcgcgcagttctccgagctcgtcaacgagttctacaacaacgggctcacctccaacctggccggcagccgcaaccccagcctggactacggcttcaagggcaccgagatcgccatggcctcctactgctccgagctccagtacctgggcaaccccatcaccaaccacgtgcagagcgcggagcagcacaaccaggacgtgaactccctgggcctcgtctcggccaggaagaccgccgaggcgatcgacatcctgaagctcatgtcgtccacctacatcgtggcgctgtgccaggccgtggacctgcgccacctcgaggagaacatcaaggcgtcggtgaagaacaccgtgacccaggtggccaagaaggtgctgaccatgaacccctcgggcgagctctccagcgcccgcttcagcgagaaggagctgatcagcgccatcgaccgcgaggccgtgttcacgtacgcggaggacgcggccagcgccagcctgccgctgatgcagaagctgcgcgccgtgctggtggaccacgccctcagcagcggcgacgcggagcgggagccctccatgttctccaagatcaccaggttcgaggaggagctccgcgcggtgctgccccaggaggtggaggccgcccgcgtggcggtcgccgagggcaccgcccccgtggcgaaccggatcgcggacagccggtcgttcccgctgtaccgcttcgtgcgcgaggagctcggctgcgtgttcctgaccggcgagaggctcaagtcccccggcgaggagtgcaacaaggtgttcgtcggcatcagccagggcaagctcgtggaccccatgctcgagtgcctcaaggagtgggacggcaagccgctgcccatcaacgtcaagtaaaagaacgccaaggagaagaggagggaggggaggaaatacgtgaaaaaaaataaaacctgtacacgtgtctgtccagatcgtgccgtcgatcgctcttcgttgttgatttttggttgtattgatcgatccgtatgtgtgcgtgcgtgtgtggcgttgctctttcttcttttgtgtagctgtgccctgccaccggccgacgtgcgtgcatgccatggtggcgggcagcgttttctaaggtcatatactgttgttgtgttt

SEQ ID NO: 18273 - protein, 766 aa, Zea mays subsp. mays
  peptide (1)..(766): Ceres Seq. ID no. 12375135
ARDHYLEHPNRKRRARPLLRLFFSTGTSPPPPATARPQPTTPQRSNGGQRRHRGERPAELGRGGGGAGREPPGRGEAHGGAGPAARGEDRGLHPPRRPGGRRRLRQGRVRRRRRARRGGPPPRQGQQRVDPRLHRPRRRHLRRHHRLRRHLPPPHQGRARAPGRAAQASQRRNLRHRQRRAHAAVGGHPRGDAGAHQHPPPGLLRHPLRDPRGHHEAAQHRCQPLPAAPGHHHRVGRPGPALLHRRPHHGPPQRAGRHRRRKEGGRRRGVQDRRHRGRLLQAQPQGGPRHRQRHVRGLRARGHRDVRRQRPGRPVGGPVRRLLRGHERQARVHGPPDPQAEAPPGVHRGRGHHGAHPGWQLLHEAGQEGERAGPAAEAQAGQVRAPHVAAVAGPPDRGHPRRHQVHRARGQLRERQPGHRRPPRQGAARRQLPGHPHRRVHGQRPPRHRQHRQAHVRAVLRARQRVLQQRAHLQPGRQPQPQPGLRLQGHRDRHGLLLLRAPVPGQPHHQPRAERGAAQPGRELPGPRLGQEDRRGDRHPEAHVVHLHRGAVPGRGPAPPRGEHQGVGEEHRDPGGQEGADHEPLGRALQRPLQREGADQRHRPRGRVHVRGGRGQRQPAADAEAARRAGGPRPQQRRRGAGALHVLQDHQVRGGAPRGAAPGGGGRPRGGRRGHRPRGEPDRGQPVVPAVPLRARGARLRVPDRREAQVPRRGVQQGVRRHQPGQARGPHARVPQGVGRQAAAHQRQVKERQGEEEGGEEIREKK

SEQ ID NO: 18274 - protein, 703 aa, Zea mays subsp. mays
  peptide (1)..(703): Ceres Seq. ID no. 12375136
MAGNGAIVESDPLNWGAAAAELAGSHLDEVKRMVAQARQPVVKIEGSTLRVGQVAAVASAKDASGVAVELDEEARPRVKASSEWILDCIAHGGDIYGVTTGFGGTSHRRTKDGPALQVELLRHLNAGIFGTGSDGHTLPSEVTRAAMLVRINTLLQGYSGIRFEILEAITKLLNTGVSPCLPLRGTITASGDLVPLSYIAGLITGRPNAQAVTVDGRKVDAAEAFKIAGIEGGFFKLNPKEGLAIVNGTSVGSALAATVMYDANVLAVLSEVLSAVFCEVMNGKPEYTDHLTHKLKHHPGSIEAAAIMEHILDGSSFMKQAKKVNELDPLLKPKQDRYALRTSPQWLGPQIEVIRAATKSIEREVNSVNDNPVIDVHRGKALHGGNFQGTPIGVSMDNARLAIANIGKLMFAQFSELVNEFYNNGLTSNLAGSRNPSLDYGFKGTEIAMASYCSELQYLGNPITNHVQSAEQHNQDVNSLGLVSARKTAEAIDILKLMSSTYIVALCQAVDLRHLEENIKASVKNTVTQVAKKVLTMNPSGELSSARFSEKELISAIDREAVFTYAEDAASASLPLMQKLRAVLVDHALSSGDAEREPSMFSKITRFEEELRAVLPQEVEAARVAVAEGTAPVANRIADSRSFPLYRFVREELGCVFLTGERLKSPGEECNKVFVGISQGKLVDPMLECLKEWDGKPLPINVK

SEQ ID NO: 18275 - protein, 671 aa, Zea mays subsp. mays
  peptide (1)..(671): Ceres Seq. ID no. 12375137
MVAQARQPVVKIEGSTLRVGQVAAVASAKDASGVAVELDEEARPRVKASSEWILDCIAHGGDIYGVTTGFGGTSHRRTKDGPALQVELLRHLNAGIFGTGSDGHTLPSEVTRAAMLVRINTLLQGYSGIRFEILEAITKLLNTGVSPCLPLRGTITASGDLVPLSYIAGLITGRPNAQAVTVDGRKVDAAEAFKIAGIEGGFFKLNPKEGLAIVNGTSVGSALAATVMYDANVLAVLSEVLSAVFCEVMNGKPEYTDHLTHKLKHHPGSIEAAAIMEHILDGSSFMKQAKKVNELDPLLKPKQDRYALRTSPQWLGPQIEVIRAATKSIEREVNSVNDNPVIDVHRGKALHGGNFQGTPIGVSMDNARLAIANIGKLMFAQFSELVNEFYNNGLTSNLAGSRNPSLDYGFKGTEIAMASYCSELQYLGNPITNHVQSAEQHNQDVNSLGLVSARKTAEAIDILKLMSSTYIVALCQAVDLRHLEENIKASVKNTVTQVAKKVLTMNPSGELSSARFSEKELISAIDREAVFTYAEDAASASLPLMQKLRAVLVDHALSSGDAEREPSMFSKITRFEEELRAVLPQEVEAARVAVAEGTAPVANRIADSRSFPLYRFVREELGCVFLTGERLKSPGEECNKVFVGISQGKLVDPMLECLKEWDGKPLPINVK

SEQ ID NO: 18276 - DNA, 1870 bp, Zea mays subsp. mays
  misc_feature (1)..(1870): Ceres Seq. ID no. 12361130
  misc_feature (1)..(1870): Ortholog of  Ceres SEQ ID NO 15177414 as cited in SEQ ID NO 57242
  misc_feature (1)..(1870): Ortholog of  Ceres SEQ ID NO 13594151 as cited in SEQ ID NO 58886
ctctaaaaccccaaccgtcgacgttcactcctcaccccctgcggccctgctcttttgagcctcactcctcagtcttcacgccgccggggcagtgctaagatccaggacacgcgctgtcccgctagcaccacgcctccccttgtcatcgtcctcctcccacgtgctgctgtgggggtgcagacgggagacacatccggacctgattgatttcttcgttttgttctgctggtttacatggctgcaagaaagaaaaagcctttgcttattgcttgccaagcaaccagtgccagaataacaagatctcaggctgctgcaaatagtacaagatctgggctggctccttctgtaccagtacctctgaaaacggagcataaccatgcagcgaaaaaaaagatgaaaagggaagcttcagatgaaaatgcttctgctgatgctggagcttcagctcctctgcctaaaaggcgtacagttctcaagaatgtaactaacataagctgtgctaaaatttccaaaaggtgcactgctgtgactgggctgaagttgggtccctcccagaaggctgggcagagcataaacaagcaatgcacaaacaagatctccatgcttctccctctggctgttggagggagttcacttgtggatgattctaataatgctgaagaaacacaaatggtagaccttttggcacagaaagagaagcagattgttttgcttaaggaggctcagccattacagaatactgaacaaaacaaaggcggtgcttgtgatgaggcatctgttgaggaaagaaatgccatgaatgtacacgaaactgctgccttaaaggctggggtctctaatggtttaaacattgtagatattgacaaaaataatggtgatcctcaaatgtgtgttacctacgttgcagagatatacagaaatctaatggcctcagagcttataagaagacctaggtcaaattacatggagactttgcaacaggacatcacagctagcatgcgaggtgttctaattgattggcttgttgaggtttcggacgaatataagcttgtggcagatacactttaccttacagtatatcttattgaccaatttctttctcagaactgtatccaaacgcacaagctgcaacttcttgggataactagtatgctgattgcctcgaaatatgaagagtattctgctcctagtgctgaagaattttgtaacataacggctggtacatatgcaaaggctgaggttctggaaatggagcaacaagtgcttaatgatctgggctttcatttatctgttccaacaacaaacacatttctcaggagattccttagagcagcacaggcttctcgtacagctcatctgaccactttgaattatctggcgagttatcttgccgagttgactttaatcagttacgatttcatgaaatttcttccctcagaggtggcagcatcttcgattttccttgcaaaatggacacttgaccaatctgaccatccttggaaccctactcttgagcactacacgtcttacaaaagcttcgatattagaacttgcgtgcgggctctacaggaactgcagcacaacaccagtaattgccccctcaacgccatccgtgagaagtatgggcagcagaagttcgagtgcgttgccaacctcaggtcaccggagctgctgcggtcgctcttcagttgatgtgctcccctgcactctgctgattcactcgccatttgctgcaacgatcctgacactgtataaaatatttcttcagtttctgttccatttccaaactttcttcagtttgaacatgcattctgtgacttgggtcaccgacaaaagaggcgcgacacactaatatatcaatttgtaactc

SEQ ID NO: 18277 - protein, 485 aa, Zea mays subsp. mays
  peptide (1)..(485): Ceres Seq. ID no. 12361131
MAARKKKPLLIACQATSARITRSQAAANSTRSGLAPSVPVPLKTEHNHAAKKKMKREASDENASADAGASAPLPKRRTVLKNVTNISCAKISKRCTAVTGLKLGPSQKAGQSINKQCTNKISMLLPLAVGGSSLVDDSNNAEETQMVDLLAQKEKQIVLLKEAQPLQNTEQNKGGACDEASVEERNAMNVHETAALKAGVSNGLNIVDIDKNNGDPQMCVTYVAEIYRNLMASELIRRPRSNYMETLQQDITASMRGVLIDWLVEVSDEYKLVADTLYLTVYLIDQFLSQNCIQTHKLQLLGITSMLIASKYEEYSAPSAEEFCNITAGTYAKAEVLEMEQQVLNDLGFHLSVPTTNTFLRRFLRAAQASRTAHLTTLNYLASYLAELTLISYDFMKFLPSEVAASSIFLAKWTLDQSDHPWNPTLEHYTSYKSFDIRTCVRALQELQHNTSNCPLNAIREKYGQQKFECVANLRSPELLRSLFS

SEQ ID NO: 18278 - protein, 432 aa, Zea mays subsp. mays
  peptide (1)..(432): Ceres Seq. ID no. 12361132
MKREASDENASADAGASAPLPKRRTVLKNVTNISCAKISKRCTAVTGLKLGPSQKAGQSINKQCTNKISMLLPLAVGGSSLVDDSNNAEETQMVDLLAQKEKQIVLLKEAQPLQNTEQNKGGACDEASVEERNAMNVHETAALKAGVSNGLNIVDIDKNNGDPQMCVTYVAEIYRNLMASELIRRPRSNYMETLQQDITASMRGVLIDWLVEVSDEYKLVADTLYLTVYLIDQFLSQNCIQTHKLQLLGITSMLIASKYEEYSAPSAEEFCNITAGTYAKAEVLEMEQQVLNDLGFHLSVPTTNTFLRRFLRAAQASRTAHLTTLNYLASYLAELTLISYDFMKFLPSEVAASSIFLAKWTLDQSDHPWNPTLEHYTSYKSFDIRTCVRALQELQHNTSNCPLNAIREKYGQQKFECVANLRSPELLRSLFS

SEQ ID NO: 18279 - protein, 363 aa, Zea mays subsp. mays
  peptide (1)..(363): Ceres Seq. ID no. 12361133
MLLPLAVGGSSLVDDSNNAEETQMVDLLAQKEKQIVLLKEAQPLQNTEQNKGGACDEASVEERNAMNVHETAALKAGVSNGLNIVDIDKNNGDPQMCVTYVAEIYRNLMASELIRRPRSNYMETLQQDITASMRGVLIDWLVEVSDEYKLVADTLYLTVYLIDQFLSQNCIQTHKLQLLGITSMLIASKYEEYSAPSAEEFCNITAGTYAKAEVLEMEQQVLNDLGFHLSVPTTNTFLRRFLRAAQASRTAHLTTLNYLASYLAELTLISYDFMKFLPSEVAASSIFLAKWTLDQSDHPWNPTLEHYTSYKSFDIRTCVRALQELQHNTSNCPLNAIREKYGQQKFECVANLRSPELLRSLFS

SEQ ID NO: 18280 - DNA, 677 bp, Zea mays subsp. mays
  misc_feature (1)..(677): Ceres Seq. ID no. 13493127
  misc_feature (1)..(677): Ortholog of  Ceres SEQ ID NO 12783998 as cited in SEQ ID NO 61535
  misc_feature (1)..(677): Ortholog of  Ceres SEQ ID NO 15174264 as cited in SEQ ID NO 61877
  misc_feature (1)..(677): Ortholog of  Ceres SEQ ID NO 12616383 as cited in SEQ ID NO 63582
atagaaatcgaccgagcgaatcctcgcttcgcagtcgcagcctttcctgcatcacaccaccgcgaaaccccagcagccgcatcgatggcgcccaaggcggagaagaagcccgctgcgaagaagccagcggaggaggagcccgctgccgcgaaggccccggcggggaagaagcccaaggccgagaagcgcctcccggcggccaagtcgtccggcaaagaaggcggcgacaagaagggcaagaagaaggcgaagaagtcggtggagacctacaagatctacatcttcaaggtgctgaagcaggtccaccccgacatcggcatctcttccaaggccatgtccatcatgaactccttcatcaacgacatcttcgagaagctcgccggcgaggctgccaagcttgcgcgctacaacaagaagcccaccatcacctctcgggagattcaaacctctgttcgccttgtccttcccggcgagctcgccaagcacgctgtctctgagggcaccaaggccgtcactaagttcacatcatcttagatttgaggtagtagctattgggtggcgttggtagttgtgtctcaatttgtctgctactaatagtggtaggagtatccatgtgtagttgggttgcggtaagaattgtgttaaactggtaatatgtttgaaattgctttttgtgg

SEQ ID NO: 18281 - protein, 177 aa, Zea mays subsp. mays
  peptide (1)..(177): Ceres Seq. ID no. 13493128
IEIDRANPRFAVAAFPASHHRETPAAASMAPKAEKKPAAKKPAEEEPAAAKAPAGKKPKAEKRLPAAKSSGKEGGDKKGKKKAKKSVETYKIYIFKVLKQVHPDIGISSKAMSIMNSFINDIFEKLAGEAAKLARYNKKPTITSREIQTSVRLVLPGELAKHAVSEGTKAVTKFTSS

SEQ ID NO: 18282 - protein, 164 aa, Zea mays subsp. mays
  peptide (1)..(164): Ceres Seq. ID no. 13493129
RNRPSESSLRSRSLSCITPPRNPSSRIDGAQGGEEARCEEASGGGARCREGPGGEEAQGREAPPGGQVVRQRRRRQEGQEEGEEVGGDLQDLHLQGAEAGPPRHRHLFQGHVHHELLHQRHLREARRRGCQACALQQEAHHHLSGDSNLCSPCPSRRARQARCL

SEQ ID NO: 18283 - protein, 149 aa, Zea mays subsp. mays; identical to SEQ ID NO: 2361
  peptide (1)..(149): Ceres Seq. ID no. 13493130

SEQ ID NO: 18284 - DNA, 2706 bp, Zea mays subsp. mays
  misc_feature (1)..(2706): Ceres Seq. ID no. 12361500
  misc_feature (1)..(2706): Ortholog of  Ceres SEQ ID NO 15176095 as cited in SEQ ID NO 59699
gcacgagaccattacctagaacatcctaatcgaaaaattatcgatcccagccccaggccatggcgacgaggtggaggaggtcgctgctctgggtcgccgtcgtccagttcctgaccctgtgcgtcgccgagcatctcgtagtggaagcatacaaaaagtcctacattgtgtatctgggatcacatgcatatggccgtgatgcgtcggcggaggagcatgctcgcgcaacccagtctcaccaccacctcctggcatcgatcctcggcggcgacgacgaccaccaccatgagacggcgcggcagtccatcttctactcctacaccaagagcagcatcaatggcttcgcggcgcacctggaggagtcggtcgcgcagcagatcgcggagcaccctgaggtggtggcggtgctggagagcaagatgctcaagctgcacaccacgcggtcctgggacttcatggacctggagcgcgacggtcacgtcctccctggctccatctggaaccacgctaggttcggacaggacgtcatcatcgccagtctcgacagcggagtgtggcccgagtcccacagcttccaagacgacggcggccaagtgccagctcgctggaagggctcctgtcaagacaccgttaagtacggtgtcgcctgcaaccgcaaactcatcggcgctaggttcttcaacaaagacatgctctttagcaacccagccgtggtgaacgccaactggacgcgcgacaccgagggccacggcacccacacgctctccaccgccgccggtggctttgtgccccgtgccagtctcttcggctatgccactggcacagccaaaggcggcgcgccgcgtgcgcgcgtcgccgcttataaggtttgctggtcgggagagtgcgccgccgccgacgtccttgcgggcttcgagtccgccatccatgacggcgccgacgtcatttccgtctccttcggtcaggacgcgcccctcgccgatgacgtcaagtcactcttccacgagcctgtcatgctcggctcgctccacgccgccatccacggtgtctccgtcatctgctccgccggcaactccggcccgtacgatgacaccgtcgtcaatgccgcgccatgggtcaccacagtcgccgccaccaccgtcgacagagacttccccaacgttctcaccctcggcaatagcgtgcgccttaggggaacgagcctcgagtctactacgctgcactccagcatgctctacccgatgatcgacgccgcgcgcgccgcgcgcaccacctctaacccgtacgacgcggccagctgcgggctcggcaccctcgaccctgctgccatcaggggcaagatcgtcgtgtgtcgccgcggcggcggaggcggaggcgacgtctcccgagtcagcaaggggatggccgtgctcgaggccgggggagccgggatgatcctcgccaacgacaggatggacggtgacgacatcgtcgcagacccgcacgtcctcccggccaccatgatcacctacagcgaggccgtctctctgtacggctacatggagtccaccagcaaccccgtcgccaacatctcacccgccaagacggaggtgggcgtcaagaactcgccgtccgtggcgggcttctcctcccgcgggcccagcgggactctgccgtacgtgctcaagcccgacatcgccgcgccgggggtcgacatcctggccgccttcaccgagtacgtcggccccacggagctcgcctccgacaagcgccgctccgagtacgccatcctgtccggcacgtccatggcctgcccacacgtctccggcgtcatcgctctcctcaaggcggcgcgccccgagtggagccccgccgcgatgcgctccgcgatcatgaccacggcgcgcacccaggacaacacgggagcgcccatgcgcgaccacgacggcaaggaggccaacgccttcgcctacggcgccggcaacgtgcaccccaaccgcgccgtcgacccgggcctcgtgtacgacgccggccccgacgactacttcaccttcctctgcgccatgggcatctccgcggcagacatgaagcggctcagcgccggcaagttcgcgtgcccagctaatagcgctaaggaggcgcccgccatggaggacctcaactacccgtccatcgtggtgccgtcgctgcgcggcacgcagacggtgacgcgacggctgaagaacgtcggccgtccggccaagtacctcgcgtcctggcgcgcgccggttgggatcaccatggaggtgaagccgagggtgcttgagttcagcaaggtcggtgaggaaaaggagttcaaggtgacggtgacgtcgcagcaggacaagctcgggatgggctacgtctttgggaggctcgtctggacagacgggacccactatgtcagaagccccgtcgtcgtcaacgccctcgcatgatctatccagttcgtgctaactagagtacactacctactactactacttgagggccttgtggatttttgtgacatcttagataagtagtaaggctctaaaatatatttttatttcttcttgttattattagtaaagaaatgagataggtttttttttgcttagctaaaagacatatcatctataataaattttggctctttgcatgggaacttgaattaatggtaaaaaactgcatataatataatgaagggaaaagggcacttctagtttc

SEQ ID NO: 18285 - protein, 791 aa, Zea mays subsp. mays
  peptide (1)..(791): Ceres Seq. ID no. 12361501
MATRWRRSLLWVAVVQFLTLCVAEHLVVEAYKKSYIVYLGSHAYGRDASAEEHARATQSHHHLLASILGGDDDHHHETARQSIFYSYTKSSINGFAAHLEESVAQQIAEHPEVVAVLESKMLKLHTTRSWDFMDLERDGHVLPGSIWNHARFGQDVIIASLDSGVWPESHSFQDDGGQVPARWKGSCQDTVKYGVACNRKLIGARFFNKDMLFSNPAVVNANWTRDTEGHGTHTLSTAAGGFVPRASLFGYATGTAKGGAPRARVAAYKVCWSGECAAADVLAGFESAIHDGADVISVSFGQDAPLADDVKSLFHEPVMLGSLHAAIHGVSVICSAGNSGPYDDTVVNAAPWVTTVAATTVDRDFPNVLTLGNSVRLRGTSLESTTLHSSMLYPMIDAARAARTTSNPYDAASCGLGTLDPAAIRGKIVVCRRGGGGGGDVSRVSKGMAVLEAGGAGMILANDRMDGDDIVADPHVLPATMITYSEAVSLYGYMESTSNPVANISPAKTEVGVKNSPSVAGFSSRGPSGTLPYVLKPDIAAPGVDILAAFTEYVGPTELASDKRRSEYAILSGTSMACPHVSGVIALLKAARPEWSPAAMRSAIMTTARTQDNTGAPMRDHDGKEANAFAYGAGNVHPNRAVDPGLVYDAGPDDYFTFLCAMGISAADMKRLSAGKFACPANSAKEAPAMEDLNYPSIVVPSLRGTQTVTRRLKNVGRPAKYLASWRAPVGITMEVKPRVLEFSKVGEEKEFKVTVTSQQDKLGMGYVFGRLVWTDGTHYVRSPVVVNALA

SEQ ID NO: 18286 - protein, 671 aa, Zea mays subsp. mays
  peptide (1)..(671): Ceres Seq. ID no. 12361502
MLKLHTTRSWDFMDLERDGHVLPGSIWNHARFGQDVIIASLDSGVWPESHSFQDDGGQVPARWKGSCQDTVKYGVACNRKLIGARFFNKDMLFSNPAVVNANWTRDTEGHGTHTLSTAAGGFVPRASLFGYATGTAKGGAPRARVAAYKVCWSGECAAADVLAGFESAIHDGADVISVSFGQDAPLADDVKSLFHEPVMLGSLHAAIHGVSVICSAGNSGPYDDTVVNAAPWVTTVAATTVDRDFPNVLTLGNSVRLRGTSLESTTLHSSMLYPMIDAARAARTTSNPYDAASCGLGTLDPAAIRGKIVVCRRGGGGGGDVSRVSKGMAVLEAGGAGMILANDRMDGDDIVADPHVLPATMITYSEAVSLYGYMESTSNPVANISPAKTEVGVKNSPSVAGFSSRGPSGTLPYVLKPDIAAPGVDILAAFTEYVGPTELASDKRRSEYAILSGTSMACPHVSGVIALLKAARPEWSPAAMRSAIMTTARTQDNTGAPMRDHDGKEANAFAYGAGNVHPNRAVDPGLVYDAGPDDYFTFLCAMGISAADMKRLSAGKFACPANSAKEAPAMEDLNYPSIVVPSLRGTQTVTRRLKNVGRPAKYLASWRAPVGITMEVKPRVLEFSKVGEEKEFKVTVTSQQDKLGMGYVFGRLVWTDGTHYVRSPVVVNALA

SEQ ID NO: 18287 - protein, 659 aa, Zea mays subsp. mays
  peptide (1)..(659): Ceres Seq. ID no. 12361503
MDLERDGHVLPGSIWNHARFGQDVIIASLDSGVWPESHSFQDDGGQVPARWKGSCQDTVKYGVACNRKLIGARFFNKDMLFSNPAVVNANWTRDTEGHGTHTLSTAAGGFVPRASLFGYATGTAKGGAPRARVAAYKVCWSGECAAADVLAGFESAIHDGADVISVSFGQDAPLADDVKSLFHEPVMLGSLHAAIHGVSVICSAGNSGPYDDTVVNAAPWVTTVAATTVDRDFPNVLTLGNSVRLRGTSLESTTLHSSMLYPMIDAARAARTTSNPYDAASCGLGTLDPAAIRGKIVVCRRGGGGGGDVSRVSKGMAVLEAGGAGMILANDRMDGDDIVADPHVLPATMITYSEAVSLYGYMESTSNPVANISPAKTEVGVKNSPSVAGFSSRGPSGTLPYVLKPDIAAPGVDILAAFTEYVGPTELASDKRRSEYAILSGTSMACPHVSGVIALLKAARPEWSPAAMRSAIMTTARTQDNTGAPMRDHDGKEANAFAYGAGNVHPNRAVDPGLVYDAGPDDYFTFLCAMGISAADMKRLSAGKFACPANSAKEAPAMEDLNYPSIVVPSLRGTQTVTRRLKNVGRPAKYLASWRAPVGITMEVKPRVLEFSKVGEEKEFKVTVTSQQDKLGMGYVFGRLVWTDGTHYVRSPVVVNALA

SEQ ID NO: 18288 - DNA, 1885 bp, Zea mays subsp. mays; identical to SEQ ID NO: 13952
  misc_feature (1)..(1885): Ceres Seq. ID no. 12435283
  misc_feature (1)..(1885): Ortholog of  Ceres SEQ ID NO 13596935 as cited in SEQ ID NO 63031
  misc_feature (1)..(1885): Ortholog of  Ceres SEQ ID NO 13597407 as cited in SEQ ID NO 64106
  misc_feature (1)..(1885): Ortholog of  Ceres SEQ ID NO 15180690 as cited in SEQ ID NO 0

SEQ ID NO: 18289 - protein, 548 aa, Zea mays subsp. mays; identical to SEQ ID NO: 13953
  peptide (1)..(548): Ceres Seq. ID no. 12435284

SEQ ID NO: 18290 - protein, 534 aa, Zea mays subsp. mays; identical to SEQ ID NO: 13954
  peptide (1)..(534): Ceres Seq. ID no. 12435285

SEQ ID NO: 18291 - protein, 458 aa, Zea mays subsp. mays; identical to SEQ ID NO: 13955
  peptide (1)..(458): Ceres Seq. ID no. 12435286

SEQ ID NO: 18292 - DNA, 1889 bp, Zea mays subsp. mays
  misc_feature (1)..(1889): Ceres Seq. ID no. 12359044
  misc_feature (1)..(1889): Ortholog of  Ceres SEQ ID NO 13592859 as cited in SEQ ID NO 20479
cccggtttattttttcttcgtcctggatgcgtcggtcgcgtgtttgatctgactaagccgcggaggagggtgctagatgtccgtgcggtgggcggtggctcccgagggcgaccggagttaggtccttgccgccttcagtgcggtggggaagcgagacattgaaggcgcagaacccaaagaatgggtaagagaggaaagtggtttagtgcggtgaagaaagtcttcagctcctccgatccagatggaaaggaagccaaggcccagaaggcagacaaatcgaaatccaagaggagatggccatttggaaagtccaagcactcggagccttccatatcgacggtgccaggcactgctccagcagtagctccgttgccatcaccaccagcaactcagccccactctctgggagatcaaagatgtcaatccagttgaaacagacagtgagcagaacaagcatgcctactccgttgcgcttgcgtctgctgtcgctgctgaagctgcagcagttgctgcccaggctgctgcggaagttgtccgcctcacagcagttaccacggctgcaccaaagatgcctgttagttcgagggaataacttgccgccaccaagattcagactgccttcaggggttatctggcaaggagagcattgcgtgcactaagagggctagttagattgaagtcgcttgttgatggaaatgctgtcaaacgccaaaccgctcacaccttgcaatgcacacaagcaatgacaagagttcaaactcaaatctactctagaagggtgaagttggaggaggagaaacaggctcttcaaagacaactccaattgaaacatcaaagggaacttgagaaaatgaagattgatgaagattgggatcacagccatcaatccaaagagcaaattgaggccaacctaatgatgaaacaggaagctgcactgaggcgagagagagcacttgcatatgcattttctcaccagtggaggaattctggtcgaactataacccctacttttacggaacctgggaaccccaactggggctggagctggatggagcgctggatgacagcaagaccatgggagagtcggttggcggcggcatcggacaaggaccctaaagaacgtgctgtgacaaagaatgcgagcaccagtgctgttcgagtacctgtatcccgtgccatctcgattcagagaccagcaacaccaaacaagtcgagccgcccaccaagccggcagtcactttcaaccccgccatcgaagaccccgtcagcctcaggaaaggccaggccggcaagtccaaggaacagttggctgtacaaggaggatgacctgaggagcatcacgagcatccgctccgagcgcccaaggaggcagagcacgggtggaggctcggtccgggacgataccagcctgaccagcacaccacctctccccagctacatgcagtcgaccgagtctgcacgggccaagtctcggtaccgcagtctactactgactgagaagcttgaggttcctgagagagcgcctctggcccactccgttgtcaagaagcgcctgtcgttccccgtcgtcgagaagccaagcgttgtgccgacagagaagcccagggaaagagtgaggcgccattccgaccctccgaaggtcgatcctgcgacgctcaaggatgcccctgctgcctgaccagtgaccaggccttatgtgattgttaggtttcgtgctcttttaacaccgtgatgtattatctgagttaggttgctttgttcgtgtcatcgtatgatctgtccgggttgattttgagacagttctaactgtgtttacagacaatgcgtgatgctaaatgtatgtgtggttggttggctttaaatgtactgatatgatagtatttgatttc

SEQ ID NO: 18293 - protein, 311 aa, Zea mays subsp. mays
  peptide (1)..(311): Ceres Seq. ID no. 12359045
MTRVQTQIYSRRVKLEEEKQALQRQLQLKHQRELEKMKIDEDWDHSHQSKEQIEANLMMKQEAALRRERALAYAFSHQWRNSGRTITPTFTEPGNPNWGWSWMERWMTARPWESRLAAASDKDPKERAVTKNASTSAVRVPVSRAISIQRPATPNKSSRPPSRQSLSTPPSKTPSASGKARPASPRNSWLYKEDDLRSITSIRSERPRRQSTGGGSVRDDTSLTSTPPLPSYMQSTESARAKSRYRSLLLTEKLEVPERAPLAHSVVKKRLSFPVVEKPSVVPTEKPRERVRRHSDPPKVDPATLKDAPAA

SEQ ID NO: 18294 - protein, 275 aa, Zea mays subsp. mays
  peptide (1)..(275): Ceres Seq. ID no. 12359046
MKIDEDWDHSHQSKEQIEANLMMKQEAALRRERALAYAFSHQWRNSGRTITPTFTEPGNPNWGWSWMERWMTARPWESRLAAASDKDPKERAVTKNASTSAVRVPVSRAISIQRPATPNKSSRPPSRQSLSTPPSKTPSASGKARPASPRNSWLYKEDDLRSITSIRSERPRRQSTGGGSVRDDTSLTSTPPLPSYMQSTESARAKSRYRSLLLTEKLEVPERAPLAHSVVKKRLSFPVVEKPSVVPTEKPRERVRRHSDPPKVDPATLKDAPAA

SEQ ID NO: 18295 - protein, 254 aa, Zea mays subsp. mays
  peptide (1)..(254): Ceres Seq. ID no. 12359047
MMKQEAALRRERALAYAFSHQWRNSGRTITPTFTEPGNPNWGWSWMERWMTARPWESRLAAASDKDPKERAVTKNASTSAVRVPVSRAISIQRPATPNKSSRPPSRQSLSTPPSKTPSASGKARPASPRNSWLYKEDDLRSITSIRSERPRRQSTGGGSVRDDTSLTSTPPLPSYMQSTESARAKSRYRSLLLTEKLEVPERAPLAHSVVKKRLSFPVVEKPSVVPTEKPRERVRRHSDPPKVDPATLKDAPAA

SEQ ID NO: 18296 - DNA, 1718 bp, Zea mays subsp. mays
  misc_feature (1)..(1718): Ceres Seq. ID no. 12368120
  misc_feature (1)..(1718): Ortholog of  Ceres SEQ ID NO 14313943 as cited in SEQ ID NO 54725
  misc_feature (1)..(1718): Ortholog of  Ceres SEQ ID NO 14309674 as cited in SEQ ID NO 55707
  misc_feature (1)..(1718): Ortholog of  Ceres SEQ ID NO 13658728 as cited in SEQ ID NO 66270
  misc_feature (1)..(1718): Ortholog of  Ceres SEQ ID NO 12465428 as cited in SEQ ID NO 68898
gaggaagccttggcctgccgaccaaaccatgcttgcgcgccgactcgcggcccccgacggcggtaggctgttctctgcggcgtcctccgcctccgcccgaggcggtcacgcgggtggcgacacactagggaagcgcctgctgaagctcatctacccgaagcggagcgcggtggtggtgctgcagcggtgggcggacgaaggccgcaccgtgcagaagtaccagctcaaccgcgtcgtcagggagcttcggaagtacggtcgcttcaagcacgccctggagatatgcgagtggatgcggacccagccggagatgcggctgcttccgggggatcacgcggtgcaccttgacctcgtcgccaaggtcaggggactcgccagtgccaccaagttcttcgaggacatgccggagcgcgccaaggggccgtccacctgcaacgcgctgctgcacgcgtacgtacagaatggcgcaagagagaaggccgaggccatgctggcggagatggcccgtgttgggtacctcacctgtgccctgcccttcaaccacatgatgtcgctctacatggcgactggtgagctcgagcgggtgccagaaatgatcaaggagctaaggaggtacacactccccgacctcgttacctacaacatatggctgacatactgctccaaaaaggacagcgtgaagagtgccgaaaaggtctttggtctgatgaaggatgactgcgtggttcctgattggatgaccttcagcttgctcggtagcatttacatcaacgccggactccatgtggaaggtcggaacgcgttggtggagatggagaagagggcctccaggaaggagcgagctgcttactcatcgctcctcaccctgtatgcaagcttgtcagatagaggtaacttggacagagtatggaataagatgagaggaaccttcaggaagttcagtgacacagagtacaagtgcatgctcacttccctcttgaggtttgacgacatagcagcagcagaaagcatttttagtgagtgggaatcaacatctggaacacgtgattcaaggatcccaaacacgatcctttcatattacatcaagaatggcatgataaaaaaggcagagagctttcttgaccacattgtggagaaaggagtcaagcccagctatagcacatgggaggcattcgtctggggttatctcggtgacaagacggacaaagtccttgagtgcatgaagaaagccctgtcatgcttggagaaatgggagccgaaccatgagctcgctaccgcgatcttttctcagatcgagaagacaggtgacattgaagctgcagagaagctcctggtcatattccgggatgcagagtatgttaccactgagatgtacaactcagtcttgcgcacttatgcagaggccaagctcatgcctctgatagttgacgaacgcatggagcaggataaggtggccatggatgtggaaaccaagagattgttgaggttgaccagcaaatatccaatcggtgaggtttcagtatcgatgtcttgaggtgtgccaacaatagaagggtgtttcaggatgcaatgtgtactagcccttacgttttcatgcactttagttctgaagtacaatgcaatgcaaataacaaacatttagttttgaagtgcaatacagatggttgtgattttttttgcatacttatctaacttgttggactgtattgtctctatct

SEQ ID NO: 18297 - protein, 510 aa, Zea mays subsp. mays
  peptide (1)..(510): Ceres Seq. ID no. 12368121
RKPWPADQTMLARRLAAPDGGRLFSAASSASARGGHAGGDTLGKRLLKLIYPKRSAVVVLQRWADEGRTVQKYQLNRVVRELRKYGRFKHALEICEWMRTQPEMRLLPGDHAVHLDLVAKVRGLASATKFFEDMPERAKGPSTCNALLHAYVQNGAREKAEAMLAEMARVGYLTCALPFNHMMSLYMATGELERVPEMIKELRRYTLPDLVTYNIWLTYCSKKDSVKSAEKVFGLMKDDCVVPDWMTFSLLGSIYINAGLHVEGRNALVEMEKRASRKERAAYSSLLTLYASLSDRGNLDRVWNKMRGTFRKFSDTEYKCMLTSLLRFDDIAAAESIFSEWESTSGTRDSRIPNTILSYYIKNGMIKKAESFLDHIVEKGVKPSYSTWEAFVWGYLGDKTDKVLECMKKALSCLEKWEPNHELATAIFSQIEKTGDIEAAEKLLVIFRDAEYVTTEMYNSVLRTYAEAKLMPLIVDERMEQDKVAMDVETKRLLRLTSKYPIGEVSVSMS

SEQ ID NO: 18298 - protein, 501 aa, Zea mays subsp. mays
  peptide (1)..(501): Ceres Seq. ID no. 12368122
MLARRLAAPDGGRLFSAASSASARGGHAGGDTLGKRLLKLIYPKRSAVVVLQRWADEGRTVQKYQLNRVVRELRKYGRFKHALEICEWMRTQPEMRLLPGDHAVHLDLVAKVRGLASATKFFEDMPERAKGPSTCNALLHAYVQNGAREKAEAMLAEMARVGYLTCALPFNHMMSLYMATGELERVPEMIKELRRYTLPDLVTYNIWLTYCSKKDSVKSAEKVFGLMKDDCVVPDWMTFSLLGSIYINAGLHVEGRNALVEMEKRASRKERAAYSSLLTLYASLSDRGNLDRVWNKMRGTFRKFSDTEYKCMLTSLLRFDDIAAAESIFSEWESTSGTRDSRIPNTILSYYIKNGMIKKAESFLDHIVEKGVKPSYSTWEAFVWGYLGDKTDKVLECMKKALSCLEKWEPNHELATAIFSQIEKTGDIEAAEKLLVIFRDAEYVTTEMYNSVLRTYAEAKLMPLIVDERMEQDKVAMDVETKRLLRLTSKYPIGEVSVSMS

SEQ ID NO: 18299 - protein, 413 aa, Zea mays subsp. mays
  peptide (1)..(413): Ceres Seq. ID no. 12368123
MRTQPEMRLLPGDHAVHLDLVAKVRGLASATKFFEDMPERAKGPSTCNALLHAYVQNGAREKAEAMLAEMARVGYLTCALPFNHMMSLYMATGELERVPEMIKELRRYTLPDLVTYNIWLTYCSKKDSVKSAEKVFGLMKDDCVVPDWMTFSLLGSIYINAGLHVEGRNALVEMEKRASRKERAAYSSLLTLYASLSDRGNLDRVWNKMRGTFRKFSDTEYKCMLTSLLRFDDIAAAESIFSEWESTSGTRDSRIPNTILSYYIKNGMIKKAESFLDHIVEKGVKPSYSTWEAFVWGYLGDKTDKVLECMKKALSCLEKWEPNHELATAIFSQIEKTGDIEAAEKLLVIFRDAEYVTTEMYNSVLRTYAEAKLMPLIVDERMEQDKVAMDVETKRLLRLTSKYPIGEVSVSMS

SEQ ID NO: 18300 - DNA, 1041 bp, Zea mays subsp. mays
  misc_feature (1)..(1041): Ceres Seq. ID no. 14301986
  misc_feature (1)..(1041): Ortholog of  Ceres SEQ ID NO 13654285 as cited in SEQ ID NO 68661
accgcctccattcctctctgctctgttctgctccaccaccctgatgacgacgaggccagacggcagcgcctccacgcccgcggacaagcagctcgtggcggcctccaacggcaacggcaacggcaacccgctggccgtccgcaaggcgccctccaaggaccggcacagcaaggtggacgggcgaggccggcgcatccgcatgcccatcatctgcgccgctcgcgtgttccagctcacgagggagctcgggcacaagtccgacggacagaccatcgagtggctgctcaggcaggccgagccctccatcatcgccgccaccggcaccggcaccacgccggcctccttctccacctcgtccccgtcatcgctccgctcctcctcgtcctccacagccggcgtccacccgcacgccgccccggcccaggggttctgggcgctgccggcgcgggccgacttcggacagctctggagcttcgcggccgcgccggagatgatggtcgccgcggctgcagcagcagcgccgggcatggccggggaggcgtccgccgccagggtcggcaactacctccccgtcgcgcagggcaacctcaacctgctggcctccttctccggcgggcctgctcccacagcggccgccggacgggccgaggaggagaccgcccgctaagggtcgtcaattcccagtctctctgtgtgtggctcaatccgggatagacagtgtcactctcacccaactctccatttctttttttggggttcagttcagatcagtgttggccacccgaattgggtggccttccactccatcccagtgagcaatcaagcaaggaggagctgcatcagctctccctcccgtcctatctatctatatgattttttttctttctttttgagcattggattagtgctctcaactacccacaagtgtttattagtcagccagctccttcagtgctactagcagctcagttcagtccatggtatgtgtccggattgtttgctgatgtgcttgttgatcaattaatggacataatggttgcg

SEQ ID NO: 18301 - protein, 237 aa, Zea mays subsp. mays
  peptide (1)..(237): Ceres Seq. ID no. 14301987
TASIPLCSVLLHHPDDDEARRQRLHARGQAARGGLQRQRQRQPAGRPQGALQGPAQQGGRARPAHPHAHHLRRSRVPAHEGARAQVRRTDHRVAAQAGRALHHRRHRHRHHAGLLLHLVPVIAPLLLVLHSRRPPARRPGPGVLGAAGAGRLRTALELRGRAGDDGRRGCSSSAGHGRGGVRRQGRQLPPRRAGQPQPAGLLLRRACSHSGRRTGRGGDRPLRVVNSQSLCVWLNPG

SEQ ID NO: 18302 - protein, 221 aa, Zea mays subsp. mays
  peptide (1)..(221): Ceres Seq. ID no. 14301988
PPPFLSALFCSTTLMTTRPDGSASTPADKQLVAASNGNGNGNPLAVRKAPSKDRHSKVDGRGRRIRMPIICAARVFQLTRELGHKSDGQTIEWLLRQAEPSIIAATGTGTTPASFSTSSPSSLRSSSSSTAGVHPHAAPAQGFWALPARADFGQLWSFAAAPEMMVAAAAAAAPGMAGEASAARVGNYLPVAQGNLNLLASFSGGPAPTAAAGRAEEETAR

SEQ ID NO: 18303 - protein, 207 aa, Zea mays subsp. mays
  peptide (1)..(207): Ceres Seq. ID no. 14301989
MTTRPDGSASTPADKQLVAASNGNGNGNPLAVRKAPSKDRHSKVDGRGRRIRMPIICAARVFQLTRELGHKSDGQTIEWLLRQAEPSIIAATGTGTTPASFSTSSPSSLRSSSSSTAGVHPHAAPAQGFWALPARADFGQLWSFAAAPEMMVAAAAAAAPGMAGEASAARVGNYLPVAQGNLNLLASFSGGPAPTAAAGRAEEETAR

SEQ ID NO: 18304 - DNA, 942 bp, Zea mays subsp. mays
  misc_feature (1)..(942): Ceres Seq. ID no. 12358481
  misc_feature (1)..(942): Ortholog of  Ceres SEQ ID NO 15168666 as cited in SEQ ID NO 20642
catgttcacaacttaagaactgtttattctggtgtcagtgacagcactgcatttgccactccattccccttccctgggaaacaacagttatctgggatgcatgcacaaggggctaccaatgaaaagacatggcaagatttccgtctttttgagccttcaaaacagaacatgctccaaaattaccaccaaagaaatcagcaaaatggtcaaatagctgaacaagagccagaaaattctgtctggtctagcagttaccatgtgtgattcagtaacttgtaccaggatgattgctggagttgctggggactattggattaagtggcacagcctgatctattgagcttggcccatacctgcagcactctgttaaatttcttttgagcatggtggtctttgaagcatgacaatggctgctcttaggtttgggattgccaccatcttctgggacaaagagggagtggaggttgattgatctgtcggcagtctgatggggatgaattatacgaggtcttcaacgctgacacaaagggttaatgaaacaaactcgaatccattgattataggcgctccgcacggaccatatgattcatctctcgttggacatgtagctacaagaatggtgtcagtgggcggttgctgccgcaactaaaagtccattcagtgtggatgtcagttgggctacgctatctaagaataaaaagtttgaggaacaacgagcatgttgccaagtagtttctcaagtataagttactgcgtctagttatattgttcctttcctttcggcaacaatgtgtcatgttgctgtcgcgctagttgcaagttgcaattaaacgtttggaacagtttgtcatgttatttgtgtggcttctatatggctatatgtttgctggaactgtatggaccaaccctcagtgctacctacaaaagtttatgatttgactg

SEQ ID NO: 18305 - protein, 87 aa, Zea mays subsp. mays
  peptide (1)..(87): Ceres Seq. ID no. 12358482
HVHNLRTVYSGVSDSTAFATPFPFPGKQQLSGMHAQGATNEKTWQDFRLFEPSKQNMLQNYHQRNQQNGQIAEQEPENSVWSSSYHV

SEQ ID NO: 18306 - protein, 55 aa, Zea mays subsp. mays
  peptide (1)..(55): Ceres Seq. ID no. 12358483
MHAQGATNEKTWQDFRLFEPSKQNMLQNYHQRNQQNGQIAEQEPENSVWSSSYHV

SEQ ID NO: 18307 - protein, 53 aa, Zea mays subsp. mays
  peptide (1)..(53): Ceres Seq. ID no. 12358484
MGMNYTRSSTLTQRVNETNSNPLIIGAPHGPYDSSLVGHVATRMVSVGGCCRN

SEQ ID NO: 18308 - DNA, 2125 bp, Zea mays subsp. mays; identical to SEQ ID NO: 17397
  misc_feature (1)..(2125): Ceres Seq. ID no. 12366165
  misc_feature (1)..(2125): Ortholog of  Ceres SEQ ID NO 15176403 as cited in SEQ ID NO 52988

SEQ ID NO: 18309 - protein, 547 aa, Zea mays subsp. mays; identical to SEQ ID NO: 17398
  peptide (1)..(547): Ceres Seq. ID no. 12366166

SEQ ID NO: 18310 - protein, 502 aa, Zea mays subsp. mays; identical to SEQ ID NO: 17399
  peptide (1)..(502): Ceres Seq. ID no. 12366167

SEQ ID NO: 18311 - protein, 470 aa, Zea mays subsp. mays; identical to SEQ ID NO: 17400
  peptide (1)..(470): Ceres Seq. ID no. 12366168

SEQ ID NO: 18312 - DNA, 979 bp, Zea mays subsp. mays
  misc_feature (1)..(979): Ceres Seq. ID no. 12443269
  misc_feature (1)..(979): Ortholog of  Ceres SEQ ID NO 13582893 as cited in SEQ ID NO 62081
agaatctcgtctgtatcccacccctcttttttgaccctgagctcctagaagccatccccaaatcgccctacgcccacggttccacctcctcgtccacgaggtgaggaaaccctagcgaccgaccatggcgttgctcccgcgcaccgcgcggctggccctcctttccaccccgcgggcgtactccgctgccgctgctgcgggcgcctccccgacgtccccagcgccatacgggggcgcccccccaccggcgatgtcgaagacggccgagttcgtggtctctaaggtggacgacctgatgaactgggcgcgtaagggctcgatctggcccatgaccttcgggctcgcctgctgcgcggtggagatgatgcacgccggcgcgtcccgctacgacttcgaccggttcggcgtcatcttccgtccgtcgccgcgccagtccgattgcatgatcgtcgccggcacgctcaccaacaagatggctccggccctccgcaaggtttatgaccaaatgcctgagcctaggtgggttatttcaatgggcagctgtgccaacggtggtggatactaccattactcctactctgttgtacgtggatgtgaccgtatagtccctgtggacatctacgtccctgggtgcccaccaactgctgaggcactgctgtacggcgttcttcagctccaaaagaagatcaacaggcgtaaggatttccttcactggtggaccaagtgaagcatgctcctgctatttctcggtcgctatgttttctttgcatttgacctgcttgtcacatctgaaataaggacacactttgctcggatttgcaagttctctctttttttttcttggtgtgtctggaaggatgtatgtccaggttgtttgatgaaacatataactcgtgtaccagcagacttgctgtgaatctattttcgagcttctagtcttccactgtaatacagcaaatacaccatctccttgtctgcc

SEQ ID NO: 18313 - protein, 200 aa, Zea mays subsp. mays
  peptide (1)..(200): Ceres Seq. ID no. 12443270
MALLPRTARLALLSTPRAYSAAAAAGASPTSPAPYGGAPPPAMSKTAEFVVSKVDDLMNWARKGSIWPMTFGLACCAVEMMHAGASRYDFDRFGVIFRPSPRQSDCMIVAGTLTNKMAPALRKVYDQMPEPRWVISMGSCANGGGYYHYSYSVVRGCDRIVPVDIYVPGCPPTAEALLYGVLQLQKKINRRKDFLHWWTK

SEQ ID NO: 18314 - protein, 158 aa, Zea mays subsp. mays; identical to SEQ ID NO: 2807
  peptide (1)..(158): Ceres Seq. ID no. 12443271

SEQ ID NO: 18315 - protein, 143 aa, Zea mays subsp. mays; identical to SEQ ID NO: 2808
  peptide (1)..(143): Ceres Seq. ID no. 12443272

SEQ ID NO: 18316 - DNA, 2197 bp, Zea mays subsp. mays
  misc_feature (1)..(2197): Ceres Seq. ID no. 12424079
  misc_feature (1)..(2197): Ortholog of  Ceres SEQ ID NO 13657138 as cited in SEQ ID NO 65923
  misc_feature (1)..(2197): Ortholog of  Ceres SEQ ID NO 13584744 as cited in SEQ ID NO 69137
gttgggtgccgtgcgagctccaagtacccctgtctccctcccgtcttgcgggcttgcctttgcctgttccatttccggctcctccagttggtagtgtcgtttcaatgcgagacgccgtccttcacgagcttgattgcccttgaaagcgaagttggtgttggtgtcgttgccggtgaggaggaagaggggatatatggctcccacggaagaggcagcaggggaggacgagcggctgctgaaggatcttctcgcttcttcgtcagataaggaaggagaggatgaagagagtacaaagacacagtccgatgaatctactaggggggattgtgataacggcgggtccgtagccgccttatcgagtgaagatgtcaatgataggcatggtagtgacagcaacagccaatgtgctgaatctgatggtgcttgcagtcaagtgcctggaacaggctccaagagcagcaacgatgagtgcggtgctgaagtgcctcaaaccggatccaagagcagtaatgatgaagatgacgggtgtgctgatgaaatgccaggagccctctccaagagcagtagcaatgacagcagtgagtgcgctgaccggagctctccgcgagctgtcctagatatctcagtatctggcagcatggactcggatgacagtgtttcagtcgagcagtcagcagaatcaaaccaaaatgtgcagtggaggaacctgatcagcagtctaatactcagaagaaagaagtccatgggcagcgcagtgacgttccctcagagacccaagagcaaagggcttagagggtacttggagaggatgaggagtggtaagaaccaaatggactgcagcgccattgctcctgagatcctccctcagatcgggaaatggaggccatcatggcggagctttgactacaatgagctttgtgctgcaactgacagttttggttcagagaaaatgattgggaagggagggcatgcagaggtatacaaaggacagcttgctgatggacaatttgtggcagtgaagagattaacaaaaggcggtaacaaagaggacagagttagcgatttcttatctgagcttggaataatagcccatgttaaccacccaaacgcagcacagctcctggggtttagcgtggaagggggtctgcacttggttcttcagttctcacctcatggaagccttgcttctgttctacatggtacaaaggagcccctgaagtggaaagtcaggttcaaaattgcacttggaattgctgaagggctgctttatctacatgaaggctgccatcgccgcataattcacagagacatcaaggcatctaatatccttctaactgaagactaccaacctcagatatcagattttgggcttgcaaagtggctccctgacaaattgacccatcatgttgtgtatcccattgaaggcacattcgggtatatggccccagaatacttcatgcatgggatcataaatgagaagaccgatgtgttcgcatatggagttctacttcttgaactagttaccgggcggaaagcggtggactcatccagacagagcctagtgatatgggcaaaaccgctgcttgatgcgaacaacatccaagagctggtggatccttcccttggtaacgagtatgaccctgaagagatggtgtacacactagcagtggcatccttgtgcatccaccacagctcaacctcgaggcctagtatgaaatcggtagtctgtttcttgaagggtgaccgggagtcacttgagctggtgagaaggcctaaaatcgtgaagcccctgatgtttgactcgggcgattcagaagattacacgcgctcgagctacctcagcgatctcaaccggcacaagcagctcgcgctggagcagtgaacatcgaattgagtttgaacagattcactgtaattttgtacatcatttacgctgtacccatgcacactgtgatcctcccacctttccacataggttttaaaaattgtatggattgatgtgggggggtcagctatcattcactacatggttgctgatctatgctgtaactttgcccagagtttcagcgcatgttacggccctgcgatcatctgtatcatccggactgtccgattgtaatgtcaggtgatgcagccactagcgaccagtctgctatactgttcgtgaaatggtgattgttagcatggttgtgtcctg

SEQ ID NO: 18317 - protein, 562 aa, Zea mays subsp. mays
  peptide (1)..(562): Ceres Seq. ID no. 12424080
MAPTEEAAGEDERLLKDLLASSSDKEGEDEESTKTQSDESTRGDCDNGGSVAALSSEDVNDRHGSDSNSQCAESDGACSQVPGTGSKSSNDECGAEVPQTGSKSSNDEDDGCADEMPGALSKSSSNDSSECADRSSPRAVLDISVSGSMDSDDSVSVEQSAESNQNVQWRNLISSLILRRKKSMGSAVTFPQRPKSKGLRGYLERMRSGKNQMDCSAIAPEILPQIGKWRPSWRSFDYNELCAATDSFGSEKMIGKGGHAEVYKGQLADGQFVAVKRLTKGGNKEDRVSDFLSELGIIAHVNHPNAAQLLGFSVEGGLHLVLQFSPHGSLASVLHGTKEPLKWKVRFKIALGIAEGLLYLHEGCHRRIIHRDIKASNILLTEDYQPQISDFGLAKWLPDKLTHHVVYPIEGTFGYMAPEYFMHGIINEKTDVFAYGVLLLELVTGRKAVDSSRQSLVIWAKPLLDANNIQELVDPSLGNEYDPEEMVYTLAVASLCIHHSSTSRPSMKSVVCFLKGDRESLELVRRPKIVKPLMFDSGDSEDYTRSSYLSDLNRHKQLALEQ

SEQ ID NO: 18318 - protein, 447 aa, Zea mays subsp. mays
  peptide (1)..(447): Ceres Seq. ID no. 12424081
MPGALSKSSSNDSSECADRSSPRAVLDISVSGSMDSDDSVSVEQSAESNQNVQWRNLISSLILRRKKSMGSAVTFPQRPKSKGLRGYLERMRSGKNQMDCSAIAPEILPQIGKWRPSWRSFDYNELCAATDSFGSEKMIGKGGHAEVYKGQLADGQFVAVKRLTKGGNKEDRVSDFLSELGIIAHVNHPNAAQLLGFSVEGGLHLVLQFSPHGSLASVLHGTKEPLKWKVRFKIALGIAEGLLYLHEGCHRRIIHRDIKASNILLTEDYQPQISDFGLAKWLPDKLTHHVVYPIEGTFGYMAPEYFMHGIINEKTDVFAYGVLLLELVTGRKAVDSSRQSLVIWAKPLLDANNIQELVDPSLGNEYDPEEMVYTLAVASLCIHHSSTSRPSMKSVVCFLKGDRESLELVRRPKIVKPLMFDSGDSEDYTRSSYLSDLNRHKQLALEQ

SEQ ID NO: 18319 - protein, 414 aa, Zea mays subsp. mays
  peptide (1)..(414): Ceres Seq. ID no. 12424082
MDSDDSVSVEQSAESNQNVQWRNLISSLILRRKKSMGSAVTFPQRPKSKGLRGYLERMRSGKNQMDCSAIAPEILPQIGKWRPSWRSFDYNELCAATDSFGSEKMIGKGGHAEVYKGQLADGQFVAVKRLTKGGNKEDRVSDFLSELGIIAHVNHPNAAQLLGFSVEGGLHLVLQFSPHGSLASVLHGTKEPLKWKVRFKIALGIAEGLLYLHEGCHRRIIHRDIKASNILLTEDYQPQISDFGLAKWLPDKLTHHVVYPIEGTFGYMAPEYFMHGIINEKTDVFAYGVLLLELVTGRKAVDSSRQSLVIWAKPLLDANNIQELVDPSLGNEYDPEEMVYTLAVASLCIHHSSTSRPSMKSVVCFLKGDRESLELVRRPKIVKPLMFDSGDSEDYTRSSYLSDLNRHKQLALEQ

SEQ ID NO: 18320 - DNA, 988 bp, Zea mays subsp. mays
  misc_feature (1)..(988): Ceres Seq. ID no. 12360539
  misc_feature (1)..(988): Ortholog of  Ceres SEQ ID NO 15176051 as cited in SEQ ID NO 53434
  misc_feature (1)..(988): Ortholog of  Ceres SEQ ID NO 12465091 as cited in SEQ ID NO 65947
gcacgagaccattacctagaacatcctaatcgaaaacaaggactacccttacgccgtggacgggctggtcatctggtgggcgatcgagcggtgggtcaaggagtacctggacgtctactaccccaacgacggcgagctccagcgcgacgtggagctgcaggcgtggtggaaggaggtgcgcgaggaggcgcacggcgacctcaaggaccgagactggtggcccaggatggacgccgtccagcggctggccagggcgtgcacgaccgtcatctgggtagcgtccgcgctgcacgcggccgtcaacttcgggcagtacccgtacgccgggtacctgccgaaccggccgaccgtgagccggcggccgatgccggagccgggcagcgacgactacaagaagctggaggcggggcagaaggaggcggacgcggtgttcatccgcaccatcaccagccagttccagaccatcctgggcatctcgctcatcgagatcctctccaagcactcctccgacgaggtgtacctcggccagcgcgacgagcctgagcgctggacgtcggacgccagggcgctggacgcgttcagaaggttcggaagccggctggtggagatcgagaagcggatcaggacgatgaacgacagcccgacgttgaagaaccggaaggggccggtggagatgccgtacatgctgctgtaccccaacacgtcggatgtcaccggcgagaagggcgaggggctcactgccatgggcattcccaacagcatctccatatgagcctcctcactgcctgagcggatggtttgtagatgttctgttacgctgtgtgtaatgtgtcgtttattcgttggttttgtcagtctcagggtagggaatggagatgttgattggatccatgatctgtagggttgagagaggagtcacgtctggagaatgttgtcaatgtgtgtttctttcttgttaagaataaaagttcgtcagctcatttatctc

SEQ ID NO: 18321 - protein, 181 aa, Zea mays subsp. mays
  peptide (1)..(181): Ceres Seq. ID no. 12360540
MDAVQRLARACTTVIWVASALHAAVNFGQYPYAGYLPNRPTVSRRPMPEPGSDDYKKLEAGQKEADAVFIRTITSQFQTILGISLIEILSKHSSDEVYLGQRDEPERWTSDARALDAFRRFGSRLVEIEKRIRTMNDSPTLKNRKGPVEMPYMLLYPNTSDVTGEKGEGLTAMGIPNSISI

SEQ ID NO: 18322 - protein, 180 aa, Zea mays subsp. mays
  peptide (1)..(180): Ceres Seq. ID no. 12360541
ARDHYLEHPNRKQGLPLRRGRAGHLVGDRAVGQGVPGRLLPQRRRAPARRGAAGVVEGGARGGARRPQGPRLVAQDGRRPAAGQGVHDRHLGSVRAARGRQLRAVPVRRVPAEPADREPAADAGAGQRRLQEAGGGAEGGGRGVHPHHHQPVPDHPGHLAHRDPLQALLRRGVPRPARRA

SEQ ID NO: 18323 - protein, 135 aa, Zea mays subsp. mays
  peptide (1)..(135): Ceres Seq. ID no. 12360542
MPEPGSDDYKKLEAGQKEADAVFIRTITSQFQTILGISLIEILSKHSSDEVYLGQRDEPERWTSDARALDAFRRFGSRLVEIEKRIRTMNDSPTLKNRKGPVEMPYMLLYPNTSDVTGEKGEGLTAMGIPNSISI

SEQ ID NO: 18324 - DNA, 1362 bp, Zea mays subsp. mays
  misc_feature (1)..(1362): Ceres Seq. ID no. 13493020
  misc_feature (1)..(1362): Ortholog of  Ceres SEQ ID NO 14304034 as cited in SEQ ID NO 53878
  misc_feature (1)..(1362): Ortholog of  Ceres SEQ ID NO 15171520 as cited in SEQ ID NO 60477
agttcaccgtccctccctgtccttgccatggccatccccaccgcccccgccctcctcttcccctccgttctccctaactcattcccccgccggacaccctggcgacacctcgtccggcggcaaccgcgtcacctccgcgcgggccgcccgcgcctgcaggcgccggcgccggctcctcccccggtggcggaggtcgcggcggagcgggacgacacgcctccgctcaggctgctcgagccgccgcaggaggacgaccccttcccgcccgagatggagcccgcggaccctgatttctaccggataggatatgcgcggatgatgcgcgcctatgggatcgagttcctcgaaggccccgacgggatgggcgtctacgcttcccgggacgtggagccacttcgcagagctagagtgattatggagattccgttggagctgatgctgactataactcaaaagaaaccttggatgtttttccctgacattattccactaggccatcctatatttgatgttatcgagtcaacagatccagagacagattgggatctaagattagcatgtcttcttctatatgcatttgatatagaagacaacttttggcagttatattctgattttttgccaagtgttgatgaatgcactagtttgctgctggcaccaaaggaagatctaatggaactagaagatgaagatcttgcttcacaaatgttaaaacaccaggaacgagcaattgacttttggcaaaagcattgggacaaaccaattcctctaaagctgaaacgccttgcacgtgaccatgagagatttctctgggcactgagtatagtacagtctcgttctgtcaacttgaagttgagaatgggagccttcatccaagatgcaaatgtgctagctccttatgctgatatgttgaaccactcacccaatgctaattgcttcctgcattggcgttttaaagaccgtatgcttgaagttatgattaaggctggacaagctatcaagaaaggagacgagatgacgatagattatatgagtggcgtcaacagcaaatttatggaaagatatgggttctcatcaccaacgaatccttgggagctcataaatttctcgagtcctgcaacaattcacatggattccttcttatcggtcttcaatatcgctggcttgcatgatgagctgtaccacaattctgcattgacctcagtagtagaaaccgactttgtggacggagcagtcgtagcagcagccagagcattgccgacatggtcagatggtgatgttcctgcaattcctagtgtggagagaaaatctgctcaggcactgcaagaggagtgccgccaaatgttggattcattcccaact

SEQ ID NO: 18325 - protein, 454 aa, Zea mays subsp. mays
  peptide (1)..(454): Ceres Seq. ID no. 13493021
SSPSLPVLAMAIPTAPALLFPSVLPNSFPRRTPWRHLVRRQPRHLRAGRPRLQAPAPAPPPVAEVAAERDDTPPLRLLEPPQEDDPFPPEMEPADPDFYRIGYARMMRAYGIEFLEGPDGMGVYASRDVEPLRRARVIMEIPLELMLTITQKKPWMFFPDIIPLGHPIFDVIESTDPETDWDLRLACLLLYAFDIEDNFWQLYSDFLPSVDECTSLLLAPKEDLMELEDEDLASQMLKHQERAIDFWQKHWDKPIPLKLKRLARDHERFLWALSIVQSRSVNLKLRMGAFIQDANVLAPYADMLNHSPNANCFLHWRFKDRMLEVMIKAGQAIKKGDEMTIDYMSGVNSKFMERYGFSSPTNPWELINFSSPATIHMDSFLSVFNIAGLHDELYHNSALTSVVETDFVDGAVVAAARALPTWSDGDVPAIPSVERKSAQALQEECRQMLDSFPT

SEQ ID NO: 18326 - protein, 445 aa, Zea mays subsp. mays
  peptide (1)..(445): Ceres Seq. ID no. 13493022
MAIPTAPALLFPSVLPNSFPRRTPWRHLVRRQPRHLRAGRPRLQAPAPAPPPVAEVAAERDDTPPLRLLEPPQEDDPFPPEMEPADPDFYRIGYARMMRAYGIEFLEGPDGMGVYASRDVEPLRRARVIMEIPLELMLTITQKKPWMFFPDIIPLGHPIFDVIESTDPETDWDLRLACLLLYAFDIEDNFWQLYSDFLPSVDECTSLLLAPKEDLMELEDEDLASQMLKHQERAIDFWQKHWDKPIPLKLKRLARDHERFLWALSIVQSRSVNLKLRMGAFIQDANVLAPYADMLNHSPNANCFLHWRFKDRMLEVMIKAGQAIKKGDEMTIDYMSGVNSKFMERYGFSSPTNPWELINFSSPATIHMDSFLSVFNIAGLHDELYHNSALTSVVETDFVDGAVVAAARALPTWSDGDVPAIPSVERKSAQALQEECRQMLDSFPT

SEQ ID NO: 18327 - protein, 364 aa, Zea mays subsp. mays
  peptide (1)..(364): Ceres Seq. ID no. 13493023
MEPADPDFYRIGYARMMRAYGIEFLEGPDGMGVYASRDVEPLRRARVIMEIPLELMLTITQKKPWMFFPDIIPLGHPIFDVIESTDPETDWDLRLACLLLYAFDIEDNFWQLYSDFLPSVDECTSLLLAPKEDLMELEDEDLASQMLKHQERAIDFWQKHWDKPIPLKLKRLARDHERFLWALSIVQSRSVNLKLRMGAFIQDANVLAPYADMLNHSPNANCFLHWRFKDRMLEVMIKAGQAIKKGDEMTIDYMSGVNSKFMERYGFSSPTNPWELINFSSPATIHMDSFLSVFNIAGLHDELYHNSALTSVVETDFVDGAVVAAARALPTWSDGDVPAIPSVERKSAQALQEECRQMLDSFPT

SEQ ID NO: 18328 - DNA, 1936 bp, Zea mays subsp. mays
  misc_feature (1)..(1936): Ceres Seq. ID no. 12435348
  misc_feature (1)..(1936): Ortholog of  Ceres SEQ ID NO 14313491 as cited in SEQ ID NO 0
gcacgagaccattacctagaacatcctaatcgaaaaagggaaagcattctccaatatccacctcctcctcgcccccctctctctctctaaaagaactgaaaagataagggggaaatcctcaagtgctcgttacataaaccctaacctcgttggattcgcagcaaaagcccaccaattggaagccctccgatgttccagctgcatgctggagctgagccgtgctcggtttgacgaaattttgcatcccttctgtgcttggaccacccgattgaggctgtttctccgagggggcgtgccagcggtttcgcggcccaggtcctcacctgtgctatccggcgccggatccgggtttgttccggtgagaggtcgggcttttggtggggtctgtacagcttggagctcaatttgccggcctgagttggagtcgcgactgcggtggcggtgattgaggtagtcgcgtcgatttggcacgcgtttcctgccatttgggtgagccagcctttcctggcaatcttggcgggcgtttcgtcttgctgcgtggcagaaaggtgtgacctttgtgccgtgcgatgcatcccaaggcacgaatccacgccgacccagtgcgcgaggtcgaccactttgactgcctgccggattcgctcgtcctgctgatcctgaacaaggtcgaggacgtgcgatcgctcggccggtgctacgccgtgtccaagcggctttgtgggcttgtcccccttgtccatgatgtgtatgtcaagattgaccgcgtcgtggcggtcgacggcgacgctgaggacgcgctcaacctgtcatcgccgaagcctcggaacatcttctcgcacttcctgaagctgatgctcttcaccatcatcaagcctttccacaacatgcgcaaccctaatggtactgggaggtcattgttcccgcagctctcgcaccactcgccagcgcaggtgctcaggaacttcacgcacatcaggaatcttcggatcgagctcccctctggggatgtgggtactgaggagggagttctcctgaaatggcgggcagagtatgggagcacacttcagagttgtgtgatcctggggggtacccgggttgaccgcaagcctgttggtggagagcatgagcagtctttggaggataatggaagcatgccagagtctttctataccaacggtgggctgaaacttcgtgtcgtctggacaatcagctctctaattgcggcatcaacgaggcactatcttctccgctcaatcatcaatgaccatcccacacttctgagcttggtactgacagatgccgatggccaaggcacattgtgcatgggggcagagcagctgaaggaattcagagagaaccagttgtcggcatcagcatgttccaacaggactcaggtcccagcctgcaacatgaagctcaagtatgctccatatcttgaactgcctggtggtatggcgttgcaaggcgccactttggtggctatcaaaccctcacctgacggaagcaatggaagccaccctaaccgtaaagaagctgacgcatttgtctttggagcatttgatgggccatttaaggctgctgtgaaggctttgatgaagaggcgcacttaccttctggagatgaatggcttctagaaatcttgtgttcgcggtggtatcgagcttgttggtgctatgcatggcacatttagctaagcttttcacctgtgtaatatccaagaaggcaccatctctagttgctgcttttagtctgctgttttagctctttgtacagtgttaacatttggttatataaaaatcgtatcaagttctctagtgtaatagtgaatctctccatagttcaccatcctggcccctggtgtaatatccaagaaatcatatcaggtacataacattcattttgggattgtgaattgaaagagactgatctgatgccg

SEQ ID NO: 18329 - protein, 354 aa, Zea mays subsp. mays
  peptide (1)..(354): Ceres Seq. ID no. 12435349
MHPKARIHADPVREVDHFDCLPDSLVLLILNKVEDVRSLGRCYAVSKRLCGLVPLVHDVYVKIDRVVAVDGDAEDALNLSSPKPRNIFSHFLKLMLFTIIKPFHNMRNPNGTGRSLFPQLSHHSPAQVLRNFTHIRNLRIELPSGDVGTEEGVLLKWRAEYGSTLQSCVILGGTRVDRKPVGGEHEQSLEDNGSMPESFYTNGGLKLRVVWTISSLIAASTRHYLLRSIINDHPTLLSLVLTDADGQGTLCMGAEQLKEFRENQLSASACSNRTQVPACNMKLKYAPYLELPGGMALQGATLVAIKPSPDGSNGSHPNRKEADAFVFGAFDGPFKAAVKALMKRRTYLLEMNGF

SEQ ID NO: 18330 - protein, 260 aa, Zea mays subsp. mays
  peptide (1)..(260): Ceres Seq. ID no. 12435350
MLFTIIKPFHNMRNPNGTGRSLFPQLSHHSPAQVLRNFTHIRNLRIELPSGDVGTEEGVLLKWRAEYGSTLQSCVILGGTRVDRKPVGGEHEQSLEDNGSMPESFYTNGGLKLRVVWTISSLIAASTRHYLLRSIINDHPTLLSLVLTDADGQGTLCMGAEQLKEFRENQLSASACSNRTQVPACNMKLKYAPYLELPGGMALQGATLVAIKPSPDGSNGSHPNRKEADAFVFGAFDGPFKAAVKALMKRRTYLLEMNGF

SEQ ID NO: 18331 - protein, 249 aa, Zea mays subsp. mays
  peptide (1)..(249): Ceres Seq. ID no. 12435351
MRNPNGTGRSLFPQLSHHSPAQVLRNFTHIRNLRIELPSGDVGTEEGVLLKWRAEYGSTLQSCVILGGTRVDRKPVGGEHEQSLEDNGSMPESFYTNGGLKLRVVWTISSLIAASTRHYLLRSIINDHPTLLSLVLTDADGQGTLCMGAEQLKEFRENQLSASACSNRTQVPACNMKLKYAPYLELPGGMALQGATLVAIKPSPDGSNGSHPNRKEADAFVFGAFDGPFKAAVKALMKRRTYLLEMNGF

SEQ ID NO: 18332 - DNA, 2245 bp, Zea mays subsp. mays
  misc_feature (1)..(2245): Ceres Seq. ID no. 12375229
  misc_feature (1)..(2245): Ortholog of  Ceres SEQ ID NO 14313167 as cited in SEQ ID NO 54354
gcacgagaccattacctagaacatcctaatcgaaaaaaaaccgaagcctccccggttatcccccggcctccacctgaccactaccaccacccgggacgtcttccatggcctcctcatagaataagctctatctcaccgcaacaactcctcattacaatccttcaagagagcagcactacactacactacattagagagaggtcgagcgcccctcctccgatccgccggcccgccgagagctagctgctgatcggtcgaggagagtcatggcgacgtcgacgatgcgcgttgccgccggcgtgctgctggtcgtgtcggcgctggcgaccttggcccgggccgaggacccctacctgttcttcgagtggaaggtgacgtacgggaccaggtccctgctgggagtgccccagaaggtcatcctcatcaacggcgagttccctggccccaggatcaactgctcctccaacaacaacatcgtcgtcaacgtcttcaaccagctcgaccatccgctccttttcacctggaacgggatgcagcacaggaagaactcgtggatggacgggatgccaggcacgcagtgccccatcgcgcccaacaccaacttcacgtacaagtggcagcccaaggaccagatcggcagcttcttctacttcccgtccatcggcatgcagcgggcggcgggcgggtacggcgccatcagcgtggtgagccgcctcctcatcccggtccccttcgaccagccgccgccggagagcgaccacgcggtgctcatcggcgactggtacaccaaggaccacgaggtgctggcgcgccagctcgacgccggcaagagcgtgggccgccccgcgggcgtgctcatcaacggcaagggaggcaaggacctggaggccgccgcgcccatgctcaccttcgaggcgggcaagacgtaccgtctccgcgtgtgcaacaccgggatcaaggcgtcgctcaacttccgcatccagggccactacatgaagctcgtggagctggagggctcccacaccctgcaggacgtgtacgactcgctggacgtgcacgtcggcccactgcctctccgtgctggtcgacgccgaccaggcgcccggcgactactacatggtggcctccacgcggttcatccacgacgccaagtccgcctccgccgtcatccgctacgccggctccagcggcgccccgccggcgcccaacatgaccgagccaccggccggctgggcctggtccatcaaccaggccaggtcgttccgctggaacctgacggccagcgccgcgcgccccaacccgcagggctcctaccactacggccagatcaacatcacccgcaccatcaaggtcatggtctcccgcggccacatcgacggcaagctccgctacggcttcaacggcatctcccacagggataccgagacccccctcaagctcgccgagtacttcaacgtcaccgacggggtgttcagctacaaccagatgggcgacgtgccacccgctgttaacgggccactccatgtcatccccaacgtcatcaccgccgagttccggaccttcatcgagatcgtcttcgagaaccccgagaagagcatagactccctccacctcgacggctacgccttcttcggcgtcgggatggggcccgggacgtggtcgccggagatgaggaagacgtacaacctactggacacggtgagccggcacacgatccaggtgtacccgcggtcatggacggcgatcatgctgacattcgacaacgcgggcatgtggagcgtccggtccaacgtctgggagcggtactacctcggggagcagttctacatcagcgtcatctcgccggcgcggtcgctgcgcgacgagtacaacatgcccgacaacgccctccgctgcggcaaggtcgtggggctgccgctgccgccatcctacgcccccgcgcgctaaagacgacgaaggcgccgttttcacctcgtgttctgaccatccagtctaactaacccattcctgtgctgctcggcgaaataaaatcatcaaaaagaacaaagacgaaggaagcctagggaagggagaaggacgttgggtgggggtgagccaaatgagaacgcacggatatatctattcatgtaatcttgagatgccctctcaaatcactgtaatggggtttaaaaaacaatcattgtaatgggagttatatatacttttatcttaacatttatttacaccagcaagtcctggtgtatgc

SEQ ID NO: 18333 - protein, 414 aa, Zea mays subsp. mays
  peptide (1)..(414): Ceres Seq. ID no. 12375230
MATSTMRVAAGVLLVVSALATLARAEDPYLFFEWKVTYGTRSLLGVPQKVILINGEFPGPRINCSSNNNIVVNVFNQLDHPLLFTWNGMQHRKNSWMDGMPGTQCPIAPNTNFTYKWQPKDQIGSFFYFPSIGMQRAAGGYGAISVVSRLLIPVPFDQPPPESDHAVLIGDWYTKDHEVLARQLDAGKSVGRPAGVLINGKGGKDLEAAAPMLTFEAGKTYRLRVCNTGIKASLNFRIQGHYMKLVELEGSHTLQDVYDSLDVHVGPLPLRAGRRRPGARRLLHGGLHAVHPRRQVRLRRHPLRRLQRRPAGAQHDRATGRLGLVHQPGQVVPLEPDGQRRAPQPAGLLPLRPDQHHPHHQGHGLPRPHRRQAPLRLQRHLPQGYRDPPQARRVLQRHRRGVQLQPDGRRATRC

SEQ ID NO: 18334 - protein, 409 aa, Zea mays subsp. mays
  peptide (1)..(409): Ceres Seq. ID no. 12375231
MRVAAGVLLVVSALATLARAEDPYLFFEWKVTYGTRSLLGVPQKVILINGEFPGPRINCSSNNNIVVNVFNQLDHPLLFTWNGMQHRKNSWMDGMPGTQCPIAPNTNFTYKWQPKDQIGSFFYFPSIGMQRAAGGYGAISVVSRLLIPVPFDQPPPESDHAVLIGDWYTKDHEVLARQLDAGKSVGRPAGVLINGKGGKDLEAAAPMLTFEAGKTYRLRVCNTGIKASLNFRIQGHYMKLVELEGSHTLQDVYDSLDVHVGPLPLRAGRRRPGARRLLHGGLHAVHPRRQVRLRRHPLRRLQRRPAGAQHDRATGRLGLVHQPGQVVPLEPDGQRRAPQPAGLLPLRPDQHHPHHQGHGLPRPHRRQAPLRLQRHLPQGYRDPPQARRVLQRHRRGVQLQPDGRRATRC

SEQ ID NO: 18335 - protein, 326 aa, Zea mays subsp. mays
  peptide (1)..(326): Ceres Seq. ID no. 12375232
MQHRKNSWMDGMPGTQCPIAPNTNFTYKWQPKDQIGSFFYFPSIGMQRAAGGYGAISVVSRLLIPVPFDQPPPESDHAVLIGDWYTKDHEVLARQLDAGKSVGRPAGVLINGKGGKDLEAAAPMLTFEAGKTYRLRVCNTGIKASLNFRIQGHYMKLVELEGSHTLQDVYDSLDVHVGPLPLRAGRRRPGARRLLHGGLHAVHPRRQVRLRRHPLRRLQRRPAGAQHDRATGRLGLVHQPGQVVPLEPDGQRRAPQPAGLLPLRPDQHHPHHQGHGLPRPHRRQAPLRLQRHLPQGYRDPPQARRVLQRHRRGVQLQPDGRRATRC

SEQ ID NO: 18336 - DNA, 2279 bp, Zea mays subsp. mays
  misc_feature (1)..(2279): Ceres Seq. ID no. 12450444
  misc_feature (1)..(2279): Ortholog of  Ceres SEQ ID NO 15176963 as cited in SEQ ID NO 52894
ctcccgccccgcggctcgtctccctctcacggcctcacctcacaacctcacggtcctcacctcactccaccacgttcgccgcctcgctgccgcgtcgggccagtgcgtgcgggcgggcgtgagtgactggctctcctcggcgcgcggacccaggggcggcggcgatggggaagaatatgcgcatcaagacggcgcccaaggcgaaccgtgtccccctcctcggcgacggggagacgtcaagggcgctctcggacctggaagagggcagcgacgtccagccagcgaacgtcggcttctgtcgggtcatcaaacttgcgaagcatgacgccggaaagctggtcctcgccaccgcggcgctgctcgtcgcctccctcagtaaccttctcgttcccaaatatggtggcaagataattgacattgtgtcaagagatgttcggcgcccagaagataaggcgcaagccctggaggatgtcaagggcacaattttgtacattgtgacaatcgtcttagtcggttcagtttgcacggctcttcgggcatggctattcaattctgctagtgagagagtagtcgctcgactaaggaaagacttgttcagccatctcataaaccaggaaatagcgttttttgatgtgactagaacaggagagctcttaagcaggctttctgaagatacacaaataataaagaatgctgctacaaccaacctatcagaggcactgcgcaatgtaactactacagctattggtcttggtttcatgttttcaacttcatggaagttaacattgctggcacttgtaattgtcccggttatatcagttgctgtgcgtagatttggacgttttcttcgtgagctttcacatcaaacacaagctgctgcagctgtagcttcatccatagctgaggaatctttcggtgccatccgcacagtaagatcctttgctcaggaatatcatgagatttcacgctatggtgaaaaagtagaggagacacttaaacttggtctcaaacaagctaaagttgttggcttgttttctggagggcttaatgctgcatcaaccatgtctgtggttattgttgttatttatggcgccaacttaaccatcaatggttacatgacaactggctctcttacatcattcatcttatacagccttacagttggttcgtcagtatctgccttgtcaggactatacacaactgtaatgaaagcctctggtgcaagccgtagggtttttcaacttttggaccgtgtttcgtcaatgacaaactctggggacaaatgtccaataaatgaaaaggatggggaagttgagcttgatgatgtctggtttgcatatccttctcgcccatctcatatgattcttaagggaataactctgaagctagcaccaggttcaaaggttgcacttgttgggccaagtggtggtggtaaaaccacaatagcaaatttgattgagcggttttatgaccctctaaagggaaggatcttgcttaatggagtaccgctggcagaaatttcacatcaatatcttcacagcaaggtaagcattgtcagccaggagcctacgctcttcaactgcaccatcgaagagaatattgcttatggactagagggcacaacgaactttgctgacgttgagagtgcagctgaaatggcgaatgcacacaacttcatatgcggctttcccgaccaatataagactgtcgtcggcgagcgggggatcaggttatccggcgggcagaagcagaggatcgccattgcgagagctttgcttatgaacccacgagtgcttctcctggacgaagctaccagtgccctggatgctgaaagcgaatatcttgtacaggatgcaatggactccttgatgaaagggaggactgtccttgtgatagcccacaggctctcgaccgtcaagagcgccgacaccgtcgccgtcatctccgacggcctaatcgtggagagcggcacgcacgacgaactcctggaccgcgacggcatatacacggccttggtgaagaggcagctgcaggggccgaagtttgaggccaccagcagcatcagcgaggcctccgaaattgaagcggaacccagcagtaatgggcaatagcggccccgattattaggaagaccacagttgatttgaatccacacaagtgtatgtaaccctgatgttgacgtatgccactgcaaatcacgcgaaaccattggatatcacatgatgctacggttgttgtacgagtaatttcccacttggttaatcctacacatatggtcc

SEQ ID NO: 18337 - protein, 648 aa, Zea mays subsp. mays
  peptide (1)..(648): Ceres Seq. ID no. 12450445
MGKNMRIKTAPKANRVPLLGDGETSRALSDLEEGSDVQPANVGFCRVIKLAKHDAGKLVLATAALLVASLSNLLVPKYGGKIIDIVSRDVRRPEDKAQALEDVKGTILYIVTIVLVGSVCTALRAWLFNSASERVVARLRKDLFSHLINQEIAFFDVTRTGELLSRLSEDTQIIKNAATTNLSEALRNVTTTAIGLGFMFSTSWKLTLLALVIVPVISVAVRRFGRFLRELSHQTQAAAAVASSIAEESFGAIRTVRSFAQEYHEISRYGEKVEETLKLGLKQAKVVGLFSGGLNAASTMSVVIVVIYGANLTINGYMTTGSLTSFILYSLTVGSSVSALSGLYTTVMKASGASRRVFQLLDRVSSMTNSGDKCPINEKDGEVELDDVWFAYPSRPSHMILKGITLKLAPGSKVALVGPSGGGKTTIANLIERFYDPLKGRILLNGVPLAEISHQYLHSKVSIVSQEPTLFNCTIEENIAYGLEGTTNFADVESAAEMANAHNFICGFPDQYKTVVGERGIRLSGGQKQRIAIARALLMNPRVLLLDEATSALDAESEYLVQDAMDSLMKGRTVLVIAHRLSTVKSADTVAVISDGLIVESGTHDELLDRDGIYTALVKRQLQGPKFEATSSISEASEIEAEPSSNGQ

SEQ ID NO: 18338 - protein, 644 aa, Zea mays subsp. mays
  peptide (1)..(644): Ceres Seq. ID no. 12450446
MRIKTAPKANRVPLLGDGETSRALSDLEEGSDVQPANVGFCRVIKLAKHDAGKLVLATAALLVASLSNLLVPKYGGKIIDIVSRDVRRPEDKAQALEDVKGTILYIVTIVLVGSVCTALRAWLFNSASERVVARLRKDLFSHLINQEIAFFDVTRTGELLSRLSEDTQIIKNAATTNLSEALRNVTTTAIGLGFMFSTSWKLTLLALVIVPVISVAVRRFGRFLRELSHQTQAAAAVASSIAEESFGAIRTVRSFAQEYHEISRYGEKVEETLKLGLKQAKVVGLFSGGLNAASTMSVVIVVIYGANLTINGYMTTGSLTSFILYSLTVGSSVSALSGLYTTVMKASGASRRVFQLLDRVSSMTNSGDKCPINEKDGEVELDDVWFAYPSRPSHMILKGITLKLAPGSKVALVGPSGGGKTTIANLIERFYDPLKGRILLNGVPLAEISHQYLHSKVSIVSQEPTLFNCTIEENIAYGLEGTTNFADVESAAEMANAHNFICGFPDQYKTVVGERGIRLSGGQKQRIAIARALLMNPRVLLLDEATSALDAESEYLVQDAMDSLMKGRTVLVIAHRLSTVKSADTVAVISDGLIVESGTHDELLDRDGIYTALVKRQLQGPKFEATSSISEASEIEAEPSSNGQ

SEQ ID NO: 18339 - protein, 450 aa, Zea mays subsp. mays
  peptide (1)..(450): Ceres Seq. ID no. 12450447
MFSTSWKLTLLALVIVPVISVAVRRFGRFLRELSHQTQAAAAVASSIAEESFGAIRTVRSFAQEYHEISRYGEKVEETLKLGLKQAKVVGLFSGGLNAASTMSVVIVVIYGANLTINGYMTTGSLTSFILYSLTVGSSVSALSGLYTTVMKASGASRRVFQLLDRVSSMTNSGDKCPINEKDGEVELDDVWFAYPSRPSHMILKGITLKLAPGSKVALVGPSGGGKTTIANLIERFYDPLKGRILLNGVPLAEISHQYLHSKVSIVSQEPTLFNCTIEENIAYGLEGTTNFADVESAAEMANAHNFICGFPDQYKTVVGERGIRLSGGQKQRIAIARALLMNPRVLLLDEATSALDAESEYLVQDAMDSLMKGRTVLVIAHRLSTVKSADTVAVISDGLIVESGTHDELLDRDGIYTALVKRQLQGPKFEATSSISEASEIEAEPSSNGQ

SEQ ID NO: 18340 - DNA, 1713 bp, Zea mays subsp. mays
  misc_feature (1)..(1713): Ceres Seq. ID no. 12375320
  misc_feature (1)..(1713): Ortholog of  Ceres SEQ ID NO 13654285 as cited in SEQ ID NO 68661
atagattttcttattcgccccttctctctccttctattttcagagagtcccctcgcctctgcctgcctgtcccatccccagtccaccaagcagcgcccgtcaccatctctccccatcccctttgccactctcggtcttctccctcctcagggcaggcaggggaagcagaagaaggaagcgagagcacggagcctgatttggtttgctttttgttgcccagactcggagggagttggtgtctctgtgtgtgtggagatggaccccaagttccccccacccccaccgctaaacaaaacggagcccaccaccgcgacgaccaccaccacctcgaccgcgcagcagcagcagcagctggatcctaaggactaccaccagcagcagccggcgcagcaccaggagcaccaccaccacctgcaaatccaaactcaccagccgccgcagcaggacgggggcggcggagggaaggagcagcagcagctgcaggtggtggcgcagcccggggagaggaggcagcaggcgctcgcgcccaagcggagctccaacaaggaccgacacaccaaggtcgacggcaggggccggcggatccggatgcccgcgctctgcgccgcgcggatcttccagctcacgcgggaactcggccacaagtccgacggcgagaccgtccagtggctgctgcagcaggccgagccggccatcgtcgccgccaccggcacgggcaccataccggcgtccgcgctcgcctccgtcgcgccctcgctcccgtcgcccacctccgggctcgccaggccgcaccaccacatgtgggcgccgtccgccggcttctcctcgccctccttcctgaactctgccgccgcgggcacgggcgatgccgccggtatcatgcagcggatggggatccccgcgggcttcgagctgccgggagcctccgccgccggagccaccctcggcgccggcggccacatcggttttgcgcccatgttcgctggacacgccgccgccatgccggggctcgagctcgggctatcgcaggacggccacatcggcgtgctcgccgcgcagtcgatcagccagttctaccaccaggtgggtgctgccgccgccggcggcggccagatgcagcacgcgcacgggcaccatcatcaccatcaccagcagcaggaggacggggaggacgaccgcgaggacggcgagtccgatgacgagtctgggcagtagtagtgtaaccgttcaaccttttgcgttgctgaatcttccctcaagttggaaggagagaaaagtgtatgcgtgcagccacgggatgcttctgctactcttggactgttgttggtcgagttctgatggatttttgtgtccatttttttctcgtgtggtatccaaactcaacggaggcctctcttgctgtgaagacttgcggattcgagatcatcctcagttcttcccacaatctcatggagtggatgatcgccacagccttctctccgacttccaggtgtatactagctgagaaaatgatggattggatcgatcacccttgagtgagtgccttatttgttattgcacagtgtgtagatattcaggtaattttgcagttagagaggtgttccttttattgtagtagtgatcaacgttttaaaacaatcaaggtattctcctccacaggctgtctatgcaacgcaagtatagtacaattctagttcatgaccacgcataccg

SEQ ID NO: 18341 - protein, 404 aa, Zea mays subsp. mays
  peptide (1)..(404): Ceres Seq. ID no. 12375321
IDFLIRPFSLLLFSESPLASACLSHPQSTKQRPSPSLPIPFATLGLLPPQGRQGKQKKEARARSLIWFAFCCPDSEGVGVSVCVEMDPKFPPPPPLNKTEPTTATTTTTSTAQQQQQLDPKDYHQQQPAQHQEHHHHLQIQTHQPPQQDGGGGGKEQQQLQVVAQPGERRQQALAPKRSSNKDRHTKVDGRGRRIRMPALCAARIFQLTRELGHKSDGETVQWLLQQAEPAIVAATGTGTIPASALASVAPSLPSPTSGLARPHHHMWAPSAGFSSPSFLNSAAAGTGDAAGIMQRMGIPAGFELPGASAAGATLGAGGHIGFAPMFAGHAAAMPGLELGLSQDGHIGVLAAQSISQFYHQVGAAAAGGGQMQHAHGHHHHHHQQQEDGEDDREDGESDDESGQ

SEQ ID NO: 18342 - protein, 319 aa, Zea mays subsp. mays
  peptide (1)..(319): Ceres Seq. ID no. 12375322
MDPKFPPPPPLNKTEPTTATTTTTSTAQQQQQLDPKDYHQQQPAQHQEHHHHLQIQTHQPPQQDGGGGGKEQQQLQVVAQPGERRQQALAPKRSSNKDRHTKVDGRGRRIRMPALCAARIFQLTRELGHKSDGETVQWLLQQAEPAIVAATGTGTIPASALASVAPSLPSPTSGLARPHHHMWAPSAGFSSPSFLNSAAAGTGDAAGIMQRMGIPAGFELPGASAAGATLGAGGHIGFAPMFAGHAAAMPGLELGLSQDGHIGVLAAQSISQFYHQVGAAAAGGGQMQHAHGHHHHHHQQQEDGEDDREDGESDDESGQ

SEQ ID NO: 18343 - protein, 212 aa, Zea mays subsp. mays
  peptide (1)..(212): Ceres Seq. ID no. 12375323
MPPVSCSGWGSPRASSCREPPPPEPPSAPAATSVLRPCSLDTPPPCRGSSSGYRRTATSACSPRSRSASSTTRWVLPPPAAARCSTRTGTIITITSSRRTGRTTARTASPMTSLGSSSVTVQPFALLNLPSSWKERKVYACSHGMLLLLLDCCWSSSDGFLCPFFSRVVSKLNGGLSCCEDLRIRDHPQFFPQSHGVDDRHSLLSDFQVYTS

SEQ ID NO: 18344 - DNA, 1859 bp, Zea mays subsp. mays; identical to SEQ ID NO: 16776
  misc_feature (1)..(1859): Ceres Seq. ID no. 13492557
  misc_feature (1)..(1859): Ortholog of  Ceres SEQ ID NO 13592961 as cited in SEQ ID NO 20522
  misc_feature (1)..(1859): Ortholog of  Ceres SEQ ID NO 12583469 as cited in SEQ ID NO 51031
  misc_feature (1)..(1859): Ortholog of  Ceres SEQ ID NO 13596527 as cited in SEQ ID NO 62582
  misc_feature (1)..(1859): Ortholog of  Ceres SEQ ID NO 15226378 as cited in SEQ ID NO 62741
  misc_feature (1)..(1859): Ortholog of  Ceres SEQ ID NO 15169639 as cited in SEQ ID NO 64624
  misc_feature (1)..(1859): Ortholog of  Ceres SEQ ID NO 14303071 as cited in SEQ ID NO 67114
  misc_feature (1)..(1859): Ortholog of  Ceres SEQ ID NO 13595998 as cited in SEQ ID NO 68161
  misc_feature (1)..(1859): Ortholog of  Ceres SEQ ID NO 14303635 as cited in SEQ ID NO 68503

SEQ ID NO: 18345 - protein, 371 aa, Zea mays subsp. mays; identical to SEQ ID NO: 16777
  peptide (1)..(371): Ceres Seq. ID no. 13492558

SEQ ID NO: 18346 - protein, 313 aa, Zea mays subsp. mays; identical to SEQ ID NO: 16778
  peptide (1)..(313): Ceres Seq. ID no. 13492559

SEQ ID NO: 18347 - protein, 230 aa, Zea mays subsp. mays; identical to SEQ ID NO: 16779
  peptide (1)..(230): Ceres Seq. ID no. 13492560

SEQ ID NO: 18348 - DNA, 2198 bp, Zea mays subsp. mays
  misc_feature (1)..(2198): Ceres Seq. ID no. 12387571
  misc_feature (1)..(2198): Ortholog of  Ceres SEQ ID NO 14314144 as cited in SEQ ID NO 54403
  misc_feature (1)..(2198): Ortholog of  Ceres SEQ ID NO 14310452 as cited in SEQ ID NO 54426
  misc_feature (1)..(2198): Ortholog of  Ceres SEQ ID NO 15169663 as cited in SEQ ID NO 64659
  misc_feature (1)..(2198): Ortholog of  Ceres SEQ ID NO 13656177 as cited in SEQ ID NO 64997
  misc_feature (1)..(2198): Ortholog of  Ceres SEQ ID NO 15225015 as cited in SEQ ID NO 0
gcacgagaccattacctagaacatcctaatcgaaaagtcctaaaaccctagcgaaggcgagccttccacttccctcagcctgccgccgccaccgccgccgccgccgccatgtgcccagcagcggcgaccacgagctccgccaagccgtcgaagaagcggaaacagcccgtcatagcgccgccggagtcggactctgaggaggaatctgtctacgacactgcctccgacgatgacgaggaggaagaggagacgcaggagttagagagtgaggatgtagacgaggaggtggaggaggggagcgaggacggcgaggaaaatgaaattggtgacgatagcgaggtggaagaagaggaggtgaaggagaaaaaagaaaaggaggagacggtgaaggagaaaaaggaaaagaaggacatgaagcaagagggaaagaaggcgaagaagcaagaggaaaagaaggcgaagaaggacaagaaggaagaggaaaaaaaggtgatggaggacaagaaagaagaggaaaagaaggcgaagaagaagagcgaggggagtggaatcctgtctaacaagctcttctcggagctccccctctctgagctcactgccaaggccatcagagagatgaactacacccacctcacccagattcaagctagatcaataccacatctgttggaggggaatgatgtgatgggcgcagccaagactggctctgggaagactcttgcattccttataccagcgattgagatgctatatcacacacacttctcaccgaggaatgggactggagctattgtggtttgcccgacacgggaacttgctatccagacacacaatgttgccaaggagttaatgaaatatcactcacaaactctcggatatgtcattggtggtaataatcgaagaagtgaggctgatcagcttgcaaaggggatcaatttattagttgctaccccaggcaggcttttggaccatctacaaaataccaagagtttcatatacagaaggctaaagtgccttgtcattgatgaagccgatcgcatacttgagcaaaactttgaggaagacatgaaacaaatatttaaacgccttccccagaataggcagactgttcttttttctgctacacagactccagaggttgaaaaatttgctaaactgtcatttgagaaaaatgaagaaagtaaaaaaaaacctgtttatgttggagttgatgatgataagtcaaaggctactgttgaaggcctgcagcagggttattgtgtcatttctagcgataaaaggttcttggttctgtatgctttcctaagaaagaagcggaataagaagataatggtgttcttctcatcatgtaattcagtaaagttccacgctgaacttctgaatttccttgggatagagtgttctgatatccatggaaaacagaagcaacagaagcgaactactacattctttagcttttgcaaggcagaaaagggcatcttattgtgcactaatgtggctgcccgtggacttgatattcctgacgtggattatatcttgcaatatgaccctccagatgaaccaaaggattacattcacagagttggtcgtaccgcacgaggtgagaaaggcaaaggaagtgcattgctgttcttactaccagaagaactgaagtttctaatttacctgaaggcggccaaggttaccctgacggaatatgagttcaatcagaagaatgtgccaaatttgcaatcgcagcttgagaatattgttggtgagaattactttctgaaccagtctgccaaagaagcctacagatcctacgttttggcatatgactctcactctatgaaagacatttttaatgtccatcaacttgatctgcagaaagtagccgcgtcattcggtttcaagaatcccccgaaagtgaacctggacctggacagcagtgcggcgaagcatcggaagaagaggagagtagacggtgggaagaggcatggcatcagcgcttcgaacccgtacgggaggaaggacaaaggcggtggcggcgataaaagacagttggcgagattctagaaaggaggaagagcaggagcgtttcactattgttgtgttcgtaccagggctttgattgatgatgttacctggcttgggaaaaatcttgacaggccactaaggctggctataaattttgggttgtcttgatatatttggtgtgt

SEQ ID NO: 18349 - protein, 648 aa, Zea mays subsp. mays
  peptide (1)..(648): Ceres Seq. ID no. 12387572
MCPAAATTSSAKPSKKRKQPVIAPPESDSEEESVYDTASDDDEEEEETQELESEDVDEEVEEGSEDGEENEIGDDSEVEEEEVKEKKEKEETVKEKKEKKDMKQEGKKAKKQEEKKAKKDKKEEEKKVMEDKKEEEKKAKKKSEGSGILSNKLFSELPLSELTAKAIREMNYTHLTQIQARSIPHLLEGNDVMGAAKTGSGKTLAFLIPAIEMLYHTHFSPRNGTGAIVVCPTRELAIQTHNVAKELMKYHSQTLGYVIGGNNRRSEADQLAKGINLLVATPGRLLDHLQNTKSFIYRRLKCLVIDEADRILEQNFEEDMKQIFKRLPQNRQTVLFSATQTPEVEKFAKLSFEKNEESKKKPVYVGVDDDKSKATVEGLQQGYCVISSDKRFLVLYAFLRKKRNKKIMVFFSSCNSVKFHAELLNFLGIECSDIHGKQKQQKRTTTFFSFCKAEKGILLCTNVAARGLDIPDVDYILQYDPPDEPKDYIHRVGRTARGEKGKGSALLFLLPEELKFLIYLKAAKVTLTEYEFNQKNVPNLQSQLENIVGENYFLNQSAKEAYRSYVLAYDSHSMKDIFNVHQLDLQKVAASFGFKNPPKVNLDLDSSAAKHRKKRRVDGGKRHGISASNPYGRKDKGGGGDKRQLARF

SEQ ID NO: 18350 - protein, 547 aa, Zea mays subsp. mays
  peptide (1)..(547): Ceres Seq. ID no. 12387573
MKQEGKKAKKQEEKKAKKDKKEEEKKVMEDKKEEEKKAKKKSEGSGILSNKLFSELPLSELTAKAIREMNYTHLTQIQARSIPHLLEGNDVMGAAKTGSGKTLAFLIPAIEMLYHTHFSPRNGTGAIVVCPTRELAIQTHNVAKELMKYHSQTLGYVIGGNNRRSEADQLAKGINLLVATPGRLLDHLQNTKSFIYRRLKCLVIDEADRILEQNFEEDMKQIFKRLPQNRQTVLFSATQTPEVEKFAKLSFEKNEESKKKPVYVGVDDDKSKATVEGLQQGYCVISSDKRFLVLYAFLRKKRNKKIMVFFSSCNSVKFHAELLNFLGIECSDIHGKQKQQKRTTTFFSFCKAEKGILLCTNVAARGLDIPDVDYILQYDPPDEPKDYIHRVGRTARGEKGKGSALLFLLPEELKFLIYLKAAKVTLTEYEFNQKNVPNLQSQLENIVGENYFLNQSAKEAYRSYVLAYDSHSMKDIFNVHQLDLQKVAASFGFKNPPKVNLDLDSSAAKHRKKRRVDGGKRHGISASNPYGRKDKGGGGDKRQLARF

SEQ ID NO: 18351 - protein, 520 aa, Zea mays subsp. mays
  peptide (1)..(520): Ceres Seq. ID no. 12387574
MEDKKEEEKKAKKKSEGSGILSNKLFSELPLSELTAKAIREMNYTHLTQIQARSIPHLLEGNDVMGAAKTGSGKTLAFLIPAIEMLYHTHFSPRNGTGAIVVCPTRELAIQTHNVAKELMKYHSQTLGYVIGGNNRRSEADQLAKGINLLVATPGRLLDHLQNTKSFIYRRLKCLVIDEADRILEQNFEEDMKQIFKRLPQNRQTVLFSATQTPEVEKFAKLSFEKNEESKKKPVYVGVDDDKSKATVEGLQQGYCVISSDKRFLVLYAFLRKKRNKKIMVFFSSCNSVKFHAELLNFLGIECSDIHGKQKQQKRTTTFFSFCKAEKGILLCTNVAARGLDIPDVDYILQYDPPDEPKDYIHRVGRTARGEKGKGSALLFLLPEELKFLIYLKAAKVTLTEYEFNQKNVPNLQSQLENIVGENYFLNQSAKEAYRSYVLAYDSHSMKDIFNVHQLDLQKVAASFGFKNPPKVNLDLDSSAAKHRKKRRVDGGKRHGISASNPYGRKDKGGGGDKRQLARF

SEQ ID NO: 18352 - DNA, 2269 bp, Zea mays subsp. mays
  misc_feature (1)..(2269): Ceres Seq. ID no. 12361170
  misc_feature (1)..(2269): Ortholog of  Ceres SEQ ID NO 13590691 as cited in SEQ ID NO 66290
gcacgagaccattacctagaacatcctaatcgaaaaaccagaccaccgtcgctcgctcgcctgcacaacctctccatccaggccacagctcgagaccaacgaccgacgcctagacgcggctgggcggtcggcctcacctcgttcccccgcctcccttcttcctgctccgcgtctcgatctcgactcccccgccgcgtcgcgcgacccggccagatctcgcccaccctgcgccgcggccatggataacttgatcaccctcgtcaacaagctgcagagggcttgcacggctctcggagaccacggagaggagagcgccctcccgacgctctgggactcgctgccggctatcgccgtcgttggaggacagagctctggtaaatcatctgtgttggagagcgtggttgggaaggatttcctaccgaggggttcaggcattgtaacccggcggccgctggtgctgcagctccacagaattgatggtgacagggaatatgcagagttcattcatcttccgagaaagagatttacagattttgctgctgtgagaaaggagatagctgatgaaactgaccgagaaacaggccgttcaaagcaaatatcaactgtccctatccatttaagcatattttctccccatgttgtgaatcttactcttattgatcttcctgggcttactaaagtagcagttgatggccaaccggagagtattgtacatgacattgaaaacatggttcgctcatatattgaaaagccaaattgtatcattctggctgtgtccccagccaatcaggaccttgctacttctgatgcaatcaagatttcacgggaagttgatcccaaaggtgaaaggacctttggtgtgctcacaaaaattgatctgatggataagggtaccgatgctgttgatatactggaaggaagatcttatcgtctccaaacaccatgggttggtgttgttaatcgatcccaacaagatatcaacaagaatgtggacatgattgctgctaggcgtagagagcgagagtattttgcatctacaccagaatataagcacatggcttctaggatgggatctgaatatttaggaaagatgctttcaaagcatttggaacaagtgatcaaatcaaggattccggggatccaatctcttataacaaagacaattgcagagctggaaactgaacttaatcggcttggaaaacccattgctaatgatgctggggggaagctgtacacgatcatggaaatatgccgtatgtttgatggtatttacaaagagcatctggatggagtgcgccctggcggagagaaagtttaccatgtcttcgacaatcaatttcctgtagctattaaacgattgcagtttgataaacaactctctatggaaaatgtgaggaagcttataacagaggctgatggataccagcctcacttgatagctccagaacaaggatatagacgccttatagaatcttgtcttattagtatcagaggtcctgctgaggcggctgttgacgcggtccatgcaattctcaaggaccttgtccgcaaggctatcaatgaaacacatgaactgaagcagtttcccacccttcgtgtggaagtaggcaatgcagcttttgagtcattggatagaatgagggatgaaagcaagaaaaatacattaaagctagttgacatggaatgcagctacttgacagtagatttcttcaggaagcttcctcaggatgttgagaagggtggaaatccaagccactctatttttgatagatataatgactcttatcttagacgaattggacaaactgttctgtcatatgttaatatggtgtgttcgaccttgaggaactccatcccaaaatctattgtttattgtcaagtgcgagaggccaagcgctcgctgctcgatcacttcttcactgaacctggagcaagagagatgaagcagctttccaaacttcttgacgaagacccagcagtcatggaacgcagaactaaccttgcaaagaggctcgagctgtaccggagtgcccaatccgaaattgatgccgttgcatggtccaaatagtcctgatggccaagatatctgttcttaccccttgtctggcgattctctctcctattctggggcatatatagctgatttttcgtgttgtaggtcaggtcattttatatatcaccggagctgtacggtgtcatgttccttgtgcttgaggatctcggggggcacttgtatctcgaacaagttcgtacatcgcgctttcgttcc

SEQ ID NO: 18353 - protein, 609 aa, Zea mays subsp. mays
  peptide (1)..(609): Ceres Seq. ID no. 12361171
MDNLITLVNKLQRACTALGDHGEESALPTLWDSLPAIAVVGGQSSGKSSVLESVVGKDFLPRGSGIVTRRPLVLQLHRIDGDREYAEFIHLPRKRFTDFAAVRKEIADETDRETGRSKQISTVPIHLSIFSPHVVNLTLIDLPGLTKVAVDGQPESIVHDIENMVRSYIEKPNCIILAVSPANQDLATSDAIKISREVDPKGERTFGVLTKIDLMDKGTDAVDILEGRSYRLQTPWVGVVNRSQQDINKNVDMIAARRREREYFASTPEYKHMASRMGSEYLGKMLSKHLEQVIKSRIPGIQSLITKTIAELETELNRLGKPIANDAGGKLYTIMEICRMFDGIYKEHLDGVRPGGEKVYHVFDNQFPVAIKRLQFDKQLSMENVRKLITEADGYQPHLIAPEQGYRRLIESCLISIRGPAEAAVDAVHAILKDLVRKAINETHELKQFPTLRVEVGNAAFESLDRMRDESKKNTLKLVDMECSYLTVDFFRKLPQDVEKGGNPSHSIFDRYNDSYLRRIGQTVLSYVNMVCSTLRNSIPKSIVYCQVREAKRSLLDHFFTEPGAREMKQLSKLLDEDPAVMERRTNLAKRLELYRSAQSEIDAVAWSK

SEQ ID NO: 18354 - protein, 446 aa, Zea mays subsp. mays
  peptide (1)..(446): Ceres Seq. ID no. 12361172
MVRSYIEKPNCIILAVSPANQDLATSDAIKISREVDPKGERTFGVLTKIDLMDKGTDAVDILEGRSYRLQTPWVGVVNRSQQDINKNVDMIAARRREREYFASTPEYKHMASRMGSEYLGKMLSKHLEQVIKSRIPGIQSLITKTIAELETELNRLGKPIANDAGGKLYTIMEICRMFDGIYKEHLDGVRPGGEKVYHVFDNQFPVAIKRLQFDKQLSMENVRKLITEADGYQPHLIAPEQGYRRLIESCLISIRGPAEAAVDAVHAILKDLVRKAINETHELKQFPTLRVEVGNAAFESLDRMRDESKKNTLKLVDMECSYLTVDFFRKLPQDVEKGGNPSHSIFDRYNDSYLRRIGQTVLSYVNMVCSTLRNSIPKSIVYCQVREAKRSLLDHFFTEPGAREMKQLSKLLDEDPAVMERRTNLAKRLELYRSAQSEIDAVAWSK

SEQ ID NO: 18355 - protein, 395 aa, Zea mays subsp. mays
  peptide (1)..(395): Ceres Seq. ID no. 12361173
MDKGTDAVDILEGRSYRLQTPWVGVVNRSQQDINKNVDMIAARRREREYFASTPEYKHMASRMGSEYLGKMLSKHLEQVIKSRIPGIQSLITKTIAELETELNRLGKPIANDAGGKLYTIMEICRMFDGIYKEHLDGVRPGGEKVYHVFDNQFPVAIKRLQFDKQLSMENVRKLITEADGYQPHLIAPEQGYRRLIESCLISIRGPAEAAVDAVHAILKDLVRKAINETHELKQFPTLRVEVGNAAFESLDRMRDESKKNTLKLVDMECSYLTVDFFRKLPQDVEKGGNPSHSIFDRYNDSYLRRIGQTVLSYVNMVCSTLRNSIPKSIVYCQVREAKRSLLDHFFTEPGAREMKQLSKLLDEDPAVMERRTNLAKRLELYRSAQSEIDAVAWSK

SEQ ID NO: 18356 - DNA, 1966 bp, Zea mays subsp. mays
  misc_feature (1)..(1966): Ceres Seq. ID no. 12391453
  misc_feature (1)..(1966): Ortholog of  Ceres SEQ ID NO 15177678 as cited in SEQ ID NO 0
aacccaaccggatcctctggtggaacttccagggtgccctcgtcggcggcgcgcttctcctcctctacatcgtcgacgccgccgttggttgaaagctcagaggtcatgcctcactcggcgcggcctccggggaccggagccaacttcaaccgcgcgcgcgaccagcgcggcacccgccgcgtctttctgcgtcgcccgccgcctccgcttcggcgtcctcctcatgtcacagccaatggtcatcgaggcgagggaggcagcggcggcgggggagcgcgtcggagcgcgggagaggaggcgggcgggcggtacacgaggcgcggcggcgtggcggaccgtgaggtggcggtgagtgccagcgcggaccctgtgggacggaatgctgcgaccgtcgccactggtggtgaggctccaccgccgcgggaggaggatggcggcggacgaggtggtgttcttgtgagcaagcgcccgtctgctgcgcccgtgctcccaccgcccaagcggagggcggtctccgtcactcggcagttcccacccgcctccaggtggacctcggctgctcctgctccgctcgctggtgcagatgccgacggaggtttgcggacacgatacgaagggcaacgtgagaacagagcttctgatgcattcaagaagccggcagttgctcgtcccctcgcgggcctcaaggatggtgttggtgttggtgtgatgtcgagagcggtgtcccccaaagctgctggcacgagggttctcaaaaagccgtgtgccagggatggagctgctccaatgtcgaacacagatcgtcatgatgctggattggtgaagtgatgaagatgataaattcaaccatagctggactggagaaagggcacctgcctgtgatgtcagctgaaggttcaggaggtgtttatttcatgcgagatgcaacaggccagaagaatgttgctgtgtttaagcctattgatgaggaacccatggccaaaaacaacccaaggggcgttcctgtgtccacagacggcgaggggatgaagaggggaacaattgtaggggaaggtgcattcagggaggttgcagcttatattctcgaccatccagttagtgatagtaaatatggtcacagtgttgggttttctggtgtgcctcccaccacattggtccgaaccttacatagggggaagagcttcaagattggttcactgcagatgttcatggagaacaatggaagcactgaagatatgggtcctcgatcttttcctgtcaaggaggttcacaaaatagcagtactagatattaggttagctaatgctgatcgtcatgctgggaatattctagtgtgcaaggagggagaaggtggcaactacaagctgattccaattgatcatggttattgcttgccagagaagtttgaagatgttacatttgagtggctctactggccccaagcccgtgagccattcagtgatgaaaccattgaatacatcaaatcacttgatgctgaagaagacatcaagcttctcaagttccatgggtgggagctgcccccacgatgcgctcgtgttctgcgcatcagcaccatgcttttgaagaaaggtgcagctcgtggcttcacaccatatgacatagggcgcattctatgcagggaaactgtgaatagtgagtctgagattgaggacatcattcaggaagcagaggatgctgttctcccagggtccagtgaaaacatgttcttagaaactgtatctgaaatcatggaccgtcacctcgacaaggagtgagtttagaaattcagaataactgatctagttgttccagttccagctgtatccggtttgttgtttctattgttgacaagcactgatcaacagactaataatttgatttgtttgtacctctcaaatgtttctttcggttgtaatgctcgagtactttgcttagcacactttgtgaataatatatttgttcagtt

SEQ ID NO: 18357 - protein, 315 aa, Zea mays subsp. mays
  peptide (1)..(315): Ceres Seq. ID no. 12391454
MKMINSTIAGLEKGHLPVMSAEGSGGVYFMRDATGQKNVAVFKPIDEEPMAKNNPRGVPVSTDGEGMKRGTIVGEGAFREVAAYILDHPVSDSKYGHSVGFSGVPPTTLVRTLHRGKSFKIGSLQMFMENNGSTEDMGPRSFPVKEVHKIAVLDIRLANADRHAGNILVCKEGEGGNYKLIPIDHGYCLPEKFEDVTFEWLYWPQAREPFSDETIEYIKSLDAEEDIKLLKFHGWELPPRCARVLRISTMLLKKGAARGFTPYDIGRILCRETVNSESEIEDIIQEAEDAVLPGSSENMFLETVSEIMDRHLDKE

SEQ ID NO: 18358 - protein, 313 aa, Zea mays subsp. mays
  peptide (1)..(313): Ceres Seq. ID no. 12391455
MINSTIAGLEKGHLPVMSAEGSGGVYFMRDATGQKNVAVFKPIDEEPMAKNNPRGVPVSTDGEGMKRGTIVGEGAFREVAAYILDHPVSDSKYGHSVGFSGVPPTTLVRTLHRGKSFKIGSLQMFMENNGSTEDMGPRSFPVKEVHKIAVLDIRLANADRHAGNILVCKEGEGGNYKLIPIDHGYCLPEKFEDVTFEWLYWPQAREPFSDETIEYIKSLDAEEDIKLLKFHGWELPPRCARVLRISTMLLKKGAARGFTPYDIGRILCRETVNSESEIEDIIQEAEDAVLPGSSENMFLETVSEIMDRHLDKE

SEQ ID NO: 18359 - protein, 297 aa, Zea mays subsp. mays
  peptide (1)..(297): Ceres Seq. ID no. 12391456
MSAEGSGGVYFMRDATGQKNVAVFKPIDEEPMAKNNPRGVPVSTDGEGMKRGTIVGEGAFREVAAYILDHPVSDSKYGHSVGFSGVPPTTLVRTLHRGKSFKIGSLQMFMENNGSTEDMGPRSFPVKEVHKIAVLDIRLANADRHAGNILVCKEGEGGNYKLIPIDHGYCLPEKFEDVTFEWLYWPQAREPFSDETIEYIKSLDAEEDIKLLKFHGWELPPRCARVLRISTMLLKKGAARGFTPYDIGRILCRETVNSESEIEDIIQEAEDAVLPGSSENMFLETVSEIMDRHLDKE

SEQ ID NO: 18360 - DNA, 938 bp, Zea mays subsp. mays
  misc_feature (1)..(938): Ceres Seq. ID no. 14305297
  misc_feature (1)..(938): Ortholog of  Ceres SEQ ID NO 12584790 as cited in SEQ ID NO 62648
  misc_feature (1)..(938): Ortholog of  Ceres SEQ ID NO 15178116 as cited in SEQ ID NO 0
aatatcaatagaagtgacaactccatctctggtctcccagactcccacgcctataatctcattcccctccttcaaagccctctggcgatcgagattcttccccctccgtctccagatatggcaaacaaaaggattcagaaggaactcatggatctgcaaaaggacccaccgacatcatgcagtgcagggccagctggagaggatctattccactggcaggccacaatcatgggtcctagcgacagcccctatgcaggaggggttttctttgttaatatccattttcctcctgactacccgtttaagcctccaaaagtgaacttccaaacaaaagtttatcacccgaacatcaactctaacgggagcatctgccttgatatcctcaaggagcagtggagccctgcactgaccatatcaaaggtcctcctctccatcagctcgcttctgactgaccccaacccagacgaccccctcgtccccgagatcgcccacatgtacaagaaccagaggccgcgctacgaggaaaccgcacgggcctggacccagaagtacgcgatgggctagctgattctgtgttgccgaacaatactgtcactgccaagaagatcatcatcacgacgttgtaagaaattaagttgaaccggtttccccgtcgtgtgatggtattaagagcccagatggctgctgcgtcagttatactagcttcgcagaccaaagttcttctgtgtgtacagtacttttgaagctggatagtctgaatcctgtgccagaacctaaggtcttcgctttgttccctgaagagcgtttgtgaccatagaatctgcatctgtaaccttgccagctaagaaaacagacagtagctgcttgtatgatgtcgagatgctatagttccgatgggtggaaccgtgcagatgaaacagtccagtggtcttgcgttc

SEQ ID NO: 18361 - protein, 187 aa, Zea mays subsp. mays
  peptide (1)..(187): Ceres Seq. ID no. 14305298
NINRSDNSISGLPDSHAYNLIPLLQSPLAIEILPPPSPDMANKRIQKELMDLQKDPPTSCSAGPAGEDLFHWQATIMGPSDSPYAGGVFFVNIHFPPDYPFKPPKVNFQTKVYHPNINSNGSICLDILKEQWSPALTISKVLLSISSLLTDPNPDDPLVPEIAHMYKNQRPRYEETARAWTQKYAMG

SEQ ID NO: 18362 - protein, 148 aa, Zea mays subsp. mays
  peptide (1)..(148): Ceres Seq. ID no. 14305299
MANKRIQKELMDLQKDPPTSCSAGPAGEDLFHWQATIMGPSDSPYAGGVFFVNIHFPPDYPFKPPKVNFQTKVYHPNINSNGSICLDILKEQWSPALTISKVLLSISSLLTDPNPDDPLVPEIAHMYKNQRPRYEETARAWTQKYAMG

SEQ ID NO: 18363 - protein, 138 aa, Zea mays subsp. mays
  peptide (1)..(138): Ceres Seq. ID no. 14305300
MDLQKDPPTSCSAGPAGEDLFHWQATIMGPSDSPYAGGVFFVNIHFPPDYPFKPPKVNFQTKVYHPNINSNGSICLDILKEQWSPALTISKVLLSISSLLTDPNPDDPLVPEIAHMYKNQRPRYEETARAWTQKYAMG

SEQ ID NO: 18364 - DNA, 1805 bp, Zea mays subsp. mays
  misc_feature (1)..(1805): Ceres Seq. ID no. 12435271
  misc_feature (1)..(1805): Ortholog of  Ceres SEQ ID NO 13597375 as cited in SEQ ID NO 63986
aggaaattaagcttacagccccacaccgacaccgccggccaccgccatcgcctcgctgccgatggcggccgccgccgccgcccggatcctccgcttggccccgcgccggatccaggttcccaagacctccccgctcgccgcactctcgttcccactccctcgaacggcgccgatcgccgctggccttggggaggcggcagcgcttctgcgccgtggcgcaggcccccgcccccgcccccgcagccgcggcgacaggggcggcgggagaggccgtgggggagttcaggaagcggctgcgggtggcggacgtgaagggcggggaggacgagggcgccgcgtgggtgggcaaggagctcgccgtgccgggtgggtgcgcacctgccgcgcccagaggaccataaccttcgtcgaggtcaatgatggctcttgcttatccaatatgcaatgtgtattgactcctgaaacagaaggctatgaccagatagactctgtcactactggagcatctgtactagttgagggagttgttgcaagcagccaaggcggtaagcaaaaagtggagttgaaggtttcaaagatcaccgtgattggtaagagtgaccccacatcttttcctatacagaagaaacgggcatcaagagaattccttaggaccgtagcccatctccgtcctcggacaaacacttttggtgcagttgcaagagtgagaaatactctggcatacgcaactcataaattctttcaagacaatggatttgtttgggtttcgagcccaattattactgcctcagattgtgaaggagctggggagcagttttacgtgactactttgcgctgaaggtggttctctactcaaagatattcctgctaccaaggatggaagggttgattggtcacaggatttcttctgcaaaccagcatttctgacagtgtctggacagcttaatggtgaaacatatgcttcagctctatctgatatttacacatttggtccaacgtttagggctgaaaattcaaacacttcaaggcatctggctgaattttggatgattgaacctgagcttgcctttgcggatctgaacgatgacatggcttgtgcaactgcatatctccagtatgtagtaaagtatattctggagaactgcaaagaggatatggatttcttcaatacttggattgaaaaaggcatcatagatcggttaaatgatgtagtagagaagaacttcgttcacctgtcttacactgatgctgttgagctacttcttgggtccaagaaggaattcgagttcccggtaaagtggggtttggatcttcaaagcgagcatgagcgatatatcacagaagttgcctttggtgggcgccctgtaataattagagattacccaaaggagatcaaagctttctatatgagagaaaatgatgatgggaagacagttgctgcaatggatctgttggttcctcgggttggtgaacttattggaggaagccagagggaagagcgtcttgattaccttgaagcccggttggacgagcaaaatctgaataaggagagctactggtggtatttggacctacgacgatatggatcagttccacacgctggtttcggtctcggatttgagcggcttgtacagtttgctactggaatggacaacatcagagacaccatcccatttcctcgagttcctggctctgccgagttttagcgccctggaagtgttgtcgtatacgtatactttagaaacattctttcctaggatgtaatgtgaggaaaggcatacgttgtactgtacaactgnttcatc

SEQ ID NO: 18365 - protein, 258 aa, Zea mays subsp. mays
  peptide (1)..(258): Ceres Seq. ID no. 12435272
MAAAAAARILRLAPRRIQVPKTSPLAALSFPLPRTAPIAAGLGEAAALLRRGAGPRPRPRSRGDRGGGRGRGGVQEAAAGGGREGRGGRGRRVGGQGARRAGWVRTCRAQRTITFVEVNDGSCLSNMQCVLTPETEGYDQIDSVTTGASVLVEGVVASSQGGKQKVELKVSKITVIGKSDPTSFPIQKKRASREFLRTVAHLRPRTNTFGAVARVRNTLAYATHKFFQDNGFVWVSSPIITASDCEGAGEQFYVTTLR

SEQ ID NO: 18366 - protein, 219 aa, Zea mays subsp. mays
  peptide (1)..(219): Ceres Seq. ID no. 12435273
MIEPELAFADLNDDMACATAYLQYVVKYILENCKEDMDFFNTWIEKGIIDRLNDVVEKNFVHLSYTDAVELLLGSKKEFEFPVKWGLDLQSEHERYITEVAFGGRPVIIRDYPKEIKAFYMRENDDGKTVAAMDLLVPRVGELIGGSQREERLDYLEARLDEQNLNKESYWWYLDLRRYGSVPHAGFGLGFERLVQFATGMDNIRDTIPFPRVPGSAEF

SEQ ID NO: 18367 - protein, 205 aa, Zea mays subsp. mays
  peptide (1)..(205): Ceres Seq. ID no. 12435274
MACATAYLQYVVKYILENCKEDMDFFNTWIEKGIIDRLNDVVEKNFVHLSYTDAVELLLGSKKEFEFPVKWGLDLQSEHERYITEVAFGGRPVIIRDYPKEIKAFYMRENDDGKTVAAMDLLVPRVGELIGGSQREERLDYLEARLDEQNLNKESYWWYLDLRRYGSVPHAGFGLGFERLVQFATGMDNIRDTIPFPRVPGSAEF

SEQ ID NO: 18368 - DNA, 1006 bp, Zea mays subsp. mays
  misc_feature (1)..(1006): Ceres Seq. ID no. 12363531
  misc_feature (1)..(1006): Ortholog of  Ceres SEQ ID NO 13594163 as cited in SEQ ID NO 60426
atgatgacgacgatgatgaacagaactcaccccgagtcatcgatccctggcaacgcgctaaccaagctagtagctagcaagcatcggccatgtccaagccaaggttggacgggaaggtggccatcgtgacgggcggcgcgagcgggatcggcgaggcggcggcgcggctgttcgcctcgagcggcgccacggtggtgatcgcggacgtgcaggacgcgctgggggaggcggtggcggcgtcggtggggccccggtgcgcgtacgcgcggtgcgacgtgacggacnaggcgcaggtggaggcgacggtggcncgngcngtgtcggcgcacgnncgnctgnangtnatgctgancaacgccggcgtgctgctcccgacggggtcggtgatgnacatggacctggcggagctggaccgcgtgatggccgtcaacttccggggcgccgcggcgtgnntnaagcacncggcgcgcgcgatggcgtccgncgncgncggcgccatcgtgtgcacggccagcgtggcgtcgctgcagggcgggttcggcccggcgtcgtacacggcgtccaagcacgcgttgctgggcctggtgcgcgccgcggcgggggagctgggacggcacggcgtgcgcgtcaantgcgtgtcccccggcggngtcgccacgcccctcagctgcgcgctcatgggcgtggggccccgcgagctggaggccatgacggtgccgcacaacgtcctgcaggggaaggtgctgcgcgccgaggacgtcgccgaggccgcgctgttcctcgcgtccgaccaggccgccttcatcagcggacacaacctcgttgtcgacggcgccaccaccgccgtcaaccccgccgtgctgcacaccgtcgggctgtgaacgacgagcgctcgctgcgacagtagatacatatatactccacaccttcaatgccatgtttcatctttttcttttctttgtttgtttgcattggttgccatcaagaaaactgcttttgttagctc

SEQ ID NO: 18369 - protein, 263 aa, Zea mays subsp. mays
  peptide (1)..(263): Ceres Seq. ID no. 12363532
  misc_feature (66)..(66): Xaa is any aa, unknown or other
  misc_feature (74)..(74): Xaa is any aa, unknown or other
  misc_feature (75)..(75): Xaa is any aa, unknown or other
  misc_feature (76)..(76): Xaa is any aa, unknown or other
  misc_feature (81)..(81): Xaa is any aa, unknown or other
  misc_feature (82)..(82): Xaa is any aa, unknown or other
  misc_feature (84)..(84): Xaa is any aa, unknown or other
  misc_feature (85)..(85): Xaa is any aa, unknown or other
  misc_feature (88)..(88): Xaa is any aa, unknown or other
  misc_feature (101)..(101): Xaa is any aa, unknown or other
  misc_feature (121)..(121): Xaa is any aa, unknown or other
  misc_feature (122)..(122): Xaa is any aa, unknown or other
  misc_feature (125)..(125): Xaa is any aa, unknown or other
  misc_feature (132)..(132): Xaa is any aa, unknown or other
  misc_feature (133)..(133): Xaa is any aa, unknown or other
  misc_feature (134)..(134): Xaa is any aa, unknown or other
  misc_feature (181)..(181): Xaa is any aa, unknown or other
  misc_feature (187)..(187): Xaa is any aa, unknown or other
MSKPRLDGKVAIVTGGASGIGEAAARLFASSGATVVIADVQDALGEAVAASVGPRCAYARCDVTDXAQVEATVXXXVSAHXXLXXMLXNAGVLLPTGSVMXMDLAELDRVMAVNFRGAAAXXKHXARAMASXXXGAIVCTASVASLQGGFGPASYTASKHALLGLVRAAAGELGRHGVRVXCVSPGXVATPLSCALMGVGPRELEAMTVPHNVLQGKVLRAEDVAEAALFLASDQAAFISGHNLVVDGATTAVNPAVLHTVGL

SEQ ID NO: 18370 - protein, 178 aa, Zea mays subsp. mays
  peptide (1)..(178): Ceres Seq. ID no. 12363533
  misc_feature (3)..(3): Xaa is any aa, unknown or other
  misc_feature (16)..(16): Xaa is any aa, unknown or other
  misc_feature (36)..(36): Xaa is any aa, unknown or other
  misc_feature (37)..(37): Xaa is any aa, unknown or other
  misc_feature (40)..(40): Xaa is any aa, unknown or other
  misc_feature (47)..(47): Xaa is any aa, unknown or other
  misc_feature (48)..(48): Xaa is any aa, unknown or other
  misc_feature (49)..(49): Xaa is any aa, unknown or other
  misc_feature (96)..(96): Xaa is any aa, unknown or other
  misc_feature (102)..(102): Xaa is any aa, unknown or other
MLXNAGVLLPTGSVMXMDLAELDRVMAVNFRGAAAXXKHXARAMASXXXGAIVCTASVASLQGGFGPASYTASKHALLGLVRAAAGELGRHGVRVXCVSPGXVATPLSCALMGVGPRELEAMTVPHNVLQGKVLRAEDVAEAALFLASDQAAFISGHNLVVDGATTAVNPAVLHTVGL

SEQ ID NO: 18371 - protein, 164 aa, Zea mays subsp. mays
  peptide (1)..(164): Ceres Seq. ID no. 12363534
  misc_feature (2)..(2): Xaa is any aa, unknown or other
  misc_feature (22)..(22): Xaa is any aa, unknown or other
  misc_feature (23)..(23): Xaa is any aa, unknown or other
  misc_feature (26)..(26): Xaa is any aa, unknown or other
  misc_feature (33)..(33): Xaa is any aa, unknown or other
  misc_feature (34)..(34): Xaa is any aa, unknown or other
  misc_feature (35)..(35): Xaa is any aa, unknown or other
  misc_feature (82)..(82): Xaa is any aa, unknown or other
  misc_feature (88)..(88): Xaa is any aa, unknown or other
MXMDLAELDRVMAVNFRGAAAXXKHXARAMASXXXGAIVCTASVASLQGGFGPASYTASKHALLGLVRAAAGELGRHGVRVXCVSPGXVATPLSCALMGVGPRELEAMTVPHNVLQGKVLRAEDVAEAALFLASDQAAFISGHNLVVDGATTAVNPAVLHTVGL

SEQ ID NO: 18372 - DNA, 1215 bp, Zea mays subsp. mays; identical to SEQ ID NO: 8672
  misc_feature (1)..(1215): Ceres Seq. ID no. 13665996
  misc_feature (1)..(1215): Ortholog of  Ceres SEQ ID NO 12781552 as cited in SEQ ID NO 51997
  misc_feature (1)..(1215): Ortholog of  Ceres SEQ ID NO 15176548 as cited in SEQ ID NO 53387
  misc_feature (1)..(1215): Ortholog of  Ceres SEQ ID NO 15169228 as cited in SEQ ID NO 55423
  misc_feature (1)..(1215): Ortholog of  Ceres SEQ ID NO 14312196 as cited in SEQ ID NO 56984
  misc_feature (1)..(1215): Ortholog of  Ceres SEQ ID NO 13597237 as cited in SEQ ID NO 64136
  misc_feature (1)..(1215): Ortholog of  Ceres SEQ ID NO 13598601 as cited in SEQ ID NO 69129

SEQ ID NO: 18373 - protein, 235 aa, Zea mays subsp. mays; identical to SEQ ID NO: 8673
  peptide (1)..(235): Ceres Seq. ID no. 13665997

SEQ ID NO: 18374 - protein, 175 aa, Zea mays subsp. mays; identical to SEQ ID NO: 8674
  peptide (1)..(175): Ceres Seq. ID no. 13665998

SEQ ID NO: 18375 - protein, 167 aa, Zea mays subsp. mays; identical to SEQ ID NO: 8675
  peptide (1)..(167): Ceres Seq. ID no. 13665999

SEQ ID NO: 18376 - DNA, 972 bp, Zea mays subsp. mays; identical to SEQ ID NO: 11350
  misc_feature (1)..(972): Ceres Seq. ID no. 12341008
  misc_feature (1)..(972): Ortholog of  Ceres SEQ ID NO 15174990 as cited in SEQ ID NO 62558
  misc_feature (1)..(972): Ortholog of  Ceres SEQ ID NO 14305591 as cited in SEQ ID NO 0

SEQ ID NO: 18377 - protein, 176 aa, Zea mays subsp. mays; identical to SEQ ID NO: 11351
  peptide (1)..(176): Ceres Seq. ID no. 12341009

SEQ ID NO: 18378 - DNA, 976 bp, Zea mays subsp. mays
  misc_feature (1)..(976): Ceres Seq. ID no. 12358492
  misc_feature (1)..(976): Ortholog of  Ceres SEQ ID NO 14313155 as cited in SEQ ID NO 54706
  misc_feature (1)..(976): Ortholog of  Ceres SEQ ID NO 13639022 as cited in SEQ ID NO 59811
agaaaggatgggctctgacaaatcctgacctaattgaccagtgcgcaagagaggattttgttgagagagttaaaactcagcaagatgaaggctgcaatgtccatggttttttagatgtcagtaaagttgctggaaattttcactttgccccaggcaaaggtttttatgaatcgaacatagatgtgcctgagctgtcattacttgaaggtggtttcaatattacccacaaaataaacaaactgtcctttgggacagaatttcctggtgttgtcaatccacttgatggtgctcagtggacacagccagcttcagatgggacataccagtatttcataaaagttgtccctacaatatacactgatataagaggacacaatattcattcgaaccagttctcggtaacggaacattttagggatggaaatgttcgtccgaaaccccaacctggagtttttttcttctatgatttctcacctataaaggtgatattcacagaagaaaatagatccctactccactacctgacaaacctttgtgctatagtgggaggtgtgttcactgtctcgggtatcatcgactcgtttatataccacggacagaaggcactcaagaagaaaatggagctaggtaaatacagatgatcaacatcgaccttgtactggccccatcgtttccaagttttgtggcatgtaaggaggggatatgcctgctaaatacgacaagatgccacttacattgctgaggttgcaatttgcaaggccatcagactgatgttattgcacgtgagctgatcagataacatgtaaaaagacaatgaatagcctggtctggggggagtgctttgatgtccatcattgttcactgacattgaaatggcccgaaccggtgcggtggagtaatttgagttcggaggtggatatatcatagatcatagaatgtttcttatgaaagtttcttcaaggaaacagcttcactc

SEQ ID NO: 18379 - protein, 212 aa, Zea mays subsp. mays
  peptide (1)..(212): Ceres Seq. ID no. 12358493
KGWALTNPDLIDQCAREDFVERVKTQQDEGCNVHGFLDVSKVAGNFHFAPGKGFYESNIDVPELSLLEGGFNITHKINKLSFGTEFPGVVNPLDGAQWTQPASDGTYQYFIKVVPTIYTDIRGHNIHSNQFSVTEHFRDGNVRPKPQPGVFFFYDFSPIKVIFTEENRSLLHYLTNLCAIVGGVFTVSGIIDSFIYHGQKALKKKMELGKYR

SEQ ID NO: 18380 - DNA, 1698 bp, Zea mays subsp. mays
  misc_feature (1)..(1698): Ceres Seq. ID no. 12361474
  misc_feature (1)..(1698): Ortholog of  Ceres SEQ ID NO 15171279 as cited in SEQ ID NO 51378
  misc_feature (1)..(1698): Ortholog of  Ceres SEQ ID NO 13596816 as cited in SEQ ID NO 62287
gcacgagaccattacctagaacatcctaatcgaaaaagccagtggctcagcggctgcgcccgtgcctgtcacgtcttgtcctcaatctctctctctctctctcaatcctcacctctccggctctctttctcctccccagtccccaacggtgaggcccccgccgcgcagcccatcgacgcattgccgctgcaagcgcggacaccgagggctagaagcggcggcggtgccagggttcggcgctcggtcggcaatggcgaggcggcttatgctggcgctccctgtgctcctcttcttattgctcgtcgggcaatgccacggcggcaagattggcgtctgctacggccgcaacgccgacgaccttccggcgccagacaaggtggcgcagctaatccagcagcagtccatcaagtacgtgcgcatctacgacaccaacatcgacgtcatcaaggcattcgccaacaccggcgtcgagctcatggtcggcgtccccaactccgacctcctcgccttcgcgcagtaccagtccaacgtcgacacatggctcaagaacagcatcctcccatactacccggacaccatgatcacctacatcaccgtcggcgccgaggtcaccgagagccccgccaacgtctccgccctcgtcgtgccagccatgcgcaatgtgcacaccgcgctcaagaaggccggcctgcacaagaagatcaccatctccagcacccactcgctcgggatactgtcccggtcgttcccgccgtctgctggggcgttcaacagcagctacgcctacttcttgaagcctatgctccagttccttgtggagaatcaggcaccgttcatggtggatttgtacccctactatgcgtaccagaactcacggagcaatgtgtccctcaactacgcgctgttctcgccagagtcccaggatgtgattgacccaaacactggactggtttacactaacatgttcgacgcccaggtcgattccatcttctttgcgctcatggctctgaacttcaagactttgaagatcatgatcactgagtcagggtggccaaacaaaggggcggtcaaggagactggagccacaccagacaatgctcagacctacaataccaatttgatacgccatgttgttaatgacagcggcacaccggcgaaaccaggggaagagattgatgtctacatattttcattgttcaatgagaacaggaaacctggcatcgagtcggagaggaactggggactgttttttcctgataagagctctatctacagccttgattggacgggccgaggcaatgtggatgttatgactggagcaaacattacaagtgctaatggtacctggtgtattgcttcaactaatgcatcagaaactgatctgcagaatgccctcaactgggcatgtggtccaggcaacgtagattgttctgccatacagccaagccaaccctgctaccagccggacactttaacttcccatgcttcatatgcattcaatagctactaccagcaaaatggagccaacgttgtggcctgtgactttggaggtgcggggatacgaacgacaaaagatccaagtaagagtcccatccttttttactgttatgataatcatgatgctatgcatggtttcatgataacatccatttgcatatattcaggttgtggattatgtctttagttgatgttggagtt

SEQ ID NO: 18381 - protein, 477 aa, Zea mays subsp. mays
  peptide (1)..(477): Ceres Seq. ID no. 12361475
MARRLMLALPVLLFLLLVGQCHGGKIGVCYGRNADDLPAPDKVAQLIQQQSIKYVRIYDTNIDVIKAFANTGVELMVGVPNSDLLAFAQYQSNVDTWLKNSILPYYPDTMITYITVGAEVTESPANVSALVVPAMRNVHTALKKAGLHKKITISSTHSLGILSRSFPPSAGAFNSSYAYFLKPMLQFLVENQAPFMVDLYPYYAYQNSRSNVSLNYALFSPESQDVIDPNTGLVYTNMFDAQVDSIFFALMALNFKTLKIMITESGWPNKGAVKETGATPDNAQTYNTNLIRHVVNDSGTPAKPGEEIDVYIFSLFNENRKPGIESERNWGLFFPDKSSIYSLDWTGRGNVDVMTGANITSANGTWCIASTNASETDLQNALNWACGPGNVDCSAIQPSQPCYQPDTLTSHASYAFNSYYQQNGANVVACDFGGAGIRTTKDPSKSPILFYCYDNHDAMHGFMITSICIYSGCGLCL

SEQ ID NO: 18382 - protein, 472 aa, Zea mays subsp. mays
  peptide (1)..(472): Ceres Seq. ID no. 12361476
MLALPVLLFLLLVGQCHGGKIGVCYGRNADDLPAPDKVAQLIQQQSIKYVRIYDTNIDVIKAFANTGVELMVGVPNSDLLAFAQYQSNVDTWLKNSILPYYPDTMITYITVGAEVTESPANVSALVVPAMRNVHTALKKAGLHKKITISSTHSLGILSRSFPPSAGAFNSSYAYFLKPMLQFLVENQAPFMVDLYPYYAYQNSRSNVSLNYALFSPESQDVIDPNTGLVYTNMFDAQVDSIFFALMALNFKTLKIMITESGWPNKGAVKETGATPDNAQTYNTNLIRHVVNDSGTPAKPGEEIDVYIFSLFNENRKPGIESERNWGLFFPDKSSIYSLDWTGRGNVDVMTGANITSANGTWCIASTNASETDLQNALNWACGPGNVDCSAIQPSQPCYQPDTLTSHASYAFNSYYQQNGANVVACDFGGAGIRTTKDPSKSPILFYCYDNHDAMHGFMITSICIYSGCGLCL

SEQ ID NO: 18383 - protein, 402 aa, Zea mays subsp. mays
  peptide (1)..(402): Ceres Seq. ID no. 12361477
MVGVPNSDLLAFAQYQSNVDTWLKNSILPYYPDTMITYITVGAEVTESPANVSALVVPAMRNVHTALKKAGLHKKITISSTHSLGILSRSFPPSAGAFNSSYAYFLKPMLQFLVENQAPFMVDLYPYYAYQNSRSNVSLNYALFSPESQDVIDPNTGLVYTNMFDAQVDSIFFALMALNFKTLKIMITESGWPNKGAVKETGATPDNAQTYNTNLIRHVVNDSGTPAKPGEEIDVYIFSLFNENRKPGIESERNWGLFFPDKSSIYSLDWTGRGNVDVMTGANITSANGTWCIASTNASETDLQNALNWACGPGNVDCSAIQPSQPCYQPDTLTSHASYAFNSYYQQNGANVVACDFGGAGIRTTKDPSKSPILFYCYDNHDAMHGFMITSICIYSGCGLCL

SEQ ID NO: 18384 - DNA, 2333 bp, Zea mays subsp. mays
  misc_feature (1)..(2333): Ceres Seq. ID no. 12375264
  misc_feature (1)..(2333): Ortholog of  Ceres SEQ ID NO 14307896 as cited in SEQ ID NO 66915
  misc_feature (1)..(2333): Ortholog of  Ceres SEQ ID NO 13657008 as cited in SEQ ID NO 69164
gcacgagaccattacctagaacatcctaatcgaaaaggcttttgctgcgtctttcctttgacgtcagcgagcgaagaactacttctttccctccctctctcatcattctcagatctcccgctccctccttcccttcatctctctgaatcctgctgcccacctcgccgtcctcgcattccgccgctcgctctcgcgatccggcagcttcctcttcgccgtcgttcttgcctcacctcgtccgctatcctgtaagctgctgctgggtcacccgtggctggactcgaccccgccggcgccgcctccgggggctgggttcgccggatgtttatcggctcctgatccatccggatcccggatccgccgcaaaggcaccgcctttgtaggttctccgggcccatgcaggagggtttggcgattcggcggtgaggcagggctctggtttagttcttgcgttggactagcccggagatgcttcgtggaacggggcacggcggcggggatgcgcggaggcgggcactgcgctcgtcgcggcggcgtctgcccgggtggatctggtggcttctcgggatcttcctccttgtcgggctcatgctcttcgtccttcaccacaaccaaaaggagcagttccggccgcccgtcgtggataatggttcagagatggaggaagtccctcgtgagaaagtgaatttctcagaagagcttttgagcagcacatcatttgctcgccaattagcggatcagatgactttagcaaaggcgtatgtcatccttgcaaaagagcatgataatcttcagcttgcatgggagcttagttcgcagataaggaattgtcaaagattgctctctgaaggggcagttagtgggagagcaatcactaaagatgaagcccatcctataataagccggctagcactgttaatatacaaggctcaggactctcactatgatatcagcacaacaatagtgacattgaagaaccatgccctggcactagaggagcgtgcaaaggcagcaattgttcagagtgctgagtttggccagttagcagcagaatccttcccgaagaatctgcactgtctaactgtgaaactgacagaggagtggcttcggaacccgaagcataggagtcgctcagaggagaaccggaattccacacgattggtggataataatctgtatcatttctgtatattctctgataatgtgctggccacttcagttgttgtcaattctacagtctccaatgcaaatcaccctcaacagcttgtgtttcatgtggtcactgacagaatccattttggcgcaatgtcaacattgttcctcataaatgacttcaaaggttgtactgttgaagtccgatgcatagatgagttctcgtggttgaatgcttcttcatctcctcttgtcaggcaactatctgaggttgaaactcagggttactattactcagctggttccaagaatcctgaaagagaaataaaattccataatccaaagtttgtttctctactgaaccatttacggttctacattcctcagatacttcccaacttggagaaggtggtgtttcttgatgacgatgttgtggtgcaaaaggatttgactcagctgttctccatagagctgcatggcaatgtcattggagcagtggaaacttgtttagagtcgtttcatcggtatcacaagtatctaaatttttcgcatcctactatcagctccaagattgatccacatacttgtggatgggcttttggaatgaacatttttgacttgatagcttggaggaaggcaaacgccacatcattgtatcattattggcaagagcaaaattctgacctattgctctggagaacaggaactcttcctgcaggccttttgacattttatggcctgatggagcccctagaccgcagatggcatgtcttgggtctcgggtatgatgtagacatagatgatcgtctgattgagagtgctgctgttgtgcactataatggaaacatgaaaccctggctgaagctggctattcgccgttacaagtatatatgggaacggtatgtgaatatctcacacccgtatgttagagagtgtatgttgcattagaaagtctgcaaatctctgtatgttcttgcatggcactgaagctgcatgcttcagtttcttcacatgaggctgcttttgagcaccttatgtgccggaaagttccagaggtagaatatatactcaagggacagcatcaaagaagtcaactgttaagttttctttttgggttgggagaagattcattttgggatgaaaataattcctttgcagagtttacatacaatttggactgg

SEQ ID NO: 18385 - protein, 543 aa, Zea mays subsp. mays
  peptide (1)..(543): Ceres Seq. ID no. 12375265
MLRGTGHGGGDARRRALRSSRRRLPGWIWWLLGIFLLVGLMLFVLHHNQKEQFRPPVVDNGSEMEEVPREKVNFSEELLSSTSFARQLADQMTLAKAYVILAKEHDNLQLAWELSSQIRNCQRLLSEGAVSGRAITKDEAHPIISRLALLIYKAQDSHYDISTTIVTLKNHALALEERAKAAIVQSAEFGQLAAESFPKNLHCLTVKLTEEWLRNPKHRSRSEENRNSTRLVDNNLYHFCIFSDNVLATSVVVNSTVSNANHPQQLVFHVVTDRIHFGAMSTLFLINDFKGCTVEVRCIDEFSWLNASSSPLVRQLSEVETQGYYYSAGSKNPEREIKFHNPKFVSLLNHLRFYIPQILPNLEKVVFLDDDVVVQKDLTQLFSIELHGNVIGAVETCLESFHRYHKYLNFSHPTISSKIDPHTCGWAFGMNIFDLIAWRKANATSLYHYWQEQNSDLLLWRTGTLPAGLLTFYGLMEPLDRRWHVLGLGYDVDIDDRLIESAAVVHYNGNMKPWLKLAIRRYKYIWERYVNISHPYVRECMLH

SEQ ID NO: 18386 - protein, 503 aa, Zea mays subsp. mays
  peptide (1)..(503): Ceres Seq. ID no. 12375266
MLFVLHHNQKEQFRPPVVDNGSEMEEVPREKVNFSEELLSSTSFARQLADQMTLAKAYVILAKEHDNLQLAWELSSQIRNCQRLLSEGAVSGRAITKDEAHPIISRLALLIYKAQDSHYDISTTIVTLKNHALALEERAKAAIVQSAEFGQLAAESFPKNLHCLTVKLTEEWLRNPKHRSRSEENRNSTRLVDNNLYHFCIFSDNVLATSVVVNSTVSNANHPQQLVFHVVTDRIHFGAMSTLFLINDFKGCTVEVRCIDEFSWLNASSSPLVRQLSEVETQGYYYSAGSKNPEREIKFHNPKFVSLLNHLRFYIPQILPNLEKVVFLDDDVVVQKDLTQLFSIELHGNVIGAVETCLESFHRYHKYLNFSHPTISSKIDPHTCGWAFGMNIFDLIAWRKANATSLYHYWQEQNSDLLLWRTGTLPAGLLTFYGLMEPLDRRWHVLGLGYDVDIDDRLIESAAVVHYNGNMKPWLKLAIRRYKYIWERYVNISHPYVRECMLH

SEQ ID NO: 18387 - protein, 480 aa, Zea mays subsp. mays
  peptide (1)..(480): Ceres Seq. ID no. 12375267
MEEVPREKVNFSEELLSSTSFARQLADQMTLAKAYVILAKEHDNLQLAWELSSQIRNCQRLLSEGAVSGRAITKDEAHPIISRLALLIYKAQDSHYDISTTIVTLKNHALALEERAKAAIVQSAEFGQLAAESFPKNLHCLTVKLTEEWLRNPKHRSRSEENRNSTRLVDNNLYHFCIFSDNVLATSVVVNSTVSNANHPQQLVFHVVTDRIHFGAMSTLFLINDFKGCTVEVRCIDEFSWLNASSSPLVRQLSEVETQGYYYSAGSKNPEREIKFHNPKFVSLLNHLRFYIPQILPNLEKVVFLDDDVVVQKDLTQLFSIELHGNVIGAVETCLESFHRYHKYLNFSHPTISSKIDPHTCGWAFGMNIFDLIAWRKANATSLYHYWQEQNSDLLLWRTGTLPAGLLTFYGLMEPLDRRWHVLGLGYDVDIDDRLIESAAVVHYNGNMKPWLKLAIRRYKYIWERYVNISHPYVRECMLH

SEQ ID NO: 18388 - DNA, 891 bp, Zea mays subsp. mays
  misc_feature (1)..(891): Ceres Seq. ID no. 12435263
  misc_feature (1)..(891): Ortholog of  Ceres SEQ ID NO 12586030 as cited in SEQ ID NO 63832
aacccacccccacacccacgagcccggcggcgtgctctctgctgtctgctctgcacccaggaccttcggccacaggagctcagccctatccctcgacggtgctcgcggccggcgcgcggcggctcgacccttccccatctccagctccacgccgtctccaccgcctggaatccagggcctccgacgccaccccacctccaccgcctggaatcgaggaccgtcggcgccgccgacctccgtcccctgcctgctgcctcgactcaactgtgtcagggtatttgcaaacagtgacaaaggttctgccttgcttgctgtggagccatggctgcaaagatacgcgtggtgatgaagtcttttatgagccaaagcaaccaggtcgcagggcttctgccattcacaaagaaggtcggactacctgaatcgcgagccttgtacaccgtgctgcggtcgccgcatatcgataagaagtccagggaacagttctcgatgcatgtcaagaaacagtttgtggaactgacagccaaaccgcacgagctccacaagaagttcttctggctaaaacgcctgcgcatacctggggcccagtacgaggtacagatttctttcaagacacgcctggatatggcgagcctaaggtcccaggctccttgatggctcacgatgatcgttcttatcgtcccgcgaaagtttgaagtgctgagactggtactcagaacttgtatccatcaacatttcatatgaagacatgcttattttgatgactttcgaaaaatgtagctgctaactatttccagtgcagttttgagtgcttatggcttgattcacacaaatgtagctgctacgttcagaaataaaaaaattatggaaatacagcatgatatcgcttgattc

SEQ ID NO: 18389 - protein, 138 aa, Zea mays subsp. mays
  peptide (1)..(138): Ceres Seq. ID no. 12435264
PTPTPTSPAACSLLSALHPGPSATGAQPYPSTVLAAGARRLDPSPSPAPRRLHRLESRASDATPPPPPGIEDRRRRRPPSPACCLDSTVSGYLQTVTKVLPCLLWSHGCKDTRGDEVFYEPKQPGRRASAIHKEGRTT

SEQ ID NO: 18390 - protein, 114 aa, Zea mays subsp. mays
  peptide (1)..(114): Ceres Seq. ID no. 12435265
THPHTHEPGGVLSAVCSAPRTFGHRSSALSLDGARGRRAAARPFPISSSTPSPPPGIQGLRRHPTSTAWNRGPSAPPTSVPCLLPRLNCVRVFANSDKGSALLAVEPWLQRYAW

SEQ ID NO: 18391 - protein, 109 aa, Zea mays subsp. mays
  peptide (1)..(109): Ceres Seq. ID no. 12435266
MAAKIRVVMKSFMSQSNQVAGLLPFTKKVGLPESRALYTVLRSPHIDKKSREQFSMHVKKQFVELTAKPHELHKKFFWLKRLRIPGAQYEVQISFKTRLDMASLRSQAP

SEQ ID NO: 18392 - DNA, 2169 bp, Zea mays subsp. mays
  misc_feature (1)..(2169): Ceres Seq. ID no. 12361134
  misc_feature (1)..(2169): Ortholog of  Ceres SEQ ID NO 13655755 as cited in SEQ ID NO 65117
gcacgagaccattacctagaacatcctaatcgaaaaagctcgacgcatcttcgccgccgctcaaccttccccccacgccccaacctatccactcgaaaccttctttcccccgggagacgattcgtcagggagaggaaagaggcaagaggggccatggacgctgccaagttggtgacgccgatcgctgtgtctcacattctggcgcacccgtcggcgggctccgacggcgcagtgaccgatctcgtcgttcaggtcctcgacctgaagtccgtcggcacgggcagccggttcagtttcacagcaactgacgggaaggataagatcaaggcgatgcttcccaccaacttcgggtcggaggtccgctctggcaacctgaagaacctcggcctcatccgcatcatcgactacacttgcaacgtcgtcaaaggcaaagatgacaaagtcttggttgtcatcaaatgcgagcttgtgtgccaagcgcttgacgccgagatcaacggcgaggccaaaaaagaggagcctccaattgtgctgaagcctaaggacgaatgcgtgggcgtgactcccccactcgctatgaagcccaagcaggaggtgaagtctgcgtcccagatcgtgaatgagcagcgtggaaatactgctcctgtcaagcccctttccatgacaaagagggtccatcctttgatcactctgaacccctaccagggtaactgggtcattaaggtgcgggtcacgagcaaaggcaacctgagaacctacaggaatgctcgcggagaaggctgtgtcttcaatgtagagctcaccgatgaggatggcacccagatccaagccaccatgtttaatgacgctgcaaagaagttctatccgatttttgagctgggaaatgtctattatgtctcaaaaggatctcttagaattgccaacaagcagttcaagactgtccaaaatgactacgagatgtcactaaacgagaatgctattgttgaagaagcagagggggagacttgcattccgcaagtgcaatacaaccttgtcaagattgatcagctaggatcatatgtcggtggcagggagcttgtagatattgttggtgtggttcagagcgtatctcccacactcagtgtcaggagaaagattgacaacgagacaataccgaagcgtgacattgttgtggcggatgactctggcaaaactgttagtatctctctttggaatgatcttgctactacgactgggcaagagcttttggacatggctgacagttcgcctgttgttgcgataaagagcctaaaagtgtctgactttcaaggcgtgtctctttctactgtaggcaaaagtactcttgcgattaatcctgatctacacgaggctcagaatctcaagtcatggtatgactctgaaggcaaagatacttcgctggcaccaattggtgcagaaatgggtgccgcacgggccggtggcttcaagtccacgtattctgatagagtttttctgtctcacattactagtgatcctgccatgggccaggaaaagcctgttttctttagtttgtatgccaccataagccacatcaagcctgaccagaacatgtggtaccgtgcttgcaagacctgcaacaagaaggtgactgaaacttttggatctggatactggtgcgagggatgccaaaagaatgactcggaatgctcactgagatacatcatggtcgtcaaggtctccgatcctactggcgaggcatgggtctctgtgttcaacgagcatgcagagaagatcattggctgcagcgccgacgagcttgatcggatcaggaaagaggagggggacgacagttatgctctgaagctcaaggaagccacctgggttcctcacctgttccgcgtcagcgtcacacagcatgaatacaataacgagaaaaggcagagaatcactgtgaggagtgaagcgccggtcgagcacgcagctgaatccaagtacctgcttgaacagatagcgaagcttactgcttgctagtagaagatgcaacctttctggtggttcgttaagggctgccctccgagatgttccctctgggttttagcacttctgtaagatatatgtagaggtttggttaccttgatgtcaagcaacagatgctaggacagttcaagcatgatgcatgaagcgtttgcc

SEQ ID NO: 18393 - protein, 669 aa, Zea mays subsp. mays
  peptide (1)..(669): Ceres Seq. ID no. 12361135
ARDHYLEHPNRKSSTHLRRRSTFPPRPNLSTRNLLSPGRRFVRERKEARGAMDAAKLVTPIAVSHILAHPSAGSDGAVTDLVVQVLDLKSVGTGSRFSFTATDGKDKIKAMLPTNFGSEVRSGNLKNLGLIRIIDYTCNVVKGKDDKVLVVIKCELVCQALDAEINGEAKKEEPPIVLKPKDECVGVTPPLAMKPKQEVKSASQIVNEQRGNTAPVKPLSMTKRVHPLITLNPYQGNWVIKVRVTSKGNLRTYRNARGEGCVFNVELTDEDGTQIQATMFNDAAKKFYPIFELGNVYYVSKGSLRIANKQFKTVQNDYEMSLNENAIVEEAEGETCIPQVQYNLVKIDQLGSYVGGRELVDIVGVVQSVSPTLSVRRKIDNETIPKRDIVVADDSGKTVSISLWNDLATTTGQELLDMADSSPVVAIKSLKVSDFQGVSLSTVGKSTLAINPDLHEAQNLKSWYDSEGKDTSLAPIGAEMGAARAGGFKSTYSDRVFLSHITSDPAMGQEKPVFFSLYATISHIKPDQNMWYRACKTCNKKVTETFGSGYWCEGCQKNDSECSLRYIMVVKVSDPTGEAWVSVFNEHAEKIIGCSADELDRIRKEEGDDSYALKLKEATWVPHLFRVSVTQHEYNNEKRQRITVRSEAPVEHAAESKYLLEQIAKLTAC

SEQ ID NO: 18394 - protein, 618 aa, Zea mays subsp. mays
  peptide (1)..(618): Ceres Seq. ID no. 12361136
MDAAKLVTPIAVSHILAHPSAGSDGAVTDLVVQVLDLKSVGTGSRFSFTATDGKDKIKAMLPTNFGSEVRSGNLKNLGLIRIIDYTCNVVKGKDDKVLVVIKCELVCQALDAEINGEAKKEEPPIVLKPKDECVGVTPPLAMKPKQEVKSASQIVNEQRGNTAPVKPLSMTKRVHPLITLNPYQGNWVIKVRVTSKGNLRTYRNARGEGCVFNVELTDEDGTQIQATMFNDAAKKFYPIFELGNVYYVSKGSLRIANKQFKTVQNDYEMSLNENAIVEEAEGETCIPQVQYNLVKIDQLGSYVGGRELVDIVGVVQSVSPTLSVRRKIDNETIPKRDIVVADDSGKTVSISLWNDLATTTGQELLDMADSSPVVAIKSLKVSDFQGVSLSTVGKSTLAINPDLHEAQNLKSWYDSEGKDTSLAPIGAEMGAARAGGFKSTYSDRVFLSHITSDPAMGQEKPVFFSLYATISHIKPDQNMWYRACKTCNKKVTETFGSGYWCEGCQKNDSECSLRYIMVVKVSDPTGEAWVSVFNEHAEKIIGCSADELDRIRKEEGDDSYALKLKEATWVPHLFRVSVTQHEYNNEKRQRITVRSEAPVEHAAESKYLLEQIAKLTAC

SEQ ID NO: 18395 - protein, 559 aa, Zea mays subsp. mays
  peptide (1)..(559): Ceres Seq. ID no. 12361137
MLPTNFGSEVRSGNLKNLGLIRIIDYTCNVVKGKDDKVLVVIKCELVCQALDAEINGEAKKEEPPIVLKPKDECVGVTPPLAMKPKQEVKSASQIVNEQRGNTAPVKPLSMTKRVHPLITLNPYQGNWVIKVRVTSKGNLRTYRNARGEGCVFNVELTDEDGTQIQATMFNDAAKKFYPIFELGNVYYVSKGSLRIANKQFKTVQNDYEMSLNENAIVEEAEGETCIPQVQYNLVKIDQLGSYVGGRELVDIVGVVQSVSPTLSVRRKIDNETIPKRDIVVADDSGKTVSISLWNDLATTTGQELLDMADSSPVVAIKSLKVSDFQGVSLSTVGKSTLAINPDLHEAQNLKSWYDSEGKDTSLAPIGAEMGAARAGGFKSTYSDRVFLSHITSDPAMGQEKPVFFSLYATISHIKPDQNMWYRACKTCNKKVTETFGSGYWCEGCQKNDSECSLRYIMVVKVSDPTGEAWVSVFNEHAEKIIGCSADELDRIRKEEGDDSYALKLKEATWVPHLFRVSVTQHEYNNEKRQRITVRSEAPVEHAAESKYLLEQIAKLTAC

SEQ ID NO: 18396 - DNA, 795 bp, Zea mays subsp. mays
  misc_feature (1)..(795): Ceres Seq. ID no. 12359553
  misc_feature (1)..(795): Ortholog of  Ceres SEQ ID NO 14316320 as cited in SEQ ID NO 60027
acgcgctcttcggcggcaactactgttggatcgtagggcgaaggaaggaaggaaggggagccatgggaaacgcgtcgtccatgctgacccagtacgacatcgaggaggtgcaggagcactgcagctacctcttctcgcagcaggagatcgtgtcgctgtacgagcgcttctgccagttggaccgcagcgccaagggcttcatctccgaggacgagttcctctccatccccgagttctccctcaacccgctctccaagaggttgctccgtatggttgatggattgaacttcaaggattttgttgcgtttctttctaccttcagtgcaaaggccagccttcgtcagaagatcgagtttatattcaaggtttatgacatcgatggcaagggaaaaattaccttcaaggatctgctagaggttttacgggacctaacagggtcattcatgtccgaggaacaaagagagcaagtggtaactgaagttctggaagaagcagggtacacgagggattacgcattctcgcttgaagattttatccagatcatcgaccatcctggccttaagatggaggtggaagtgccaatcgactagtgaaatgtggaaaacaagcttccggttttgtctgcagaacatggttagtgtcatgtagcagggcaatgaccgttcactttcgtcatcttatttgtttccggtccacttgcctaaacttttgtaatctttgttggcttggccttttcgaatatatccaaaacaaaaaaaaatgtcctgcgatgagattttcgtcggttctatgctg

SEQ ID NO: 18397 - protein, 195 aa, Zea mays subsp. mays
  peptide (1)..(195): Ceres Seq. ID no. 12359554
ALFGGNYCWIVGRRKEGRGAMGNASSMLTQYDIEEVQEHCSYLFSQQEIVSLYERFCQLDRSAKGFISEDEFLSIPEFSLNPLSKRLLRMVDGLNFKDFVAFLSTFSAKASLRQKIEFIFKVYDIDGKGKITFKDLLEVLRDLTGSFMSEEQREQVVTEVLEEAGYTRDYAFSLEDFIQIIDHPGLKMEVEVPID

SEQ ID NO: 18398 - protein, 175 aa, Zea mays subsp. mays
  peptide (1)..(175): Ceres Seq. ID no. 12359555
MGNASSMLTQYDIEEVQEHCSYLFSQQEIVSLYERFCQLDRSAKGFISEDEFLSIPEFSLNPLSKRLLRMVDGLNFKDFVAFLSTFSAKASLRQKIEFIFKVYDIDGKGKITFKDLLEVLRDLTGSFMSEEQREQVVTEVLEEAGYTRDYAFSLEDFIQIIDHPGLKMEVEVPID

SEQ ID NO: 18399 - protein, 169 aa, Zea mays subsp. mays
  peptide (1)..(169): Ceres Seq. ID no. 12359556
MLTQYDIEEVQEHCSYLFSQQEIVSLYERFCQLDRSAKGFISEDEFLSIPEFSLNPLSKRLLRMVDGLNFKDFVAFLSTFSAKASLRQKIEFIFKVYDIDGKGKITFKDLLEVLRDLTGSFMSEEQREQVVTEVLEEAGYTRDYAFSLEDFIQIIDHPGLKMEVEVPID

SEQ ID NO: 18400 - DNA, 3056 bp, Zea mays subsp. mays
  misc_feature (1)..(3056): Ceres Seq. ID no. 12377950
  misc_feature (1)..(3056): Ortholog of  Ceres SEQ ID NO 13655755 as cited in SEQ ID NO 65117
gcacgagaccattacctagaacatcctaatccaaaaatccaattttctctctctctcccgcctcctgttcagtttcccactcgccggaaccgccgcctctccaatccccgctaaccctcgctccgttttatcgcccccctctgcttccaaatcgaatcgcgtcctctccattctgccgtctcctctcctactcctcccccctgccgccgcaagatccaccagggctctcgaccgcaatggagccgcagctgacgcccggcgcggtggcggcggtctccgcccacgccgacggcaacggcacgctgcagccggtgctgcaggtggtggacgtgcggatggtcaacaacgccaagaacccctccgccgagcgcttccggatggtgctctccgacggcgaacacaccatgcagtccatgctcgccaccgccgagaacgcgcgcgtccgggacggctccatccagaagggctccatcgtccacctcctggagtgcacctgcagcaccatccagtctcgcaggatcattatcgttatcaaacttgatgttctgcaaagtgagtgtgccataattggaaaccccaggccctatgaaatgagaaaccaacctaatgagcagggcaccaacataccggccaatgctgctcaagctaatactggaacgtattccagtggccctggtttgctgggatcacctgctgcttcaaggccagcacaagttgctaataatgtaccatacagtggatcctatggtggttatcatggtacggtggtccctccgattgcccctgcagtagaatctgttcccaatgtggcatcgggtgtcacttatggtacaacttcagcgcataatacaatgaatgcgggcatgacacagtcaaacttgcagcagcgttcactgaactctcacccgaaccaaaggtttgcagttccttccatggctggtggcagtggtgctcctgggaatacatatggacaacctgcacagtcgttttatcagcaaccgcctccagggcatatgaatagaactcctgtgtctaagaacgatgcatatcgtcttgtcccattggctcaattgaacccttatctagataaatggacaatcaaggtcagggtaactgcaaagactgatctcaggttctacaacaatgctagaggtgctggaaaagtcttttcctttgatctccttgatgaacagcgtggagaaatccgtgcaacatgcttcaatacgcaggctgatcagttttttaacctcattgaggttgataaggtgtacctgatatctaaagggtcgttgaaaccagcacagaagaagtttaactccttgaatcacgagtatgagataagtctggattccagaacatctattgaagtttgtgctgatgatgatagcaacatccctaggcagcagtataatttccggaagataagtgaaattgagaacattgagaaagatgctattttggacttgattggaattgtcacatcagttggcccttctgtcacgtttatccgaaaggatggcgtggaaacccagagaagaacacttgaactgaaagacatgtctggtcgaagtgtacaacttaccttatgggggaagttgtgtgttgctgaaggcaaccagctgcagtcgctgtgcgattctggtttgaatcctgttctagctttgaaaggtgcccgcgttactgactacagtggtagatctgtgtcctcagctggctcaactcagttaaaaatagacccagaaattcctgaggctgagagtctgcggcgctggtacgcaactggaggaaagacagctgcttgtgtttctctgtcagtggtaagtatgggtggtacttgtgtccggaaatcaatcgctcagatcaaggatgaaaatctggggcagttagagaagccagactttatcactgttaaagctgcaatttcacatctgatagcagataatttttgttatcctgcttgcaccattgacgtgaatggtaggatgtgcaacaaaaaggtaacagataatggtgatgggacatggcgttgtgacaaatgcgaccagagcttaccaaattgtgagtacagatacgtgctgaatggccagatccaggaccacagtggggtcaccaattttactgcattcgaagatgctgctaaggtgatgattggccacagtggccacgagctcaacaacattagtgtagaagactcggaacgatttgcagagatcttgcaggcggctcgttggcagcagtttctgttcacgctgaaagtcaaggaggagatctataatgatgcgccgcaagtcaagtgcaacattactaaagcagagaagctggatccggcaatagagagttcttaccttctaggggtaatcaatggcctgttgcaggatgacactggctcaccttctggggcgcaaggtgccatggcctacaatgctggtatcagcaacactggcgctggacgaagtgtgccaacctccaacagtgcctacaccaccaatttgagtggtccaaggtatggcgagtctgcaaaccagctcgcgcagcaggaaagcacgtacaccggggtgaccactccagtgtcggcggcacggaatgtgcagcagacctgcgtgtcctgcgggtcaagtgggcacaacgtgcagaactgccctgcaggaacatacaggcagcaggcggctgcaagcgcagcaagctcctacggtacttcgcagcctcgcaatggactgtgcttcaaatgcaatcagcctggacactttgccaactcttgtccactactggctcctgctccccagcagcagcagcagtatcggagcggcggcgctccctcaggcggttatggtaggcagcagccctatgttggggctaccaactactgaaagtcattatctctgtcgagtcagtcgtgatgttggttttgcttagatgcctgtcctgaatggcatcgctgcgtccatgtgaagtagatgcaaaccattcctttttatgtttgtgtgtgaagttagaactatgtatcagtactttatgttttcgtcttataaatcctcgttgccgtgtcagttctgttg

SEQ ID NO: 18401 - protein, 876 aa, Zea mays subsp. mays
  peptide (1)..(876): Ceres Seq. ID no. 12377951
MEPQLTPGAVAAVSAHADGNGTLQPVLQVVDVRMVNNAKNPSAERFRMVLSDGEHTMQSMLATAENARVRDGSIQKGSIVHLLECTCSTIQSRRIIIVIKLDVLQSECAIIGNPRPYEMRNQPNEQGTNIPANAAQANTGTYSSGPGLLGSPAASRPAQVANNVPYSGSYGGYHGTVVPPIAPAVESVPNVASGVTYGTTSAHNTMNAGMTQSNLQQRSLNSHPNQRFAVPSMAGGSGAPGNTYGQPAQSFYQQPPPGHMNRTPVSKNDAYRLVPLAQLNPYLDKWTIKVRVTAKTDLRFYNNARGAGKVFSFDLLDEQRGEIRATCFNTQADQFFNLIEVDKVYLISKGSLKPAQKKFNSLNHEYEISLDSRTSIEVCADDDSNIPRQQYNFRKISEIENIEKDAILDLIGIVTSVGPSVTFIRKDGVETQRRTLELKDMSGRSVQLTLWGKLCVAEGNQLQSLCDSGLNPVLALKGARVTDYSGRSVSSAGSTQLKIDPEIPEAESLRRWYATGGKTAACVSLSVVSMGGTCVRKSIAQIKDENLGQLEKPDFITVKAAISHLIADNFCYPACTIDVNGRMCNKKVTDNGDGTWRCDKCDQSLPNCEYRYVLNGQIQDHSGVTNFTAFEDAAKVMIGHSGHELNNISVEDSERFAEILQAARWQQFLFTLKVKEEIYNDAPQVKCNITKAEKLDPAIESSYLLGVINGLLQDDTGSPSGAQGAMAYNAGISNTGAGRSVPTSNSAYTTNLSGPRYGESANQLAQQESTYTGVTTPVSAARNVQQTCVSCGSSGHNVQNCPAGTYRQQAAASAASSYGTSQPRNGLCFKCNQPGHFANSCPLLAPAPQQQQQYRSGGAPSGGYGRQQPYVGATNY

SEQ ID NO: 18402 - protein, 843 aa, Zea mays subsp. mays
  peptide (1)..(843): Ceres Seq. ID no. 12377952
MVNNAKNPSAERFRMVLSDGEHTMQSMLATAENARVRDGSIQKGSIVHLLECTCSTIQSRRIIIVIKLDVLQSECAIIGNPRPYEMRNQPNEQGTNIPANAAQANTGTYSSGPGLLGSPAASRPAQVANNVPYSGSYGGYHGTVVPPIAPAVESVPNVASGVTYGTTSAHNTMNAGMTQSNLQQRSLNSHPNQRFAVPSMAGGSGAPGNTYGQPAQSFYQQPPPGHMNRTPVSKNDAYRLVPLAQLNPYLDKWTIKVRVTAKTDLRFYNNARGAGKVFSFDLLDEQRGEIRATCFNTQADQFFNLIEVDKVYLISKGSLKPAQKKFNSLNHEYEISLDSRTSIEVCADDDSNIPRQQYNFRKISEIENIEKDAILDLIGIVTSVGPSVTFIRKDGVETQRRTLELKDMSGRSVQLTLWGKLCVAEGNQLQSLCDSGLNPVLALKGARVTDYSGRSVSSAGSTQLKIDPEIPEAESLRRWYATGGKTAACVSLSVVSMGGTCVRKSIAQIKDENLGQLEKPDFITVKAAISHLIADNFCYPACTIDVNGRMCNKKVTDNGDGTWRCDKCDQSLPNCEYRYVLNGQIQDHSGVTNFTAFEDAAKVMIGHSGHELNNISVEDSERFAEILQAARWQQFLFTLKVKEEIYNDAPQVKCNITKAEKLDPAIESSYLLGVINGLLQDDTGSPSGAQGAMAYNAGISNTGAGRSVPTSNSAYTTNLSGPRYGESANQLAQQESTYTGVTTPVSAARNVQQTCVSCGSSGHNVQNCPAGTYRQQAAASAASSYGTSQPRNGLCFKCNQPGHFANSCPLLAPAPQQQQQYRSGGAPSGGYGRQQPYVGATNY

SEQ ID NO: 18403 - protein, 829 aa, Zea mays subsp. mays
  peptide (1)..(829): Ceres Seq. ID no. 12377953
MVLSDGEHTMQSMLATAENARVRDGSIQKGSIVHLLECTCSTIQSRRIIIVIKLDVLQSECAIIGNPRPYEMRNQPNEQGTNIPANAAQANTGTYSSGPGLLGSPAASRPAQVANNVPYSGSYGGYHGTVVPPIAPAVESVPNVASGVTYGTTSAHNTMNAGMTQSNLQQRSLNSHPNQRFAVPSMAGGSGAPGNTYGQPAQSFYQQPPPGHMNRTPVSKNDAYRLVPLAQLNPYLDKWTIKVRVTAKTDLRFYNNARGAGKVFSFDLLDEQRGEIRATCFNTQADQFFNLIEVDKVYLISKGSLKPAQKKFNSLNHEYEISLDSRTSIEVCADDDSNIPRQQYNFRKISEIENIEKDAILDLIGIVTSVGPSVTFIRKDGVETQRRTLELKDMSGRSVQLTLWGKLCVAEGNQLQSLCDSGLNPVLALKGARVTDYSGRSVSSAGSTQLKIDPEIPEAESLRRWYATGGKTAACVSLSVVSMGGTCVRKSIAQIKDENLGQLEKPDFITVKAAISHLIADNFCYPACTIDVNGRMCNKKVTDNGDGTWRCDKCDQSLPNCEYRYVLNGQIQDHSGVTNFTAFEDAAKVMIGHSGHELNNISVEDSERFAEILQAARWQQFLFTLKVKEEIYNDAPQVKCNITKAEKLDPAIESSYLLGVINGLLQDDTGSPSGAQGAMAYNAGISNTGAGRSVPTSNSAYTTNLSGPRYGESANQLAQQESTYTGVTTPVSAARNVQQTCVSCGSSGHNVQNCPAGTYRQQAAASAASSYGTSQPRNGLCFKCNQPGHFANSCPLLAPAPQQQQQYRSGGAPSGGYGRQQPYVGATNY

SEQ ID NO: 18404 - DNA, 701 bp, Zea mays subsp. mays
  misc_feature (1)..(701): Ceres Seq. ID no. 12358026
  misc_feature (1)..(701): Ortholog of  Ceres SEQ ID NO 14307233 as cited in SEQ ID NO 54395
  misc_feature (1)..(701): Ortholog of  Ceres SEQ ID NO 14306986 as cited in SEQ ID NO 54853
ctcttatcatggttagcaatcccgcaattcagttcatgctatatgagactcttctgaagaaattgaagaagagacgagcctctaatttcaagggagctgatggattgactgctcttgaaatttttcttcttggtgctgttgcgaaacttggtgcaaccgtcgttacgtatccccttctagttgttaaggcaagacttcaggcaaagcacatgattaacgatgacaagaggcatcgctacaaaggtacacttgatgcgttcacaaagatggtacgatatgagggtctgtcagggatgtacaaaggaatgggcacaaaaattgtgcaaagtgtttttgcttctgctttgctttttatgattaaggaggagctggtgaagggtgctcgactattggtaactggtaacactagtctggttaagaaactaccatcaaagtcatcaagatgaactacgggcatcgcaagcgttagtatatgttcccaaaaagccatttattatccgcataaacagtaaaacaaggtcgacaagctatagagctcgcctctgctttggagatgtcaactgtaggttacacaatagccagtatgattcacgtagggaccaaagactatgttggatagatatttgtatcattcatgtaaaatgtatgtggaagattgaaacagaagaaaataaataagtatgataatttgaacttcggcc

SEQ ID NO: 18405 - protein, 147 aa, Zea mays subsp. mays
  peptide (1)..(147): Ceres Seq. ID no. 12358027
LIMVSNPAIQFMLYETLLKKLKKRRASNFKGADGLTALEIFLLGAVAKLGATVVTYPLLVVKARLQAKHMINDDKRHRYKGTLDAFTKMVRYEGLSGMYKGMGTKIVQSVFASALLFMIKEELVKGARLLVTGNTSLVKKLPSKSSR

SEQ ID NO: 18406 - protein, 145 aa, Zea mays subsp. mays
  peptide (1)..(145): Ceres Seq. ID no. 12358028
MVSNPAIQFMLYETLLKKLKKRRASNFKGADGLTALEIFLLGAVAKLGATVVTYPLLVVKARLQAKHMINDDKRHRYKGTLDAFTKMVRYEGLSGMYKGMGTKIVQSVFASALLFMIKEELVKGARLLVTGNTSLVKKLPSKSSR

SEQ ID NO: 18407 - protein, 136 aa, Zea mays subsp. mays
  peptide (1)..(136): Ceres Seq. ID no. 12358029
MLYETLLKKLKKRRASNFKGADGLTALEIFLLGAVAKLGATVVTYPLLVVKARLQAKHMINDDKRHRYKGTLDAFTKMVRYEGLSGMYKGMGTKIVQSVFASALLFMIKEELVKGARLLVTGNTSLVKKLPSKSSR

SEQ ID NO: 18408 - DNA, 2200 bp, Zea mays subsp. mays
  misc_feature (1)..(2200): Ceres Seq. ID no. 12362570
  misc_feature (1)..(2200): Ortholog of  Ceres SEQ ID NO 13656138 as cited in SEQ ID NO 65492
  misc_feature (1)..(2200): Ortholog of  Ceres SEQ ID NO 14301542 as cited in SEQ ID NO 66246
gcacgagaccattacctagaacatcctaatcgaaaaaccataccctagttcttccttcccgaaccctcgcgccgccaccgccgccgtctagcattttcctacacccaatctgatctgaccaagccctctgaacaccaccgcccatcctcctcctcctccgccgccgccgcccaagatgggcttcgacgtgggcctcgtcccctacaaccccgacgggtggggtccacctgaagttgccgccgcgccgccttccctcggtggtggctcctcgtctgtccccttcgctcccttctcccgctccgacaagctgggccgcatcgccgactggacgcgcaacccgccgggccccggggctttcgccgcagctcgcgacgccgtcttcgatttcgcggggctcgaggactccatcgggctcgcgtccgcggacgactcgtccttccgcctcgtcgatggcaaaccgccgccgcggcacccgcggtttggacctcgctggcgcttccagcagcggccccaactcccgcagcgccgcgacgaagaggtcgaggctcggcgtcgcgaggccgagaaggagcgcgcccgccgcgaccgccactggcagcagaaccgccgcacgcaccaccagttcaaccgcggcgggccctcctcgtcgtctgccaaaccgtccgttgacatccagcccgagtggtcggtgaaggagcagatccctttctcatccttctccaagctctccttcgccgtcgccgaccagcccgaggatctcctcgtctgtggcgcagtcgagtactacgaccggacctacgatcgcgtcacccccagggccgagcgtcgcctcgagcgcttcaagtcgcggaacttcttcaaggtcaccactaccgacgaccccgtcatccgccgtcttgctgagaatgacacggccacggtcttcgccaatgacaccatcctggccgcactcatgtgtgcgccccgtagcgtccagtcctgggatatcgtaattcagcgtgttggcaacaagttgttcttcgacaagcgtgatggctctcagcttgatcttctcaccgtcaacgaaaccgcccaggaggcactccctgaggccaaggaagacatcaactccgcgcattcgctggcggttgaagccacatacgtcaatcagaacttctcgcagcaggtgctgctccgcaatggtgagaaggtcacgttcgacgagcctaacccgtttgccactgaaggggaggaagctgcttccgttgcttaccgctaccgccgctggaagcttgatgaggagacaagcttggttgctcggtgcgaggttcatgccgtgagcgttgatctacgcggcgagcaccagttccttacactcaacgccctcaacgagttcgatcccaaggtcactggtgttgactggaggaagaagcttgagacccagcggggtgctgtgcttgccactgagctcaagaacaatgccaacaagcttgcacgctggactgcccaggcgctgcttgccggcgcagacatgatgaagttgggttatgtgtcacggctgcacccacgcgaccagtacaaccattccattctcagtgtgatcgggtacaagccaagggatttcgctgcacagatcaatctcaacaccgcaaatatgtgggggatcgtgaagtctattgtggatgtctgcatgaagcttggagaggggaagtatgtgcttgtgaaggacccagtgaaaccacaggtccggctttatgaagtgccaaatgatgcattcgagaatgactacgttgaggaaccactccctgaggaagagcaagtgcgtcccttctccgaggatgttgatgccagcgcgaaggaaatggatgctgccgcagaagcggaggctactggaacaactgcaggcgctgagaagagtggtgatgtcgctgctgtgtgaaggcggtggctacaacctgaagaggtctttttcggaccttgaataaggttaccttggctagctatctactacaatcatgggcatctggatacaggtttgatgtttctaccatcgaaggttatgctattattgttcgctgaatcttgagttgtgttccctttatgtgtccttatggctggacttaaatggaatcctcaaactatattgcactttccaagactcacatgttgtggattgccagttctgtttactgtgatttgagttgtggtgattgcatttgcc

SEQ ID NO: 18409 - protein, 580 aa, Zea mays subsp. mays
  peptide (1)..(580): Ceres Seq. ID no. 12362571
MGFDVGLVPYNPDGWGPPEVAAAPPSLGGGSSSVPFAPFSRSDKLGRIADWTRNPPGPGAFAAARDAVFDFAGLEDSIGLASADDSSFRLVDGKPPPRHPRFGPRWRFQQRPQLPQRRDEEVEARRREAEKERARRDRHWQQNRRTHHQFNRGGPSSSSAKPSVDIQPEWSVKEQIPFSSFSKLSFAVADQPEDLLVCGAVEYYDRTYDRVTPRAERRLERFKSRNFFKVTTTDDPVIRRLAENDTATVFANDTILAALMCAPRSVQSWDIVIQRVGNKLFFDKRDGSQLDLLTVNETAQEALPEAKEDINSAHSLAVEATYVNQNFSQQVLLRNGEKVTFDEPNPFATEGEEAASVAYRYRRWKLDEETSLVARCEVHAVSVDLRGEHQFLTLNALNEFDPKVTGVDWRKKLETQRGAVLATELKNNANKLARWTAQALLAGADMMKLGYVSRLHPRDQYNHSILSVIGYKPRDFAAQINLNTANMWGIVKSIVDVCMKLGEGKYVLVKDPVKPQVRLYEVPNDAFENDYVEEPLPEEEQVRPFSEDVDASAKEMDAAAEAEATGTTAGAEKSGDVAAV

SEQ ID NO: 18410 - protein, 321 aa, Zea mays subsp. mays
  peptide (1)..(321): Ceres Seq. ID no. 12362572
MCAPRSVQSWDIVIQRVGNKLFFDKRDGSQLDLLTVNETAQEALPEAKEDINSAHSLAVEATYVNQNFSQQVLLRNGEKVTFDEPNPFATEGEEAASVAYRYRRWKLDEETSLVARCEVHAVSVDLRGEHQFLTLNALNEFDPKVTGVDWRKKLETQRGAVLATELKNNANKLARWTAQALLAGADMMKLGYVSRLHPRDQYNHSILSVIGYKPRDFAAQINLNTANMWGIVKSIVDVCMKLGEGKYVLVKDPVKPQVRLYEVPNDAFENDYVEEPLPEEEQVRPFSEDVDASAKEMDAAAEAEATGTTAGAEKSGDVAAV

SEQ ID NO: 18411 - DNA, 2143 bp, Zea mays subsp. mays
  misc_feature (1)..(2143): Ceres Seq. ID no. 12424075
  misc_feature (1)..(2143): Ortholog of  Ceres SEQ ID NO 15175785 as cited in SEQ ID NO 56970
  misc_feature (1)..(2143): Ortholog of  Ceres SEQ ID NO 15178157 as cited in SEQ ID NO 57481
  misc_feature (1)..(2143): Ortholog of  Ceres SEQ ID NO 13597407 as cited in SEQ ID NO 64106
  misc_feature (1)..(2143): Ortholog of  Ceres SEQ ID NO 14303309 as cited in SEQ ID NO 67739
  misc_feature (1)..(2143): Ortholog of  Ceres SEQ ID NO 12637747 as cited in SEQ ID NO 0
acaaattaagacgggcgtcgttggcttcaaatactggtctctcccctgtccaaaagtctctcgaatctccaccctggttccgcaccggttccagaattttctcccatttccagggtctccccgtttctgtccggcggttctgccgttccactgcttttgatttcggagtgtgagcttacatcttgctggacaataaagattggattttaagcgatttggggggtgcttgcctgatctccccctgcgaggtactgccgggggattggatttcggggaagttttggtggtttgatattcggcttggccggagcaggaatgacgatcgacatgtccattcccaggagctccgggctgctgaacgctgcggggaagagggacatgaagttcttcagcaacccctacgtgcttgcgctcacgggcgctgcaggaatcggtggattcctctttggctacgatacaggtgtcatatctggagcccttctgtatatccgcgatgattttccagcggtcaaggacaattacttcttacaggaaacgattgttagcatggccttagtcggagctatgattggagctgctgggggtggttggatcaatgatgcatacggtcgcaagaagtctactcttcttgctgatttgatgtttgctcttggctcacttgtcatgtgtgctgctgctggtccttacattctaattatcggaaggctcctcgttggtttgggtgtgggtgttgcatcagtcacagcaccggtatacattgctgaagctgctccttcagaaatcaggggaggtttggtgtcaactaatgtactcatgattaccggtggccaattcttctcctatcttatcaatcttggctttactgaggtgcctggaacatggcgctggatgcttggtgttgctgctgttcctgccattatacagtttgtgctgatgctattcctgccagaatctccgcgttggctttactggaaggatgagaaggcaaaagctattgccgtccttgagaggatctatgaatcggaccgcttggaggaagaggtagagctgcttgctacatcctccatgcatgaattccagtccaacaataccggaagctatctggatgtcttcaagtcgaaagaattgaggctagctttctttgctggggctggccttcaggccttccagcaatttactgggatcaacaccgtgatgtattacagccccacgatagtccagatggctggtttctcctccaacaggctggccttgctcctctccctgatcgtggcggccatgaacgccgccggaaccatcgtcgggatctacctaatcgaccgttgcggccgccgccgcctggccctcacaagcttggccggggtcgtggtctccctggccatcctcgccacggccttcatactgcagtcatcatccggcctctgcgcgagcgccgccagcggcacgtgccagggcgcgctaggctggttcgcggtggccggcctcgctctgtacatcgccttcttctccccgggcatggggcccgtgccgtgggccgtgaactcggagatctaccccgaggcgtaccgtgggatgtgcggcggcatgtcggccaccgtgaactgggtctctaacctcgtcgtggcacagacgttcctgtcgatcgtggggctggtcgggaccggcccgacgttcctgatcgtcgccgggatcgcggtgctggccttcgtcttcgtggccacgtacgtgccggagacgaagggcctgacttttgagcaggtggagcagatgtggagggagagagcgtgggggaacagcggcggcaactgcgagagccttttggcgggtactgcttctgcgccgtaggctacccgttgtcagcactggtcaagcgcgtcagttttagtatggccgcgctgggcttgatcggctccgtcctggcattagttggaagaaagtaaaaaacaaattggagatgcagatgcaaactgttgtatgtggtggtgctttatattgctatcctgttgcctgattgtacgtgttgtcatcgtggcaaatgtgcagtgggtgtaaaatatgaggtcataccgtaacgtcaaactaaggcaaaagggcagttgtatgacccagatgggtgattataattatttgtacagtttccggc

SEQ ID NO: 18412 - protein, 509 aa, Zea mays subsp. mays
  peptide (1)..(509): Ceres Seq. ID no. 12424076
MTIDMSIPRSSGLLNAAGKRDMKFFSNPYVLALTGAAGIGGFLFGYDTGVISGALLYIRDDFPAVKDNYFLQETIVSMALVGAMIGAAGGGWINDAYGRKKSTLLADLMFALGSLVMCAAAGPYILIIGRLLVGLGVGVASVTAPVYIAEAAPSEIRGGLVSTNVLMITGGQFFSYLINLGFTEVPGTWRWMLGVAAVPAIIQFVLMLFLPESPRWLYWKDEKAKAIAVLERIYESDRLEEEVELLATSSMHEFQSNNTGSYLDVFKSKELRLAFFAGAGLQAFQQFTGINTVMYYSPTIVQMAGFSSNRLALLLSLIVAAMNAAGTIVGIYLIDRCGRRRLALTSLAGVVVSLAILATAFILQSSSGLCASAASGTCQGALGWFAVAGLALYIAFFSPGMGPVPWAVNSEIYPEAYRGMCGGMSATVNWVSNLVVAQTFLSIVGLVGTGPTFLIVAGIAVLAFVFVATYVPETKGLTFEQVEQMWRERAWGNSGGNCESLLAGTASAP

SEQ ID NO: 18413 - protein, 505 aa, Zea mays subsp. mays
  peptide (1)..(505): Ceres Seq. ID no. 12424077
MSIPRSSGLLNAAGKRDMKFFSNPYVLALTGAAGIGGFLFGYDTGVISGALLYIRDDFPAVKDNYFLQETIVSMALVGAMIGAAGGGWINDAYGRKKSTLLADLMFALGSLVMCAAAGPYILIIGRLLVGLGVGVASVTAPVYIAEAAPSEIRGGLVSTNVLMITGGQFFSYLINLGFTEVPGTWRWMLGVAAVPAIIQFVLMLFLPESPRWLYWKDEKAKAIAVLERIYESDRLEEEVELLATSSMHEFQSNNTGSYLDVFKSKELRLAFFAGAGLQAFQQFTGINTVMYYSPTIVQMAGFSSNRLALLLSLIVAAMNAAGTIVGIYLIDRCGRRRLALTSLAGVVVSLAILATAFILQSSSGLCASAASGTCQGALGWFAVAGLALYIAFFSPGMGPVPWAVNSEIYPEAYRGMCGGMSATVNWVSNLVVAQTFLSIVGLVGTGPTFLIVAGIAVLAFVFVATYVPETKGLTFEQVEQMWRERAWGNSGGNCESLLAGTASAP

SEQ ID NO: 18414 - protein, 488 aa, Zea mays subsp. mays
  peptide (1)..(488): Ceres Seq. ID no. 12424078
MKFFSNPYVLALTGAAGIGGFLFGYDTGVISGALLYIRDDFPAVKDNYFLQETIVSMALVGAMIGAAGGGWINDAYGRKKSTLLADLMFALGSLVMCAAAGPYILIIGRLLVGLGVGVASVTAPVYIAEAAPSEIRGGLVSTNVLMITGGQFFSYLINLGFTEVPGTWRWMLGVAAVPAIIQFVLMLFLPESPRWLYWKDEKAKAIAVLERIYESDRLEEEVELLATSSMHEFQSNNTGSYLDVFKSKELRLAFFAGAGLQAFQQFTGINTVMYYSPTIVQMAGFSSNRLALLLSLIVAAMNAAGTIVGIYLIDRCGRRRLALTSLAGVVVSLAILATAFILQSSSGLCASAASGTCQGALGWFAVAGLALYIAFFSPGMGPVPWAVNSEIYPEAYRGMCGGMSATVNWVSNLVVAQTFLSIVGLVGTGPTFLIVAGIAVLAFVFVATYVPETKGLTFEQVEQMWRERAWGNSGGNCESLLAGTASAP

SEQ ID NO: 18415 - DNA, 1058 bp, Zea mays subsp. mays
  misc_feature (1)..(1058): Ceres Seq. ID no. 12417219
  misc_feature (1)..(1058): Ortholog of  Ceres SEQ ID NO 15173102 as cited in SEQ ID NO 61106
ttgttgtcgtaattgctggcttgaacctgacagaagagcgtgaggacttcgacagagtgagccttctccttccaggcaagcagatgggcctcatacatgccattgctagtgtagcgaagaagccccttgtgttggttctcctgggtggtggtcctgttgatgtttcgtttgcaaagcaagatccacgaatcgcaagcattctttggctcggatatcctggcgaggttggtggacaagtccttccagaaattcttttcggagagtacaacccaggaggaaagctgcctataacttggtatcctgaatcctttactgctattcccatgactgatatgaacatgagagctgatccttcacgaggctaccctgggagaacatatcgattttacactggagatgtagtgtatggctttggatatggtttaagtttactccaaatatttcatatagcatctcctcggctccgaagaagatcaccgtgtcgcgttcatccgatttgggcattatcagcagaaagcctgcatacncaaggagggatggactaggctctgtgaaaactgaagatatcgcttcatgtgaagctctggttttctctgttcacgtcgctgtttcgaatcatggtagcatggatgggagtcatgctgttcttctgttcgcgagatcgaaatcaagcgtcccgggctttcctataaaacagctggttggctttgagagtgtccacacggcggctggcagtgcatccaatgtggagattactgttgacccctgcaagcaaatgagcgcagccaatcctgaaggcaaaagggtacttctgttgggtgcccatgttctaacggtgggtgatgaagagttcgaattatccattgaactctgacagggatgtgccaagtcctaccattttatggagttcaaagttgggaataatctgatgaaacttgtaaagaaacacgttgtaaagattcattattgagctggatgcgtgtacggtaaacatgctgtgacctgtgaagattcatcatttgagttgggtgctagtacaattgcagccattttgcggt

SEQ ID NO: 18416 - protein, 180 aa, Zea mays subsp. mays
  peptide (1)..(180): Ceres Seq. ID no. 12417220
  misc_feature (175)..(175): Xaa is any aa, unknown or other
VVVIAGLNLTEEREDFDRVSLLLPGKQMGLIHAIASVAKKPLVLVLLGGGPVDVSFAKQDPRIASILWLGYPGEVGGQVLPEILFGEYNPGGKLPITWYPESFTAIPMTDMNMRADPSRGYPGRTYRFYTGDVVYGFGYGLSLLQIFHIASPRLRRRSPCRVHPIWALSAESLHXQGGMD

SEQ ID NO: 18417 - protein, 153 aa, Zea mays subsp. mays
  peptide (1)..(153): Ceres Seq. ID no. 12417221
  misc_feature (148)..(148): Xaa is any aa, unknown or other
MGLIHAIASVAKKPLVLVLLGGGPVDVSFAKQDPRIASILWLGYPGEVGGQVLPEILFGEYNPGGKLPITWYPESFTAIPMTDMNMRADPSRGYPGRTYRFYTGDVVYGFGYGLSLLQIFHIASPRLRRRSPCRVHPIWALSAESLHXQGGMD

SEQ ID NO: 18418 - DNA, 1833 bp, Zea mays subsp. mays
  misc_feature (1)..(1833): Ceres Seq. ID no. 12366371
  misc_feature (1)..(1833): Ortholog of  Ceres SEQ ID NO 14303790 as cited in SEQ ID NO 55525
acagcaaaggcggcactgctcaaaccacctctttggccacacacacgcatactgccaccgctactgcttcatcagcagctagcagcaagcggccggtggtgcagcgctgcgcctgcgccgggtaatcgaacacatggctcagatgatctcaaccatgcccatgctagacgccgccccggcctcgtcagccattatgcccaagctgccgcccgccgcctgcctggacgcgccgccggcctcgggcatcaccgtcgtgtcgaggcagcacgttcgcccggacgccgcgtcggcggtcggcgacctcacgctgtccgtctccgacctgcccatgctgtcgtgccactacatccagaaggggctcttcttcccggcacccgacctgcccatgtcctcggtcgtgtcgctgctcctgtcctcgctgtcgcgggcgctcgccgtccgtcccggccctcgccggccgcttcgtcacgctgcccgacgaccgcatcgtcatccgctgcaacgacgcgggcgtggacttcctccacgccgtcgcacccggcctgtcgcttgacgactttctcgtccctgacgccgacgtgccgaccaagcacacaaaggacctgttccccatggaccggaccgtgagctacgatgggcaccgtcgcccgctcacgtcgttccaggtcaccgcactcggagacggcaccgtctttatcggcatcgtcgccaaccacgccgtcgtggacggcacctccttttggcaattcttcaatacctgggcggccatctgccgcggcgagtcccccaaactgccggacttccgccgaaacttcttcggcgagtccactgccgtcctccgcttccccggcggcgtcggcccgtccgtgaccttcgacgtggacgcgcctctccgtgagcgcgtctttcacttcagcgctgacgcaattcgcgagctgaaagcgattgccaaccgccgtccgagcggtggccaagacgccgaggtgtacggcaagatggcgcaggaccccaagaatccccaagtgcgcggggagatctcgtcgttccagtcactgtgcgcgcagatatggctctcggtcacgcgtgcccggaaacgcctggcgcccgacgcgacgacgacgttccgaatggcggtgaactgccggcaccggctgcagccggccatctcccctgtctactttggcaacgccatccagagcgctgcgacgatggcgacagtctccgagctggctcgcagcgatctaaggtgggcggcaggcaagctgaacgcgacccttgcggcctatggcgacggcacgatccggctcgcggcggccgcgtggcaggccgcaccccggtgcttcccgctgggcaaccccgacggctcggtgatcacgatggggagctccaaccggttcccgatgtacgtgggcaacgatttcggctggggccggcccctcgctgtgcggagcgggcgcgccaacaagttcgacggcaagatgtcggcgttcccgggacgcgccggggacggcagcgtggacatcgaggtgtgcctgcctccggagaccatggcggcgctgctccacgacgccgagttcatgcactacgtgtcgtgcccgtcgcatctgttgtgatgtactgcagccgtgcgggcgggcgggcgcgagtgggggccatcggccgtgacatgccatcaggcacctgttggattgctcggtcgtccactcgtccttgcctttcgggattcaggaatactagctagttggtgtcaagacattgtatctgtctcgctttttcggagtgctgcgtgtaatcgtgtgttagcagctactagtagtagtacttggaaattgg

SEQ ID NO: 18419 - protein, 333 aa, Zea mays subsp. mays
  peptide (1)..(333): Ceres Seq. ID no. 12366372
MDRTVSYDGHRRPLTSFQVTALGDGTVFIGIVANHAVVDGTSFWQFFNTWAAICRGESPKLPDFRRNFFGESTAVLRFPGGVGPSVTFDVDAPLRERVFHFSADAIRELKAIANRRPSGGQDAEVYGKMAQDPKNPQVRGEISSFQSLCAQIWLSVTRARKRLAPDATTTFRMAVNCRHRLQPAISPVYFGNAIQSAATMATVSELARSDLRWAAGKLNATLAAYGDGTIRLAAAAWQAAPRCFPLGNPDGSVITMGSSNRFPMYVGNDFGWGRPLAVRSGRANKFDGKMSAFPGRAGDGSVDIEVCLPPETMAALLHDAEFMHYVSCPSHLL

SEQ ID NO: 18420 - protein, 224 aa, Zea mays subsp. mays
  peptide (1)..(224): Ceres Seq. ID no. 12366373
MALGHACPETPGARRDDDVPNGGELPAPAAAGHLPCLLWQRHPERCDDGDSLRAGSQRSKVGGRQAERDPCGLWRRHDPARGGRVAGRTPVLPAGQPRRLGDHDGELQPVPDVRGQRFRLGPAPRCAERARQQVRRQDVGVPGTRRGRQRGHRGVPASGDHGGAAPRRRVHALRVVPVASVVMYCSRAGGRARVGAIGRDMPSGTCWIARSSTRPCLSGFRNTS

SEQ ID NO: 18421 - protein, 208 aa, Zea mays subsp. mays
  peptide (1)..(208): Ceres Seq. ID no. 12366374
TAKAALLKPPLWPHTRILPPLLLHQQLAASGRWCSAAPAPGNRTHGSDDLNHAHARRRPGLVSHYAQAAARRLPGRAAGLGHHRRVEAARSPGRRVGGRRPHAVRLRPAHAVVPLHPEGALLPGTRPAHVLGRVAAPVLAVAGARRPSRPSPAASSRCPTTASSSAATTRAWTSSTPSHPACRLTTFSSLTPTCRPSTQRTCSPWTGP

SEQ ID NO: 18422 - DNA, 1556 bp, Zea mays subsp. mays
  misc_feature (1)..(1556): Ceres Seq. ID no. 12417369
  misc_feature (1)..(1556): Ortholog of  Ceres SEQ ID NO 13596465 as cited in SEQ ID NO 62133
acgcagctcacgtacacgcgatgagcacaccgcgtcgcggcgggcagcaccacggcgacaagcgcaccgtgacacgagcagcctcccgaaacagcgacggacacggcgcaggcgacttgagcttcgggtccacggcggggcctcggttcgccgtcgccccgccgcgcccttgggcgccgccgcctgagcacgcggccgtcttcgcgcagccaccagacgatccgtcgacgttgaccatgctgtggggaccgcccggcgaggtgcccgttgccggcttcgctgcggcaccggaagggcgaccggatgcgttcgctggcagcgcgtcgtgcctgccgctcgcgaggcaggtcggcggccagcagggggcgcgcaacggcgcaacttcgtggtgtcgccgctgtcgttccacgcggcgctcgcgctggtggccgcgggcgcgcggggcgagacgcagcgggagctcctgcgcttcttggactccgagtcgctggtcgagctgcaccgcgccgcggcgacggcgctggtcgccaggctcagcgacctcccgcaggcgtccttcgcctgcggcgtctgggtggaccggagccgcgcgctcacgccggagttcatagaaaccgccgcgtcgcgctacgcggcggtcgcggagtccgtcgacttcttgaagaactccgaaggcggcaagggcagcaagtcaacgacttcgtgaaaggagcaacgaaagggctcatcgacgacgtcctgcctcccggctccgtcgactcgtccacggcgctcgtcctcgccaacgccatctacttcaagggggcgtgggctcggccgttcgatccgtcgagaaccatcttcgcgccgttccatctccccgacggcggcaccgtgcgcgtgccgttcatgactacgactacgagcggtttcgaggaccagcgggttgccgtgttccccggattcaaggcgctcaagctgccctacaagaacgacggcggcgcgcagcaggacgcgttctacatgcttctactcctccccgacggtgagaccctaaccctcaatgatctctatgataaggtcgtgtcgtcgccgggattcatcaggaagcacacgccggtggacgaggtcccggtcgggcggttcatggtgccgaagttcaagttcacgttcgagtttgaggcgtctcacgatatccagaagctgggagtcaaccgagcctttcaaagcggtgacttctccggcatggtctccggtggaaacgggctcatcatctcaggagtgtaccacaaggcaaccgtagaggtggacgaggccggcaccgtggccgccgcggccacggtcgagttcatgtcgtttgtatgtgcaagaatcgatccgcctgtggatttcgtggcggaccggccgttcttgttcgccatcgtggagagaagtggcgtcgtgctgtttcttgggcatgtggtgaaccctctggttgagtgatgacacaggagtggcagctatattttagtcgttatggctttacggaaatgacgttgttatttaacaataaataaataccgtccattatgtggttc

SEQ ID NO: 18423 - protein, 385 aa, Zea mays subsp. mays
  peptide (1)..(385): Ceres Seq. ID no. 12417370
MRSLAARRACRSRGRSAASRGRATAQLRGVAAVVPRGARAGGRGRAGRDAAGAPALLGLRVAGRAAPRRGDGAGRQAQRPPAGVLRLRRLGGPEPRAHAGVHRNRRVALRGGRGVRRLLEELRRRQGQQVNDFVKGATKGLIDDVLPPGSVDSSTALVLANAIYFKGAWARPFDPSRTIFAPFHLPDGGTVRVPFMTTTTSGFEDQRVAVFPGFKALKLPYKNDGGAQQDAFYMLLLLPDGETLTLNDLYDKVVSSPGFIRKHTPVDEVPVGRFMVPKFKFTFEFEASHDIQKLGVNRAFQSGDFSGMVSGGNGLIISGVYHKATVEVDEAGTVAAAATVEFMSFVCARIDPPVDFVADRPFLFAIVERSGVVLFLGHVVNPLVE

SEQ ID NO: 18424 - protein, 202 aa, Zea mays subsp. mays
  peptide (1)..(202): Ceres Seq. ID no. 12417371
AAHVHAMSTPRRGGQHHGDKRTVTRAASRNSDGHGAGDLSFGSTAGPRFAVAPPRPWAPPPEHAAVFAQPPDDPSTLTMLWGPPGEVPVAGFAAAPEGRPDAFAGSASCLPLARQVGGQQGARNGATSWCRRCRSTRRSRWWPRARGARRSGSSCASWTPSRWSSCTAPRRRRWSPGSATSRRRPSPAASGWTGAARSRRSS

SEQ ID NO: 18425 - protein, 196 aa, Zea mays subsp. mays
  peptide (1)..(196): Ceres Seq. ID no. 12417372
MSTPRRGGQHHGDKRTVTRAASRNSDGHGAGDLSFGSTAGPRFAVAPPRPWAPPPEHAAVFAQPPDDPSTLTMLWGPPGEVPVAGFAAAPEGRPDAFAGSASCLPLARQVGGQQGARNGATSWCRRCRSTRRSRWWPRARGARRSGSSCASWTPSRWSSCTAPRRRRWSPGSATSRRRPSPAASGWTGAARSRRSS

SEQ ID NO: 18426 - DNA, 2453 bp, Zea mays subsp. mays
  misc_feature (1)..(2453): Ceres Seq. ID no. 12361174
  misc_feature (1)..(2453): Ortholog of  Ceres SEQ ID NO 15174591 as cited in SEQ ID NO 53383
  misc_feature (1)..(2453): Ortholog of  Ceres SEQ ID NO 14310784 as cited in SEQ ID NO 58503
  misc_feature (1)..(2453): Ortholog of  Ceres SEQ ID NO 14312180 as cited in SEQ ID NO 59480
gcacgagaccattacctagaacatcctaatcaaaaagtaaattcttataatagcttacagggaaaagactcttcaatctgaagcaaaatgtaccgggaatgttgaagagcgggactcttaagcagtagtgagatgcggcggtggtggtcgccggcgttggcggctgtggagccgcggtccgtgcagctcctgctcctgggcgtcgctctcgtcgcagcttctttctacgccggcaccctcttcggctcctccgcgtcccctgcgctcgtactgcccccttcgcgcccccgatcgcccgattccttcagggccaaagttacagatgttccagtgtttaccaacagagtttctcgtacgtaccgggcaaaatcagtgacagttccagatcacggagttgatgtgtgtcctttggaatacaatgagtatgtcccctgccatgatggagcctatataagcagcttgaagagcctggatacatctaggcatgaggatcttgaaagtatttgtcctccatgggagaagcggttgttttgtttggtgccccctccaaatgactacaagataccaataagatggccaacaagccgagactacgtatggcgtagtaatgtcaaccattcacatcttgctgaggtcaaaggaggacagaactgggtgcatgagaagggcaaactttggtggtttcctggaggtggcactcacttcaaacatggtgcatcagaatacatagagaggctaggaaatatgacgacaaatagtactggtgatcttcgttctgccggagtagttcaagttttggatgttggatgtggtgttgctagcttttctgcatatcttcttccgctagacattcgaaccatgtcatttgctccaaaagatggccatgagaatcaaatccagtttgctttagaacgtgggattggtgcaatgatctctgtgttggccacaaaacaattaccttatcctgaaaattcatttgaaatggttcactgttcaagatgtcgtgttgattggcatgaaaatgatggaatattactcaaagaggtagaccgtcttttgcgacctaatgggtattttgtatactctgctccaccagcttatagaaaagataaggactttcctgttatttgggagaagctagttaatattacaacaacaatgtgttggaagcttattgctaagcatgttcaaacagctatttgggttaaacctgaagatgagtcctgcagacagaaaaatgttgatatgaatctactgagtatttgtgaatccaatgacaacatttcaccatcatggaaaattccgttaatgaattgtgtgaagctcaacaaggacaaatccaatattcagaaattgccttccagatctgatcgcctatcattttattccaagagtttggagataataggagttgcaccagagaggtttgagaagaataaccagttctggaagaaccaggttcacaagtattggtcatttcttcatgttgaaaagactagcattcgaaacgtcatggacatgaatgctaattatggtggatttgctgcagcactaagcagtgaccctgtctggattatgaatatagtaccctataccatgatgaacacattgcctgttatctatgaccgtgggttactcggttcttaccatgactggtgtgagccattctcaacatatcctagatcctatgacttgttgcatgctttccacctcttttctcattataaacgccgcaaggaagattgtttgttggaggatatcatgttagaaatggatcgcatcattcgaccacagggttttatcattattagagacgagaatgacactctctcaagaatcatcaatctagcaccgaagttcctttgggatgttaccacgcacatgttggaaaatgaggaaagcgggacagatcaagttctgttttgcaggaagaaattctgggctattgtttgagttatacttgggtggaaattgggaagctgccatattttatcctacttttggttgccctttgtatcagtgacagagcagagcgtaaggagagctgtttggcatgatagatgttccaatgaaacataatatttcattgcacgttctctgcagttgacagtagtgcattgttgagaaggcatatggtacggtggtgcggttgacagggttatccagaaactagctcggataatttttgcttttgagctgtactatttgtctacgaaggacatgggtgagccggtaaggtgtagtcttactgacagtgtttgtagtttctctcataatgaatagccgttaattcttttgttatcttattcactaatggctaattaggtttaggttctcaagttctcaacaatatgttggtagtgctgtttctgttgttccatctggggagcatctgtagtactataaaccttatgtaaggtactgtttccagccaatgccgaggtgcatttgtt

SEQ ID NO: 18427 - protein, 606 aa, Zea mays subsp. mays
  peptide (1)..(606): Ceres Seq. ID no. 12361175
MRRWWSPALAAVEPRSVQLLLLGVALVAASFYAGTLFGSSASPALVLPPSRPRSPDSFRAKVTDVPVFTNRVSRTYRAKSVTVPDHGVDVCPLEYNEYVPCHDGAYISSLKSLDTSRHEDLESICPPWEKRLFCLVPPPNDYKIPIRWPTSRDYVWRSNVNHSHLAEVKGGQNWVHEKGKLWWFPGGGTHFKHGASEYIERLGNMTTNSTGDLRSAGVVQVLDVGCGVASFSAYLLPLDIRTMSFAPKDGHENQIQFALERGIGAMISVLATKQLPYPENSFEMVHCSRCRVDWHENDGILLKEVDRLLRPNGYFVYSAPPAYRKDKDFPVIWEKLVNITTTMCWKLIAKHVQTAIWVKPEDESCRQKNVDMNLLSICESNDNISPSWKIPLMNCVKLNKDKSNIQKLPSRSDRLSFYSKSLEIIGVAPERFEKNNQFWKNQVHKYWSFLHVEKTSIRNVMDMNANYGGFAAALSSDPVWIMNIVPYTMMNTLPVIYDRGLLGSYHDWCEPFSTYPRSYDLLHAFHLFSHYKRRKEDCLLEDIMLEMDRIIRPQGFIIIRDENDTLSRIINLAPKFLWDVTTHMLENEESGTDQVLFCRKKFWAIV

SEQ ID NO: 18428 - protein, 402 aa, Zea mays subsp. mays
  peptide (1)..(402): Ceres Seq. ID no. 12361176
MTTNSTGDLRSAGVVQVLDVGCGVASFSAYLLPLDIRTMSFAPKDGHENQIQFALERGIGAMISVLATKQLPYPENSFEMVHCSRCRVDWHENDGILLKEVDRLLRPNGYFVYSAPPAYRKDKDFPVIWEKLVNITTTMCWKLIAKHVQTAIWVKPEDESCRQKNVDMNLLSICESNDNISPSWKIPLMNCVKLNKDKSNIQKLPSRSDRLSFYSKSLEIIGVAPERFEKNNQFWKNQVHKYWSFLHVEKTSIRNVMDMNANYGGFAAALSSDPVWIMNIVPYTMMNTLPVIYDRGLLGSYHDWCEPFSTYPRSYDLLHAFHLFSHYKRRKEDCLLEDIMLEMDRIIRPQGFIIIRDENDTLSRIINLAPKFLWDVTTHMLENEESGTDQVLFCRKKFWAIV

SEQ ID NO: 18429 - protein, 364 aa, Zea mays subsp. mays
  peptide (1)..(364): Ceres Seq. ID no. 12361177
MSFAPKDGHENQIQFALERGIGAMISVLATKQLPYPENSFEMVHCSRCRVDWHENDGILLKEVDRLLRPNGYFVYSAPPAYRKDKDFPVIWEKLVNITTTMCWKLIAKHVQTAIWVKPEDESCRQKNVDMNLLSICESNDNISPSWKIPLMNCVKLNKDKSNIQKLPSRSDRLSFYSKSLEIIGVAPERFEKNNQFWKNQVHKYWSFLHVEKTSIRNVMDMNANYGGFAAALSSDPVWIMNIVPYTMMNTLPVIYDRGLLGSYHDWCEPFSTYPRSYDLLHAFHLFSHYKRRKEDCLLEDIMLEMDRIIRPQGFIIIRDENDTLSRIINLAPKFLWDVTTHMLENEESGTDQVLFCRKKFWAIV

SEQ ID NO: 18430 - DNA, 2854 bp, Zea mays subsp. mays
  misc_feature (1)..(2854): Ceres Seq. ID no. 12417119
  misc_feature (1)..(2854): Ortholog of  Ceres SEQ ID NO 14302351 as cited in SEQ ID NO 66690
actcgtcaggcccttccgccgtcccggaggctcgaacccctcggcccgcggacgggaccctaaacccgccccaccactcgcgcggggttcgcccgcgacccatgcgcggcggcggctggtaccctcggcagccggcgatcgccggaaatctgcggggacagtgcggcggcttgcacgagtgccggacacggcgggagtggggaacgtaggggagatggcggcgggaggaaagggctgggcggagcgggtacgccgcggggcgaggaccgcttggttcatggtggccatggtggcctcgctgctcgtggcgtcgtcgccggcgctggtggcggcggtcgacatggcagtggcgctctggctcgaggcgcggctcggctgcttccgaggcgacggcctgcggggccacctccagcgctaccgttttcggaactcgcttgccgacatacctctcgtctccgtcgttcgatccatcgtcatcacctgtaagccctcccgctgcctgctaactcattgatgctttagaatgggcagatggcctaaaaaccaacccgttcgcttgagttcgatttccttttcttctactatttctcccctttgtggtttatttgctctggtgatgtagagagtgtttactgtttagaatcatttttttgggtgaggtcttagcttgagaagatcttttcgcattcctctatgaggatttggtgatctgaaagctacagtactcactacggctgtgcttgtcttcttttgcttgcacggagctttcggcggaatctgcgtgtatctgcagttattaatcacagagtatagctgttgcctgctctcttttcttgggaggtagttaaactaagcctgttgtttagctggacctggactggttgtaagaaattgggaacctctcgaataccaaattctgctctgttcttaatttgagggcaaagactaaccttatgttctgcggcttctgcaggtgtgtacctcatgtctgatacttctggcctctctcatggtccttaccttggaacaacaactttctgttccttggcttctctgctcatcttgttaattaaggcatctgtttatagtccggcgcaggacattgggcctgagctctcgccgtcgttaccagatcacaagctcaatctcaagaatctatggggaatgcctgtacttttcctgtcttccttggtgtttgctcttggccatgttattgttgcttacagaacaagcggcagggctcgacggaagcttctcattcaccgcattgaccctgaatcgattttagcatacaagaatgccttttctggatgctacaaggttccacggtctcctacaccatacagcggaaagctttttacaaggagtgaaagtgagactaagagaaaatcacttatccaggacgatcgtgatttgccaatcagttttcttgcagacagtgatagcatgttcattgcttgccaggggatcactatacactacaaagtttccgatccagcagccagcctaccttcatcccctggcttcttttcagagagagatactcatcacgatgtaatttcatcaagcatttctcctagaagacagaggcatgagagtccaccatctgcttcctctaatacccgtcgcgttctgaataggagctttagccatcaataccataatacttcgctatatgcaccactattggtagaaccagtggcatctccaactttgttggatgatattcctctgatgtgtattgatgatggcaatgctgatggatgtctgagtcatgtgggctttgaccttgaggctggagggcagggtaaattcgctgtagttttggtgcatggatttggagggggagtattctcgtggagacatgtttccaatttgttagctcgacaattgggatgcactgtgatggcatttgatcgcccaggatggggattaacatctcgacctcgtaggaaggactgggaagataagaagttaccgaatccatatgagctggagtctcaggttgatcttcttatttcattttgttcagagatgggcttgcactctgtggttttagttggtcatgatgatgggggcttgcttgccttgaaggctgcggagaagctgcgcacttatggaggtgacagagaggttgaagtgaagggagtagttcttattggtgtgagcttatcaagagaagtcattcctgcatttgctcgtatactcctgcatacacctctgaggaaaaagcacatggttcgaccacttctacgtactgaaatcgttcaagttatcaatcggcgggcatggtatgatgccacaaagttgacgacagaaatacttaacctatacaaggctccgctatttgttgagggctgggatgaagcacttcatgaagtaggccggctttcgttttctactgtcctgccatcaaaacgagcagcggatctactaagatcagtggaagaccttccggttctggtggtagcgggctccgaggatgctcttgtttctctgaagtcggcacaagccatggcttcgaaatttgtaaattctaggatagtaattatatcggggtgtggacatctgccgcacgaggagtgccccaaggcgttgctctcggctcttgctcctttcatctctacattggtaccctcagaagatttgttgcaaagactgtagaatatactcgttcctttttcgtttttttaagaacttttttctagctggtgagtttgtatgagcccattgtagcgcgaagtagtagtggagcctgacccaaaatctcaagggttcctagagctcccctgatttttttgtcacatgttaatggttccccctgaacgatttcaattaagcaagttgaatgtgt

SEQ ID NO: 18431 - protein, 559 aa, Zea mays subsp. mays
  peptide (1)..(559): Ceres Seq. ID no. 12417120
MSDTSGLSHGPYLGTTTFCSLASLLILLIKASVYSPAQDIGPELSPSLPDHKLNLKNLWGMPVLFLSSLVFALGHVIVAYRTSGRARRKLLIHRIDPESILAYKNAFSGCYKVPRSPTPYSGKLFTRSESETKRKSLIQDDRDLPISFLADSDSMFIACQGITIHYKVSDPAASLPSSPGFFSERDTHHDVISSSISPRRQRHESPPSASSNTRRVLNRSFSHQYHNTSLYAPLLVEPVASPTLLDDIPLMCIDDGNADGCLSHVGFDLEAGGQGKFAVVLVHGFGGGVFSWRHVSNLLARQLGCTVMAFDRPGWGLTSRPRRKDWEDKKLPNPYELESQVDLLISFCSEMGLHSVVLVGHDDGGLLALKAAEKLRTYGGDREVEVKGVVLIGVSLSREVIPAFARILLHTPLRKKHMVRPLLRTEIVQVINRRAWYDATKLTTEILNLYKAPLFVEGWDEALHEVGRLSFSTVLPSKRAADLLRSVEDLPVLVVAGSEDALVSLKSAQAMASKFVNSRIVIISGCGHLPHEECPKALLSALAPFISTLVPSEDLLQRL

SEQ ID NO: 18432 - protein, 499 aa, Zea mays subsp. mays
  peptide (1)..(499): Ceres Seq. ID no. 12417121
MPVLFLSSLVFALGHVIVAYRTSGRARRKLLIHRIDPESILAYKNAFSGCYKVPRSPTPYSGKLFTRSESETKRKSLIQDDRDLPISFLADSDSMFIACQGITIHYKVSDPAASLPSSPGFFSERDTHHDVISSSISPRRQRHESPPSASSNTRRVLNRSFSHQYHNTSLYAPLLVEPVASPTLLDDIPLMCIDDGNADGCLSHVGFDLEAGGQGKFAVVLVHGFGGGVFSWRHVSNLLARQLGCTVMAFDRPGWGLTSRPRRKDWEDKKLPNPYELESQVDLLISFCSEMGLHSVVLVGHDDGGLLALKAAEKLRTYGGDREVEVKGVVLIGVSLSREVIPAFARILLHTPLRKKHMVRPLLRTEIVQVINRRAWYDATKLTTEILNLYKAPLFVEGWDEALHEVGRLSFSTVLPSKRAADLLRSVEDLPVLVVAGSEDALVSLKSAQAMASKFVNSRIVIISGCGHLPHEECPKALLSALAPFISTLVPSEDLLQRL

SEQ ID NO: 18433 - protein, 405 aa, Zea mays subsp. mays
  peptide (1)..(405): Ceres Seq. ID no. 12417122
MFIACQGITIHYKVSDPAASLPSSPGFFSERDTHHDVISSSISPRRQRHESPPSASSNTRRVLNRSFSHQYHNTSLYAPLLVEPVASPTLLDDIPLMCIDDGNADGCLSHVGFDLEAGGQGKFAVVLVHGFGGGVFSWRHVSNLLARQLGCTVMAFDRPGWGLTSRPRRKDWEDKKLPNPYELESQVDLLISFCSEMGLHSVVLVGHDDGGLLALKAAEKLRTYGGDREVEVKGVVLIGVSLSREVIPAFARILLHTPLRKKHMVRPLLRTEIVQVINRRAWYDATKLTTEILNLYKAPLFVEGWDEALHEVGRLSFSTVLPSKRAADLLRSVEDLPVLVVAGSEDALVSLKSAQAMASKFVNSRIVIISGCGHLPHEECPKALLSALAPFISTLVPSEDLLQRL

SEQ ID NO: 18434 - DNA, 1311 bp, Zea mays subsp. mays
  misc_feature (1)..(1311): Ceres Seq. ID no. 12417377
  misc_feature (1)..(1311): Ortholog of  Ceres SEQ ID NO 13655598 as cited in SEQ ID NO 64077
  misc_feature (1)..(1311): Ortholog of  Ceres SEQ ID NO 15180408 as cited in SEQ ID NO 0
gcacgagaccattacctagaacatcctaatcaaaaagtcccacccctcctgcatttcaataatatctccctgcgcttttcctagccctttgtcatccaaggaaacaataaacaaccggcgcttttacacccccgccaagaacaggagcaacaacaacaaggctcctcgcaacaatccattctcatccatggcgaagctcatgaacaagctggtcgattcgttcgagcacgacgagataccggacgtcggctgcgtgcgcgccgtgctggccgagctcgtcctcaccttcctcttcgtcttcaccggcgtctccgccgccatggccgccggatccgacgggaagcccggcgacgctatgccgatggcgacgctggcggcggtggctatcgcgcacgcgctggccgctggcgtcctggtgacggccgggttccacgtctccggcggccacctgaaccccgcggtgacggtggggctcatggtgcgcggccacatcaccaagctccgggcggtgctgtacgtcgccgcccagctgctggcctcctccgccgcctgcgtcctcctccgcttcctcagcggcggcatggtgaccccggtgcacgccctgggcaggggcatcagccccgatgcagggcctggtgatggaggtgatcctcaccttctccctgctcttcgtcacctacgccatgatcctggacccgcagccaggtccgcgccatcggcccgctgctgacgggcctcatcgtcggcgccaacagcctcgccggcggcaacttcaccggcgcgtccatgaacccggcacgctccttcggcccggccctggccaccggggactggacaaaccactgggtctactggatcggcccgctgctcggtgggcccctggcaggcttcgtgtacgagtcgctgttcctggtgcagaagatgcacgagccgctgctcaatggggaagtctgacgaccatcagcaccttcatgcttgtttctgtaaaacaggtcattatctgcaagcatggtacatacattggccaaggtaattagagaggcttgctgtaaagcagtaggattgctggctgtagaaattgttgatgggctttttttgggggtttcctgccaaggaattctttcttttatataatctcaaaaaagtttttttttttggtatgggctgggttctatcaagggtttgttaaggctattagtttaccatgtagcagaaaaactagtgggacgtgaagttttttcacgtacattgtaatactttggtatttttgtctaccagatgaaactggaagtacagagcaaaaacttctct

SEQ ID NO: 18435 - protein, 180 aa, Zea mays subsp. mays
  peptide (1)..(180): Ceres Seq. ID no. 12417378
MAKLMNKLVDSFEHDEIPDVGCVRAVLAELVLTFLFVFTGVSAAMAAGSDGKPGDAMPMATLAAVAIAHALAAGVLVTAGFHVSGGHLNPAVTVGLMVRGHITKLRAVLYVAAQLLASSAACVLLRFLSGGMVTPVHALGRGISPDAGPGDGGDPHLLPALRHLRHDPGPAARSAPSARC

SEQ ID NO: 18436 - protein, 176 aa, Zea mays subsp. mays
  peptide (1)..(176): Ceres Seq. ID no. 12417379
MNKLVDSFEHDEIPDVGCVRAVLAELVLTFLFVFTGVSAAMAAGSDGKPGDAMPMATLAAVAIAHALAAGVLVTAGFHVSGGHLNPAVTVGLMVRGHITKLRAVLYVAAQLLASSAACVLLRFLSGGMVTPVHALGRGISPDAGPGDGGDPHLLPALRHLRHDPGPAARSAPSARC

SEQ ID NO: 18437 - protein, 137 aa, Zea mays subsp. mays
  peptide (1)..(137): Ceres Seq. ID no. 12417380
MQGLVMEVILTFSLLFVTYAMILDPQPGPRHRPAADGPHRRRQQPRRRQLHRRVHEPGTLLRPGPGHRGLDKPLGLLDRPAARWAPGRLRVRVAVPGAEDARAAAQWGSLTTISTFMLVSVKQVIICKHGTYIGQGN

SEQ ID NO: 18438 - DNA, 2625 bp, Zea mays subsp. mays
  misc_feature (1)..(2625): Ceres Seq. ID no. 12366382
  misc_feature (1)..(2625): Ortholog of  Ceres SEQ ID NO 15177678 as cited in SEQ ID NO 0
gcacgagaccattacctagaacatcctaatctaaaagatagagaaatgagcttcgctgttcgagaaaacagcagagcccggccgaattcgttgggcagcctgcggagatgcagtagaggccgccaggcgcagatggaatgagcgaccgggctctgctccgccgctagcctgccgccgcaccgcgccgtcgatcgccgcgccatgaacggtccccgcggctaccccctttctccaccggcaccttacccccgtatggcgtgatccaatgatagcaccaagagcgcaccttcccctctccctgacggcgtcgtcctccccgcacggcggcgcgcgcacccgcaccaagaagaggaagaaaccatgtcccccaacctggacagcgccatcaagatccaggtgccggcgctgctcctgaggcgtctcttcggcgcgtcccggcgggacgaggccaagcagctccagcggaccccggcgccggtggggaggcggcgggtgtttgtgcagacgggagaccggctgcgtgctcggcatggacctggaccgcggggacaacgcgcacaccgtcaagcgccggctgcagctcgcgctcaacatgcccaccggcgggacctcgctcaccttcggcgatcgcctcctggagaacgacctgtccttcatacgcccggactcgccgctgctgctcacccggaacagcatcaaccggagctgctccaccccgtgcctctgccccgtctccaaggacttcgagcacaaggactgcagcggactggttgagatgctcggctgttccagcagctgtgcccgggtgaagcgcctcgtggacgacgtggtgactgccatcaggagcggcgtggatccggtccccattagcagcggccttggtggctcgtactacttcaggaacgtcttgggcgacagggttgctattgtgaagccgacggacgaggagccctttgcgccaaacaatcccaaggggttcgtcgggagggcgctcggtcagccgggcctcaagagatctgtgcgagtgggagagacggggtttagggaggttgcggcattcctgttggaccatgacaacttcgccaacgttcctgccacggctctggtgaagataacacactccattttcaacataaactgcccggtaaatggaggaaacctggcaccggctcatgaccagcaacagcaagttaacagcaagattgcttcgttccagcagttcatagcccatgacttcgacgccagcgaccatggcacgtcaagcttccctgtcgctgctgttcataggatcggcatactagatatccggattttcaacactgacaggcacgccggcaatgtgctggtgaggaagcttaacggtggcacaggccgctttggttgccagacagagctgttcccaattgatcatggcatgtgcttgccggagaacttggaggacccttacttcgagtggatccattgggctcaggcttctattccgttctctgaggaagagctcgagtacatcagaaatcttgatccaaggaaagatgtgcagatgctgcgccgggaacttccgatgatacgtgaggcctgcctacatgtactggccctgtgcacaatcttccttaaggaggctgcagctttcggactctgcttggccgagataggcgagatgatgaccagggagttcagagggatggaggaggaaccaagccagctggaggttatgtgtatggaggccaggaagagagtagcagagtgggagcccttctctgccacggctgaacatggagaagataccgatttccagttctcggtggatatgctaggagaatacagtgatgtagtgcgatcaccgaggttcaatggctcaggttccaaggtgtccagtttcagaagccctttgtctaagctcgtcgagagtgtcgacgagggcagtgatggccatgaagatcaaaacgagtctgatcgagtcttgtatgctggatggaatacatccagcgttcctagcaaagctatgggccatagtggcaatgcctcaaaaagtgcaatgaacaggagtgccgatgaacaacttccatcaagtatgtgttttgtcaggctgtcggatatgagtgcagatgagtgggatgtattcctcgaaaaattccaggagctgctgaaagaggcactgcacgagagcgcaagggcagcagtaggtcaaaggatgaagcagcggctgggcacttcatgcaagttttgagcagggcaatagcgcatcagagaagaaaaaaatgcagtgctacttgtactgcttgcttatggagtgagtacaggatgaagatatcatcgtatgtggcaccttcaaccttgtgcaacgatctaggttgcagcagccatgtccagcaggtagataggaccacaagcatatgtagtgacggtgtggagaactgctacgcgtgtttattagctatatgtttacgaaggggaatgcttaataataaatgtttgtcagcctgtgtatattggcttgatgttagatactccagctttagcatgcaatttcttagtcgctgaaaattctttgtagcttgtgatgtgacctgtgagcagtgtaaacgttgcacctttgatggaaaaataatgcttacctgttgttgt

SEQ ID NO: 18439 - protein, 565 aa, Zea mays subsp. mays
  peptide (1)..(565): Ceres Seq. ID no. 12366383
MDLDRGDNAHTVKRRLQLALNMPTGGTSLTFGDRLLENDLSFIRPDSPLLLTRNSINRSCSTPCLCPVSKDFEHKDCSGLVEMLGCSSSCARVKRLVDDVVTAIRSGVDPVPISSGLGGSYYFRNVLGDRVAIVKPTDEEPFAPNNPKGFVGRALGQPGLKRSVRVGETGFREVAAFLLDHDNFANVPATALVKITHSIFNINCPVNGGNLAPAHDQQQQVNSKIASFQQFIAHDFDASDHGTSSFPVAAVHRIGILDIRIFNTDRHAGNVLVRKLNGGTGRFGCQTELFPIDHGMCLPENLEDPYFEWIHWAQASIPFSEEELEYIRNLDPRKDVQMLRRELPMIREACLHVLALCTIFLKEAAAFGLCLAEIGEMMTREFRGMEEEPSQLEVMCMEARKRVAEWEPFSATAEHGEDTDFQFSVDMLGEYSDVVRSPRFNGSGSKVSSFRSPLSKLVESVDEGSDGHEDQNESDRVLYAGWNTSSVPSKAMGHSGNASKSAMNRSADEQLPSSMCFVRLSDMSADEWDVFLEKFQELLKEALHESARAAVGQRMKQRLGTSCKF

SEQ ID NO: 18440 - protein, 544 aa, Zea mays subsp. mays
  peptide (1)..(544): Ceres Seq. ID no. 12366384
MPTGGTSLTFGDRLLENDLSFIRPDSPLLLTRNSINRSCSTPCLCPVSKDFEHKDCSGLVEMLGCSSSCARVKRLVDDVVTAIRSGVDPVPISSGLGGSYYFRNVLGDRVAIVKPTDEEPFAPNNPKGFVGRALGQPGLKRSVRVGETGFREVAAFLLDHDNFANVPATALVKITHSIFNINCPVNGGNLAPAHDQQQQVNSKIASFQQFIAHDFDASDHGTSSFPVAAVHRIGILDIRIFNTDRHAGNVLVRKLNGGTGRFGCQTELFPIDHGMCLPENLEDPYFEWIHWAQASIPFSEEELEYIRNLDPRKDVQMLRRELPMIREACLHVLALCTIFLKEAAAFGLCLAEIGEMMTREFRGMEEEPSQLEVMCMEARKRVAEWEPFSATAEHGEDTDFQFSVDMLGEYSDVVRSPRFNGSGSKVSSFRSPLSKLVESVDEGSDGHEDQNESDRVLYAGWNTSSVPSKAMGHSGNASKSAMNRSADEQLPSSMCFVRLSDMSADEWDVFLEKFQELLKEALHESARAAVGQRMKQRLGTSCKF

SEQ ID NO: 18441 - protein, 483 aa, Zea mays subsp. mays
  peptide (1)..(483): Ceres Seq. ID no. 12366385
MLGCSSSCARVKRLVDDVVTAIRSGVDPVPISSGLGGSYYFRNVLGDRVAIVKPTDEEPFAPNNPKGFVGRALGQPGLKRSVRVGETGFREVAAFLLDHDNFANVPATALVKITHSIFNINCPVNGGNLAPAHDQQQQVNSKIASFQQFIAHDFDASDHGTSSFPVAAVHRIGILDIRIFNTDRHAGNVLVRKLNGGTGRFGCQTELFPIDHGMCLPENLEDPYFEWIHWAQASIPFSEEELEYIRNLDPRKDVQMLRRELPMIREACLHVLALCTIFLKEAAAFGLCLAEIGEMMTREFRGMEEEPSQLEVMCMEARKRVAEWEPFSATAEHGEDTDFQFSVDMLGEYSDVVRSPRFNGSGSKVSSFRSPLSKLVESVDEGSDGHEDQNESDRVLYAGWNTSSVPSKAMGHSGNASKSAMNRSADEQLPSSMCFVRLSDMSADEWDVFLEKFQELLKEALHESARAAVGQRMKQRLGTSCKF

SEQ ID NO: 18442 - DNA, 2424 bp, Zea mays subsp. mays
  misc_feature (1)..(2424): Ceres Seq. ID no. 12375124
  misc_feature (1)..(2424): Ortholog of  Ceres SEQ ID NO 13593946 as cited in SEQ ID NO 59535
gcacgagaccattacctagaacatcctaatcgaaaaagtttctcgttcccggcgtggtgtggcctggccactggccacccgtgccctatcctcttccgcacggcgtcctatatataaggaaaggaaaaatctgccactccacacgcgctcctctctcgccgtcgccaaccatcgccgcctcgcgtccggacccgccgttcctccgaggaaatggctgcactgcaaccctcattttcaccagcaatgactttgaagagtagctgcagcgccctgaagttcccaaaaactgcactgttatctggttttggtggcattccacgccttcaagatgcgcaagacaggaacactagcgtcgcttatttgatccccaaggctgcttcagtgactgaccagtcaatagcagagccaccaaaaaccaagcaaaataggcacacagtcgacccaacagctccagaatttctgccactcccatcttttgaagaatgctttccaaggagtaccaaagaatcaagtgaaatcatccacgaggaatcaggtcatgtcctcaaggttccattccggagagtccatttgactggagatcagaagcactttgatacatatgacaccagcggtcctcaaaatataagcccaaggattggactcccaaagataaggaaggaatggattgataggagggaaaagctgggtagtcctcggtacacacaaatgtattatgctaaacagggaattgtaacagaggagatgttatactgtgccagccgtgagaaccttagtcctgaatttgttcggacagaagttgcccgtggacgagccataattccttccaacaagaggcacctggaattggaacccatgattgttggaagaaacttccttgtaaaggtgaatgcaaatattgggaattcagctgttgtgagctccattgaggaggaagttcacaagctccagtgggccacgatgtggggagctgatactgtcatggacctttcaacagggcgacatatccatgagacgcgggaatggattattcgcaactctccggttcctattgggactgttcctatttaccaagcacttgagaaagtaaatggtattgctgaaaatctgagctgggaaatttttagggataccttgattgaacaagctgagcagggcgttgattacttcacaatccatgctggtgtcctgcttcgttacattcctcttacagcaaagagaatgacgggcatagtttcacgtggtggctcaatccatgcaaaatggtgcttaacttatcacaaggagaactttgcatatgaacattgggatgacattcttgacatatgcaatcagtatgatgtggcattatcaattggtgatggtttgaggcctggttccatttatgatgcaaatgatagtgcacagtttgcagaactgctgactcaaggtgaactaacacgtcgagcatgggcgaaagatgtgcaggtaatgaatgaaggcccgggtcacatcccaatgcataaaattcctgaaaacatggagaaacagttggagtggtgtaatgaagcgcctttctatacattgggtcctttgacaactgatattgcacctggttatgatcacatcacttcagccattggtgctgccaacattggagctcttggcactgcacttctttgctatgtaacaccaaaggagcaccttgggttgcccaatcgtgatgatgtcaagactggtgtaatatcctacaaaatttctgctcatgctgctgatttggcgaagggtcatccctatgcacaagcttgggatgatgcacttagcaaggcaaggtttgagtttagatggcttgaccaatttgctttatctctggatccagtaactgctatggctttccatgatgaaacattgccctctgagggtgccaaagtggcacatttctgctcaatgtgtgggcccaagttttgttcaatgaaaatcacggaggatatcaggaagtatgctgatgaaaatggttatggaacagtagaggaagctgtgatacaaggaatgaatgctatgagtgctgaatttttggctgcaaggaaaacaattagtggggaacaacatggtgaagcaggaggggagatctatgtaccagaaagctatgcagctcagaaataaggtttcctcggagccatccattctaaatgaggctaaggcatcagcagctgttctggctagtggctaaggcatcagcagctgttctaccatcttatctaatgagatggtaagcagtatgtgaataaagctggtgttgcttaccttcagtttgtgaatgccattatgtactgtaataaaaaactctgtattgtactccctagcattatcattatgcttttgtcttctttgtatcacaatgggattgttagtgatgaaaattgcaccaggggtgcctgtgttctc

SEQ ID NO: 18443 - protein, 643 aa, Zea mays subsp. mays
  peptide (1)..(643): Ceres Seq. ID no. 12375125
MAALQPSFSPAMTLKSSCSALKFPKTALLSGFGGIPRLQDAQDRNTSVAYLIPKAASVTDQSIAEPPKTKQNRHTVDPTAPEFLPLPSFEECFPRSTKESSEIIHEESGHVLKVPFRRVHLTGDQKHFDTYDTSGPQNISPRIGLPKIRKEWIDRREKLGSPRYTQMYYAKQGIVTEEMLYCASRENLSPEFVRTEVARGRAIIPSNKRHLELEPMIVGRNFLVKVNANIGNSAVVSSIEEEVHKLQWATMWGADTVMDLSTGRHIHETREWIIRNSPVPIGTVPIYQALEKVNGIAENLSWEIFRDTLIEQAEQGVDYFTIHAGVLLRYIPLTAKRMTGIVSRGGSIHAKWCLTYHKENFAYEHWDDILDICNQYDVALSIGDGLRPGSIYDANDSAQFAELLTQGELTRRAWAKDVQVMNEGPGHIPMHKIPENMEKQLEWCNEAPFYTLGPLTTDIAPGYDHITSAIGAANIGALGTALLCYVTPKEHLGLPNRDDVKTGVISYKISAHAADLAKGHPYAQAWDDALSKARFEFRWLDQFALSLDPVTAMAFHDETLPSEGAKVAHFCSMCGPKFCSMKITEDIRKYADENGYGTVEEAVIQGMNAMSAEFLAARKTISGEQHGEAGGEIYVPESYAAQK

SEQ ID NO: 18444 - protein, 632 aa, Zea mays subsp. mays
  peptide (1)..(632): Ceres Seq. ID no. 12375126
MTLKSSCSALKFPKTALLSGFGGIPRLQDAQDRNTSVAYLIPKAASVTDQSIAEPPKTKQNRHTVDPTAPEFLPLPSFEECFPRSTKESSEIIHEESGHVLKVPFRRVHLTGDQKHFDTYDTSGPQNISPRIGLPKIRKEWIDRREKLGSPRYTQMYYAKQGIVTEEMLYCASRENLSPEFVRTEVARGRAIIPSNKRHLELEPMIVGRNFLVKVNANIGNSAVVSSIEEEVHKLQWATMWGADTVMDLSTGRHIHETREWIIRNSPVPIGTVPIYQALEKVNGIAENLSWEIFRDTLIEQAEQGVDYFTIHAGVLLRYIPLTAKRMTGIVSRGGSIHAKWCLTYHKENFAYEHWDDILDICNQYDVALSIGDGLRPGSIYDANDSAQFAELLTQGELTRRAWAKDVQVMNEGPGHIPMHKIPENMEKQLEWCNEAPFYTLGPLTTDIAPGYDHITSAIGAANIGALGTALLCYVTPKEHLGLPNRDDVKTGVISYKISAHAADLAKGHPYAQAWDDALSKARFEFRWLDQFALSLDPVTAMAFHDETLPSEGAKVAHFCSMCGPKFCSMKITEDIRKYADENGYGTVEEAVIQGMNAMSAEFLAARKTISGEQHGEAGGEIYVPESYAAQK

SEQ ID NO: 18445 - protein, 477 aa, Zea mays subsp. mays
  peptide (1)..(477): Ceres Seq. ID no. 12375127
MYYAKQGIVTEEMLYCASRENLSPEFVRTEVARGRAIIPSNKRHLELEPMIVGRNFLVKVNANIGNSAVVSSIEEEVHKLQWATMWGADTVMDLSTGRHIHETREWIIRNSPVPIGTVPIYQALEKVNGIAENLSWEIFRDTLIEQAEQGVDYFTIHAGVLLRYIPLTAKRMTGIVSRGGSIHAKWCLTYHKENFAYEHWDDILDICNQYDVALSIGDGLRPGSIYDANDSAQFAELLTQGELTRRAWAKDVQVMNEGPGHIPMHKIPENMEKQLEWCNEAPFYTLGPLTTDIAPGYDHITSAIGAANIGALGTALLCYVTPKEHLGLPNRDDVKTGVISYKISAHAADLAKGHPYAQAWDDALSKARFEFRWLDQFALSLDPVTAMAFHDETLPSEGAKVAHFCSMCGPKFCSMKITEDIRKYADENGYGTVEEAVIQGMNAMSAEFLAARKTISGEQHGEAGGEIYVPESYAAQK

SEQ ID NO: 18446 - DNA, 2341 bp, Zea mays subsp. mays
  misc_feature (1)..(2341): Ceres Seq. ID no. 12375114
  misc_feature (1)..(2341): Ortholog of  Ceres SEQ ID NO 12611435 as cited in SEQ ID NO 56451
gcacgagaccattacctagaacatcctaatcaaaaagaacgacggtccaaaattttccctacccaaccccctctacccatcctgtcccgttccgctccgccgccgccgtcgaccgcacgagatgccgccggccgaggacgccccaccgcagaccccccctcccgcgcgctggacggcggccgggtcgcgggtgctgctgcagtctccgcctccagcgttcccgctcggatccaatgatgaccagcaagaacgcgcccgcgcccgcgcggcggcgcgtgccgcctccgtccgccgccgatccctcgccgcctccattgcgccctccaaggacccgcgccacgacctcctcaaccgcgagcaggtcatggacctcttccataactgtatcaagctcgcatcggagaacaaaattaaccagaagaacacgtgggagctaggcctaatcgatcatctcagcgagatcatccaagcgggggtggacgaggacgaggagaccaactttcagaaggcaagctgcacactggaggcgggggtcaagatatattcacttcgtgtggattcagtgcactccgaggcttacaaggtgcttggtgggataaaccgtgccggaaggggtgaagaggctgatttggaggaaggcagcaatgttgaacctgcacaggatgaagcaatcaataaaaaggatgctgataggaggatttcacctgcttcaacgttggagtcgtcatttgaggctctcaatgtaaagaaatttgatgttgctttcacggtggatcctctataccatcaaactaccgctcagtttgatgaaggtggggcaaagggccttttgttgtataaccttggagtttatggtagctgccgtgtgctgttcgattcatttgaagctccagacaaatgcatcttaagtgatatgcaaactgagcaggctgagacaattgacctttcatttgctaaagagcaaattgaggaaatggtcactcaaatgcgtctatgtaatgatatttctccaaccctgagggatattgttgctcaatttgatgaagaaaaccaaaggccatcacataggttatctcctggtcaaatgccagtaatggaagatcagatggatgatggtaatgaagcagacgataacgatagcatgctacctgattctggaacttgggattttggtgattgtcatgaccatgaggatacatatgatcaaaactgtaatccaatggattccatctcaacaaactttcaagaggaattcaatgaatacactgttgagattcctcagggtactattgtaaacgatagagttgacaaaattgcatctcttgtgttacttggcatggcctcatcaaaagcaaatgcttgggcaggacctgagcactggaaatatcggaaagctaaagatttggaggctgctccaacttcatcaggtgattcagaaataacaaataagataaagaaaagaaccaaggataaacctgacattggtttcacaaaagcattggacaatgagcttccaaatatcttcgcggctcccaaaaatccaaagacattactgtttcctgcaaacagggctatttgcagcaataaacttccagaagattgccattaccggcctgaaagccttgttaaattatttcttctcccagatgttttgtgtcttgctaagagaagaaaatcacttgatgctccagtggataataatgatgactttatcccatctgaaccttgggaagatgacaacttttgcaatgaccacattgatgaaggacatgtgtgtagtgatgtagaagagccagtaaatcttatcaataaaccgagacaggtcaacaagattgatatacagtatgacaaggtatcaaaacaagtggatgttcatgctttaaaagaagtgctttggaatcacatccatgcatctgctgagactggtcaggaaagagaggaacctggaccaccgctgcgcctatctcaggtgttacatgaccttccaagcagcagcccagatgctgtagcaactgatatttcgccacacctgtatttcatctgccttctgcatctggcaaatgagcacaacttgaagctctgtgatcgccccatgttggatgaaatagacatatacatgccgccgacttcaccgcttgtgaagtgaaccatgctgtaccggagatgctagtcttttttattttgtttattgttgaccggcctaaaccaacgccatgattattgggtagtgatctctgattgttgctaaggtgcccgtcgtgacatgctcagctcactgatgtaacttgaaaaatgaaacttcatatattttttaaagtagtgatgctcggaacgatactgc

SEQ ID NO: 18447 - protein, 674 aa, Zea mays subsp. mays
  peptide (1)..(674): Ceres Seq. ID no. 12375115
MPPAEDAPPQTPPPARWTAAGSRVLLQSPPPAFPLGSNDDQQERARARAAARAASVRRRSLAASIAPSKDPRHDLLNREQVMDLFHNCIKLASENKINQKNTWELGLIDHLSEIIQAGVDEDEETNFQKASCTLEAGVKIYSLRVDSVHSEAYKVLGGINRAGRGEEADLEEGSNVEPAQDEAINKKDADRRISPASTLESSFEALNVKKFDVAFTVDPLYHQTTAQFDEGGAKGLLLYNLGVYGSCRVLFDSFEAPDKCILSDMQTEQAETIDLSFAKEQIEEMVTQMRLCNDISPTLRDIVAQFDEENQRPSHRLSPGQMPVMEDQMDDGNEADDNDSMLPDSGTWDFGDCHDHEDTYDQNCNPMDSISTNFQEEFNEYTVEIPQGTIVNDRVDKIASLVLLGMASSKANAWAGPEHWKYRKAKDLEAAPTSSGDSEITNKIKKRTKDKPDIGFTKALDNELPNIFAAPKNPKTLLFPANRAICSNKLPEDCHYRPESLVKLFLLPDVLCLAKRRKSLDAPVDNNDDFIPSEPWEDDNFCNDHIDEGHVCSDVEEPVNLINKPRQVNKIDIQYDKVSKQVDVHALKEVLWNHIHASAETGQEREEPGPPLRLSQVLHDLPSSSPDAVATDISPHLYFICLLHLANEHNLKLCDRPMLDEIDIYMPPTSPLVK

SEQ ID NO: 18448 - protein, 593 aa, Zea mays subsp. mays
  peptide (1)..(593): Ceres Seq. ID no. 12375116
MDLFHNCIKLASENKINQKNTWELGLIDHLSEIIQAGVDEDEETNFQKASCTLEAGVKIYSLRVDSVHSEAYKVLGGINRAGRGEEADLEEGSNVEPAQDEAINKKDADRRISPASTLESSFEALNVKKFDVAFTVDPLYHQTTAQFDEGGAKGLLLYNLGVYGSCRVLFDSFEAPDKCILSDMQTEQAETIDLSFAKEQIEEMVTQMRLCNDISPTLRDIVAQFDEENQRPSHRLSPGQMPVMEDQMDDGNEADDNDSMLPDSGTWDFGDCHDHEDTYDQNCNPMDSISTNFQEEFNEYTVEIPQGTIVNDRVDKIASLVLLGMASSKANAWAGPEHWKYRKAKDLEAAPTSSGDSEITNKIKKRTKDKPDIGFTKALDNELPNIFAAPKNPKTLLFPANRAICSNKLPEDCHYRPESLVKLFLLPDVLCLAKRRKSLDAPVDNNDDFIPSEPWEDDNFCNDHIDEGHVCSDVEEPVNLINKPRQVNKIDIQYDKVSKQVDVHALKEVLWNHIHASAETGQEREEPGPPLRLSQVLHDLPSSSPDAVATDISPHLYFICLLHLANEHNLKLCDRPMLDEIDIYMPPTSPLVK

SEQ ID NO: 18449 - protein, 410 aa, Zea mays subsp. mays
  peptide (1)..(410): Ceres Seq. ID no. 12375117
MQTEQAETIDLSFAKEQIEEMVTQMRLCNDISPTLRDIVAQFDEENQRPSHRLSPGQMPVMEDQMDDGNEADDNDSMLPDSGTWDFGDCHDHEDTYDQNCNPMDSISTNFQEEFNEYTVEIPQGTIVNDRVDKIASLVLLGMASSKANAWAGPEHWKYRKAKDLEAAPTSSGDSEITNKIKKRTKDKPDIGFTKALDNELPNIFAAPKNPKTLLFPANRAICSNKLPEDCHYRPESLVKLFLLPDVLCLAKRRKSLDAPVDNNDDFIPSEPWEDDNFCNDHIDEGHVCSDVEEPVNLINKPRQVNKIDIQYDKVSKQVDVHALKEVLWNHIHASAETGQEREEPGPPLRLSQVLHDLPSSSPDAVATDISPHLYFICLLHLANEHNLKLCDRPMLDEIDIYMPPTSPLVK

SEQ ID NO: 18450 - DNA, 748 bp, Zea mays subsp. mays
  misc_feature (1)..(748): Ceres Seq. ID no. 12363969
  misc_feature (1)..(748): Ortholog of  Ceres SEQ ID NO 13662695 as cited in SEQ ID NO 61290
gcacgagaccattacctagaacatcctaatcgaaaactccccaacagtttcattcctcgagggggatcgcttgtcggcggggaagcaaagcttagttcttgacgcccaacctccccgttgcctattcgcctcaggaatttgggaattatgtctctttgaggggaatcaagggacttgcttttacttgtctgggctccatgtctaagtgggagccagtcacgtttcaggaatctcttagctttgttaagaaagtaaaggcacgtgactacatgctatacatatcattgctcgatgtgctcaaccggaatgatcaaatccctctgcaagcttacagcgagctctcgcttctgtttcagcatcacgaagatctgttagcggagctgtcgaagttcaggcccctcccatgcccaaacaacgtttatacacacggctcgatttggatgatcatattcctcatgccttttctgctcctgagccttgtcctcgccttgagaagccattgaagtgtttcctgctccatagactgttgcgagcctaaatgatttgtcgtagcactaacacctagttgttgtatatagatatatggatggggttctatatcctgtaatttctttatgatctccttgtacgctcgtgcgcacggaaataatcgtacaatattatttcagtcgcggcagtctggcagtatgtaaagcctaaacagagatcgtttgacctcgtccaatcggaaattcagctttgtacaggg

SEQ ID NO: 18451 - protein, 101 aa, Zea mays subsp. mays
  peptide (1)..(101): Ceres Seq. ID no. 12363970
MSKWEPVTFQESLSFVKKVKARDYMLYISLLDVLNRNDQIPLQAYSELSLLFQHHEDLLAELSKFRPLPCPNNVYTHGSIWMIIFLMPFLLLSLVLALRSH

SEQ ID NO: 18452 - protein, 77 aa, Zea mays subsp. mays
  peptide (1)..(77): Ceres Seq. ID no. 12363971
MLYISLLDVLNRNDQIPLQAYSELSLLFQHHEDLLAELSKFRPLPCPNNVYTHGSIWMIIFLMPFLLLSLVLALRSH

SEQ ID NO: 18453 - DNA, 779 bp, Zea mays subsp. mays
  misc_feature (1)..(779): Ceres Seq. ID no. 12363972
  misc_feature (1)..(779): Ortholog of  Ceres SEQ ID NO 12638267 as cited in SEQ ID NO 0
gcacgagaccattacctagaacatcctaatcaaaagcctttttaccctcgtcctcgtgtgatctaccacttttcttctcgcgtgactctctcacagtctcactcacgcagtcacgcggctcacgccccaccccccaccaggccaccacaccgctctcttcttcaccaccgcgaaagcgagagagggagagagagcaggcagcggcaatggctggcgctggggacgagtactactacggcgggccggggcaggggcaggggccgcgcggcgccccacacggcctgctgctggcggtggtggtgggcctcgtggtggcgggcccgctgtttctgggcgacggcggcgaggcgctgacggaggccgtggcggagctgctgagcccggtcgggctgcttctcctccccgtgtgcctgctgttcctcatccgcctcctctcctccgaccgcggcgccgcggcgctcgccgacgtcttcgccttcggcgggtcccccgacgccgtccaccgcgtcggagggtcccccgtcggcgtcgcgctcatgctcctcctcatcctcgcgctgctctactaccgctcctcgctcttcggcggcggcggcgacgacgacgagtaggagaccggcggcgcgatctccggccgtggcgtggcgttgtttttgtgtaatgcgaggggcgtgggtgcaaaagtgcgtgtgtaaatcgagtggatcggagtaaattaatctaatttactcctttgctaatgcttcgtctgtttgtaaatcgatggctcctgaagctcc

SEQ ID NO: 18454 - protein, 134 aa, Zea mays subsp. mays
  peptide (1)..(134): Ceres Seq. ID no. 12363973
MAGAGDEYYYGGPGQGQGPRGAPHGLLLAVVVGLVVAGPLFLGDGGEALTEAVAELLSPVGLLLLPVCLLFLIRLLSSDRGAAALADVFAFGGSPDAVHRVGGSPVGVALMLLLILALLYYRSSLFGGGGDDDE

SEQ ID NO: 18455 - protein, 117 aa, Zea mays subsp. mays
  peptide (1)..(117): Ceres Seq. ID no. 12363974
ARDHYLEHPNQKPFYPRPRVIYHFSSRVTLSQSHSRSHAAHAPPPTRPPHRSLLHHRESERGRESRQRQWLALGTSTTTAGRGRGRGRAAPHTACCWRWWWASWWRARCFWATAARR

SEQ ID NO: 18456 - DNA, 584 bp, Zea mays subsp. mays
  misc_feature (1)..(584): Ceres Seq. ID no. 12418092
  misc_feature (1)..(584): Ortholog of  Ceres SEQ ID NO 15224908 as cited in SEQ ID NO 67263
caaaatttcgtgccgttgtctttgtcttttctgccatttctcccgaatgattcttccgtggattggagcagagcactaagctcattgagccaaaatacaaaggaacagctgaggaatgcgtccacctgggtgtacccttcagtcagttttgattctgttcagaaatctgtaaccctcttcatgccaggctttgataagtctgaaatcaagctatatcaatatagaggtggatcagaactgttgatcgaagctggagatcagaggcgcgtcataaaattgccacttacgatgcagggaaaggtccaaggtgccaaattcgttgacaggaacctcgttgttagcatccggtagcagaatcgctggcgccggctgccggctgggattggagcaccccacttcagattggcagtttactgccgactaatgagcaggatcatcgggattgcatgtctgtttctgttcgtagcctgaattttgtggtgctgtttgtttcaactttcagccagagtgaagctgcatagtcctattattttttgaagaggttcgcgatactcgagtaaatagtaaactggcagttttttgcc

SEQ ID NO: 18457 - protein, 116 aa, Zea mays subsp. mays
  peptide (1)..(116): Ceres Seq. ID no. 12418093
QNFVPLSLSFLPFLPNDSSVDWSRALSSLSQNTKEQLRNASTWVYPSVSFDSVQKSVTLFMPGFDKSEIKLYQYRGGSELLIEAGDQRRVIKLPLTMQGKVQGAKFVDRNLVVSIR

SEQ ID NO: 18458 - protein, 56 aa, Zea mays subsp. mays
  peptide (1)..(56): Ceres Seq. ID no. 12418094
MPGFDKSEIKLYQYRGGSELLIEAGDQRRVIKLPLTMQGKVQGAKFVDRNLVVSIR

SEQ ID NO: 18459 - DNA, 526 bp, Zea mays subsp. mays
  misc_feature (1)..(526): Ceres Seq. ID no. 1983587
  misc_feature (1)..(526): Ortholog of  Ceres SEQ ID NO 13596509 as cited in SEQ ID NO 62004
gttggacgggtgacccaccggctcgggaacggcaacccaggacggcaggcgcggcgacacatggtcggggtacagggcctggccgtggccgcctcctgctcttcgatctcacgctgcgatggagcggtacgaggtgatcagggacatcggctcgggcaacttcggggtgacaaagctcgtccgggacgtcaggaccaaggagctcttcgccgtcaagttcatcgagagagggcaaaagattgatgagcatgttcagagggagattatgaaccaccggtccctgaagcacccaaacataattagattcaaggaggtcgtgctaactcccacgcatttggcaatagttatggaatatgctgctgggggtgagctatttgaaaggatctgcagtgcggggagatttagtgaggatgaggcaaggttcttcttccagcaactgatttcgggagtgagctattgccattccatgcaagtatgccatagagatctgaaactagaaaacactctcctagattggtagtgtcgc

SEQ ID NO: 18460 - protein, 80 aa, Zea mays subsp. mays
  peptide (1)..(80): Ceres Seq. ID no. 1983588
VGRVTHRLGNGNPGRQARRHMVGVQGLAVAASCSSISRCDGAVRGDQGHRLGQLRGDKARPGRQDQGALRRQVHRERAKD

SEQ ID NO: 18461 - protein, 133 aa, Zea mays subsp. mays
  peptide (1)..(133): Ceres Seq. ID no. 1983589
MERYEVIRDIGSGNFGVTKLVRDVRTKELFAVKFIERGQKIDEHVQREIMNHRSLKHPNIIRFKEVVLTPTHLAIVMEYAAGGELFERICSAGRFSEDEARFFFQQLISGVSYCHSMQVCHRDLKLENTLLDW

SEQ ID NO: 18462 - protein, 84 aa, Zea mays subsp. mays
  peptide (1)..(84): Ceres Seq. ID no. 1983590
MNHRSLKHPNIIRFKEVVLTPTHLAIVMEYAAGGELFERICSAGRFSEDEARFFFQQLISGVSYCHSMQVCHRDLKLENTLLDW

SEQ ID NO: 18463 - DNA, 1795 bp, Zea mays subsp. mays
  misc_feature (1)..(1795): Ceres Seq. ID no. 12362950
  misc_feature (1)..(1795): Ortholog of  Ceres SEQ ID NO 14307164 as cited in SEQ ID NO 54775
  misc_feature (1)..(1795): Ortholog of  Ceres SEQ ID NO 13654989 as cited in SEQ ID NO 63117
  misc_feature (1)..(1795): Ortholog of  Ceres SEQ ID NO 13584744 as cited in SEQ ID NO 69137
gcacgagaccattacctagaacatcctaatcgaaaaaggccatcaagacgtagcagctccccttgcgtctgcgcacgccaccgaaggatcctcgccgcgcgtgcagtgcgatccgaggggaggggtccaaggccatgatgaagagcgtcagcggcaccggctcggccgggagccgtagcgatccgggcggcagcggcgagctgtcccgcttctccgtcgccaccacggcgtcgtccgcctcgcagccttccgcgaacggtggcgcgcgcgggatctccttcctcgacgccttccggtcctgcttcgttcccccggaggcgcgctcgccggagaactccatgtccgacgaatcccacccctcccaccaactctcgcagtctttgagctcacaaggttctaacagtgggagcgtgtttgggagcaagcgatcgattaaaggaatgtatagtcccatgcacaggagttctttagatagggagatccctggcagcacaaaattctccttgccacagatccagaaagcaacaaagaacttctcgccaaacttcaagattgggcagggtggttctgggactgtatacaagggtcagcttgctgatggtactcttgtcgctgtcaaacgtgccaagaagaatgtgtatgacaagtatatgggtcgtgagttctggaacgagattgagacattgcaacgcattgagcacctgaatttggttaggttccatgggtacctggagtttggtggcgagcagttgattattgtggagtatgttcccaatgggaatcttcgagagcacctcgactgtataaatggtaaaatattggaattctcactgagattggaaattgcaattgatgtggctcatgctattacatatcttcatacctattcagatcatccagtcatccacagagacatcaaatcctcaaacattcttctaatgaacaattgtcgagccaaggttgctgactttggattcgccaaattggctccaactgattctagtcatatatctactcaagtcaaaggaacagcaggctatctcgatccagaatatctcagaacataccagctcaatgagaagagtgatgtctactcctttggagtccttctggtggagttggttactgggaggcgccctatagagccaaaaaaggcaatcattgagcgtgttaccacaaaatgggcaatggaaaattttgtggagggcaatgctatccaaacactagatccgaatctggaagcgaccgatgcgatcaatctagcggtcgagaagctgtatgagctggctctgcaatgcttagccccaactaagaggaaccgaccgagcatgaagcggtgcgcagagattctgtggagcatccgtaaagattacagggagttggttgtacccacctctgcgatgaactgaagcaggtcgtctggagcagtcaagtgaacaaaaagatgtatcactccagtttgcctctcttgattcgcttcaaagattggtggttgaaatcatccgattgctgggattctttcagttaccgcaagtggtcgtgaacaggactgatggccttcctagatgctttgtttgtgctagaaaccagaaaagtcccttacaggtcttactatgctgtgtgaaagtgttgctgagtaaacatgtacgagtatatatcagatatctaatggtgtgtatatcttgtaggttctcttatacaggtaattgcatcacgcatgaagaaatctagttgtttccattgcatcttttttttttgtctatgatgaacaatattcagcgtatgattagcaagc

SEQ ID NO: 18464 - protein, 424 aa, Zea mays subsp. mays
  peptide (1)..(424): Ceres Seq. ID no. 12362951
MMKSVSGTGSAGSRSDPGGSGELSRFSVATTASSASQPSANGGARGISFLDAFRSCFVPPEARSPENSMSDESHPSHQLSQSLSSQGSNSGSVFGSKRSIKGMYSPMHRSSLDREIPGSTKFSLPQIQKATKNFSPNFKIGQGGSGTVYKGQLADGTLVAVKRAKKNVYDKYMGREFWNEIETLQRIEHLNLVRFHGYLEFGGEQLIIVEYVPNGNLREHLDCINGKILEFSLRLEIAIDVAHAITYLHTYSDHPVIHRDIKSSNILLMNNCRAKVADFGFAKLAPTDSSHISTQVKGTAGYLDPEYLRTYQLNEKSDVYSFGVLLVELVTGRRPIEPKKAIIERVTTKWAMENFVEGNAIQTLDPNLEATDAINLAVEKLYELALQCLAPTKRNRPSMKRCAEILWSIRKDYRELVVPTSAMN

SEQ ID NO: 18465 - protein, 423 aa, Zea mays subsp. mays
  peptide (1)..(423): Ceres Seq. ID no. 12362952
MKSVSGTGSAGSRSDPGGSGELSRFSVATTASSASQPSANGGARGISFLDAFRSCFVPPEARSPENSMSDESHPSHQLSQSLSSQGSNSGSVFGSKRSIKGMYSPMHRSSLDREIPGSTKFSLPQIQKATKNFSPNFKIGQGGSGTVYKGQLADGTLVAVKRAKKNVYDKYMGREFWNEIETLQRIEHLNLVRFHGYLEFGGEQLIIVEYVPNGNLREHLDCINGKILEFSLRLEIAIDVAHAITYLHTYSDHPVIHRDIKSSNILLMNNCRAKVADFGFAKLAPTDSSHISTQVKGTAGYLDPEYLRTYQLNEKSDVYSFGVLLVELVTGRRPIEPKKAIIERVTTKWAMENFVEGNAIQTLDPNLEATDAINLAVEKLYELALQCLAPTKRNRPSMKRCAEILWSIRKDYRELVVPTSAMN

SEQ ID NO: 18466 - protein, 356 aa, Zea mays subsp. mays
  peptide (1)..(356): Ceres Seq. ID no. 12362953
MSDESHPSHQLSQSLSSQGSNSGSVFGSKRSIKGMYSPMHRSSLDREIPGSTKFSLPQIQKATKNFSPNFKIGQGGSGTVYKGQLADGTLVAVKRAKKNVYDKYMGREFWNEIETLQRIEHLNLVRFHGYLEFGGEQLIIVEYVPNGNLREHLDCINGKILEFSLRLEIAIDVAHAITYLHTYSDHPVIHRDIKSSNILLMNNCRAKVADFGFAKLAPTDSSHISTQVKGTAGYLDPEYLRTYQLNEKSDVYSFGVLLVELVTGRRPIEPKKAIIERVTTKWAMENFVEGNAIQTLDPNLEATDAINLAVEKLYELALQCLAPTKRNRPSMKRCAEILWSIRKDYRELVVPTSAMN

SEQ ID NO: 18467 - DNA, 894 bp, Zea mays subsp. mays
  misc_feature (1)..(894): Ceres Seq. ID no. 12359615
  misc_feature (1)..(894): Ortholog of  Ceres SEQ ID NO 13594345 as cited in SEQ ID NO 58043
  misc_feature (1)..(894): Ortholog of  Ceres SEQ ID NO 12614112 as cited in SEQ ID NO 60891
  misc_feature (1)..(894): Ortholog of  Ceres SEQ ID NO 13662880 as cited in SEQ ID NO 65422
acgaagcggatgacggcaggcgcgccccgtctcctcctcgtgacgtctttgaccatgacaagtgcgggtacctcggctggctggacaccaagccggccaattcggtggtgtacatctccttcggcagctcgtcggttatgtgcaaggaccaggtcgcggagatcaccgacgccatggcgcaggtgaagaggccgttcctcttggtcctgaggaaggacaaccgcaagggccacgacgacgacgcggcggcggcggccgatgcggacagcgccggcgggatggtgctggagtggtgcgaccaggcgcgcgtgctgtcgcacccggcggtcgcatgcttcgtgacgcattgcgggtggaactcgaccctggagagcgcggcgtgcggcgtgccgaccgtcgcggttccgcggtactcggaccagggcacggccgcgtggctcgtggcggagcggatgggcaccggcgtccgcgcggcggcgcgcgcggacggcgtcgtggaggcccaggagntgaggcggtgngtggagnnccgcgnngnngggggcggtgncggcgcgcgccgcggcgtggaagcggaatgcgtgggntnccgtggccgacggcgggagctcgcaccagaacctgacggggttcctgaggcagatcgcccacggccgcggcgactaaaccggagacgacgtcgtattgtattgtatcacctcgttgtggtggcgttgcagccagctgccagcgtgcatttctagcgaaaccatggatacagttgattgcaatttgagcgaggacgcaatccatgtctggtttntgaagtctggcaacgtattcccttcggctcgacgtccatctgaatatctgatggttccaacttccaaaaccaaaagtgctcgcctgtgcctt

SEQ ID NO: 18468 - protein, 246 aa, Zea mays subsp. mays
  peptide (1)..(246): Ceres Seq. ID no. 12359616
  misc_feature (170)..(170): Xaa is any aa, unknown or other
  misc_feature (173)..(173): Xaa is any aa, unknown or other
  misc_feature (176)..(176): Xaa is any aa, unknown or other
  misc_feature (178)..(178): Xaa is any aa, unknown or other
  misc_feature (179)..(179): Xaa is any aa, unknown or other
  misc_feature (183)..(183): Xaa is any aa, unknown or other
  misc_feature (195)..(195): Xaa is any aa, unknown or other
  misc_feature (196)..(196): Xaa is any aa, unknown or other
EADDGRRAPSPPRDVFDHDKCGYLGWLDTKPANSVVYISFGSSSVMCKDQVAEITDAMAQVKRPFLLVLRKDNRKGHDDDAAAAADADSAGGMVLEWCDQARVLSHPAVACFVTHCGWNSTLESAACGVPTVAVPRYSDQGTAAWLVAERMGTGVRAAARADGVVEAQEXRRXVEXRXXGGGXGARRGVEAECVXXRGRRRELAPEPDGVPEADRPRPRRLNRRRRRIVLYHLVVVALQPAASVHF

SEQ ID NO: 18469 - protein, 201 aa, Zea mays subsp. mays
  peptide (1)..(201): Ceres Seq. ID no. 12359617
  misc_feature (125)..(125): Xaa is any aa, unknown or other
  misc_feature (128)..(128): Xaa is any aa, unknown or other
  misc_feature (131)..(131): Xaa is any aa, unknown or other
  misc_feature (133)..(133): Xaa is any aa, unknown or other
  misc_feature (134)..(134): Xaa is any aa, unknown or other
  misc_feature (138)..(138): Xaa is any aa, unknown or other
  misc_feature (150)..(150): Xaa is any aa, unknown or other
  misc_feature (151)..(151): Xaa is any aa, unknown or other
MCKDQVAEITDAMAQVKRPFLLVLRKDNRKGHDDDAAAAADADSAGGMVLEWCDQARVLSHPAVACFVTHCGWNSTLESAACGVPTVAVPRYSDQGTAAWLVAERMGTGVRAAARADGVVEAQEXRRXVEXRXXGGGXGARRGVEAECVXXRGRRRELAPEPDGVPEADRPRPRRLNRRRRRIVLYHLVVVALQPAASVHF

SEQ ID NO: 18470 - protein, 189 aa, Zea mays subsp. mays
  peptide (1)..(189): Ceres Seq. ID no. 12359618
  misc_feature (113)..(113): Xaa is any aa, unknown or other
  misc_feature (116)..(116): Xaa is any aa, unknown or other
  misc_feature (119)..(119): Xaa is any aa, unknown or other
  misc_feature (121)..(121): Xaa is any aa, unknown or other
  misc_feature (122)..(122): Xaa is any aa, unknown or other
  misc_feature (126)..(126): Xaa is any aa, unknown or other
  misc_feature (138)..(138): Xaa is any aa, unknown or other
  misc_feature (139)..(139): Xaa is any aa, unknown or other
MAQVKRPFLLVLRKDNRKGHDDDAAAAADADSAGGMVLEWCDQARVLSHPAVACFVTHCGWNSTLESAACGVPTVAVPRYSDQGTAAWLVAERMGTGVRAAARADGVVEAQEXRRXVEXRXXGGGXGARRGVEAECVXXRGRRRELAPEPDGVPEADRPRPRRLNRRRRRIVLYHLVVVALQPAASVHF

SEQ ID NO: 18471 - DNA, 497 bp, Zea mays subsp. mays
  misc_feature (1)..(497): Ceres Seq. ID no. 3315326
  misc_feature (1)..(497): Ortholog of  Ceres SEQ ID NO 15176959 as cited in SEQ ID NO 52610
  misc_feature (1)..(497): Ortholog of  Ceres SEQ ID NO 15176571 as cited in SEQ ID NO 54430
acggaggtgaggatacacgggtgcggaacgagagctaggcgaacctgtctggtacctcgcggcggagatggacgagaaggcgacgatggagagcaagctgtcctcggcggcggccttcgtggaggggggcgtgcaggacgcctgckacgacgcctgcagcatctgcctcgacgccttctgcgacassaacccctccacgatgaccaagtgcaagcatgactaccatcttcagtgcattcttgaatggtgccagagaagctcccagtgccccatgtgttggcagcatatcagcatgaaagatcctatgagccaagagctactagaggctgttgaacaagagaggaacatccgagctaatccttcacgtaatactgctgttttccaccatcaaatgctgggtgattttgagatccctgtaggtgcagatgatgcagaacttgaagaacgcattattcagcacttggctgccgcagctgcagtgcgtaggtcacaccgtc

SEQ ID NO: 18472 - protein, 143 aa, Zea mays subsp. mays
  peptide (1)..(143): Ceres Seq. ID no. 3315327
  misc_feature (27)..(27): Xaa is any aa, unknown or other
  misc_feature (40)..(40): Xaa is any aa, unknown or other
MDEKATMESKLSSAAAFVEGGVQDACXDACSICLDAFCDXNPSTMTKCKHDYHLQCILEWCQRSSQCPMCWQHISMKDPMSQELLEAVEQERNIRANPSRNTAVFHHQMLGDFEIPVGADDAELEERIIQHLAAAAAVRRSHR

SEQ ID NO: 18473 - protein, 137 aa, Zea mays subsp. mays
  peptide (1)..(137): Ceres Seq. ID no. 3315328
  misc_feature (21)..(21): Xaa is any aa, unknown or other
  misc_feature (34)..(34): Xaa is any aa, unknown or other
MESKLSSAAAFVEGGVQDACXDACSICLDAFCDXNPSTMTKCKHDYHLQCILEWCQRSSQCPMCWQHISMKDPMSQELLEAVEQERNIRANPSRNTAVFHHQMLGDFEIPVGADDAELEERIIQHLAAAAAVRRSHR

SEQ ID NO: 18474 - protein, 99 aa, Zea mays subsp. mays
  peptide (1)..(99): Ceres Seq. ID no. 3315329
MTKCKHDYHLQCILEWCQRSSQCPMCWQHISMKDPMSQELLEAVEQERNIRANPSRNTAVFHHQMLGDFEIPVGADDAELEERIIQHLAAAAAVRRSHR

SEQ ID NO: 18475 - DNA, 480 bp, Zea mays subsp. mays
  misc_feature (1)..(480): Ceres Seq. ID no. 4612851
  misc_feature (1)..(480): Ortholog of  Ceres SEQ ID NO 14311229 as cited in SEQ ID NO 53262
aactttgcttatgatgcagcactggatcaaggacatgaagtacagcaccagggtgaaggatgaggaaggctaccctgccatcgtcctcgtcaacaaagccactggagaggctctcaagcattcccttggccagtcacaccctgttcttctgacccgccataatccagactccctggacgagtctgtcctgtggacaagagcagggacgttggggatgggttccgctgcattaggatggtcaacaacatctacctgaactttgatgctttacatggagacaaggaccatggtggtgtgcgcgacgggacggcccttgtgctgtgggagtggtgcgagggagacaaccagcgctggaagattgttccctggtgaacaaggaaatgtgtgaccgagcccgcaccaaggaggagctcctgccgtaataagtgaagtgattggtactgaagtttctggaaataagaggctcttctgagatgcctg

SEQ ID NO: 18476 - protein, 84 aa, Zea mays subsp. mays
  peptide (1)..(84): Ceres Seq. ID no. 4612852
TLLMMQHWIKDMKYSTRVKDEEGYPAIVLVNKATGEALKHSLGQSHPVLLTRHNPDSLDESVLWTRAGTLGMGSAALGWSTTST

SEQ ID NO: 18477 - protein, 81 aa, Zea mays subsp. mays
  peptide (1)..(81): Ceres Seq. ID no. 4612853
MMQHWIKDMKYSTRVKDEEGYPAIVLVNKATGEALKHSLGQSHPVLLTRHNPDSLDESVLWTRAGTLGMGSAALGWSTTST

SEQ ID NO: 18478 - protein, 80 aa, Zea mays subsp. mays
  peptide (1)..(80): Ceres Seq. ID no. 4612854
MQHWIKDMKYSTRVKDEEGYPAIVLVNKATGEALKHSLGQSHPVLLTRHNPDSLDESVLWTRAGTLGMGSAALGWSTTST

SEQ ID NO: 18479 - DNA, 989 bp, Zea mays subsp. mays
  misc_feature (1)..(989): Ceres Seq. ID no. 12378246
  misc_feature (1)..(989): Ortholog of  Ceres SEQ ID NO 14304457 as cited in SEQ ID NO 53555
gcacgagaccattacctagaacatcctaatcaaaagtttcggtgcgctaggccgagcgcacgcccctcagcacttgtgtcctcctataagtcgggctcccgccggccatggccatccccggattcggcagctgcgcggacggccggactgcagccggcaggcggaagtgatgggcagcaccgtcgacgacgacgaggcgtgcgagctggtgagcggctcggacctcgtcatcggcgagggcgacgacagcgtcagcgcgtaccttttcaaggccgtcaagaacaacaatggcaccggcatccttctcctctccgacatcttcggcttccaggactccgccacgcgggacttcgcctaccgcgtcgcctgcaatggctacaatgtcctagttccggacttgttccgtgggaacccgtggaagctgaacgtcccgttcgacggcgacagcttcgagcggtggctggcggggcaggccccgggccgggtgtccggcgacatcgacgcgtgcacgaggtggctggtggacgagttcaaggccgcgggggtgtccaagaagctgggcgtgatcgggttctgctacggcggcgggcgcctcgtggagacgctggcgcgcgacgccgagagctgcttcagcgcgggggtctgcttctacgggtcccggatggacgcgtccctgggcgaccgcgtcgcggcgcccgtcctgttcgtgtgcggcgacggcgacccgctgtgccccgtggagacggtgcgggagctggaggggcgcgcgagaggcgcccgggcggcggtgtacgccggcaggggccacgggttcgcgcaccggccgcagtcggtggaggaggacggcgacgccgaggacgcgttcaacgcgatgcgggggtggctgcacgaccacctgctcgcctgatcggacgatcagacgctgtacacgggtttggggttgcaaatcaaggatgctagtaaagagttggagtgaatccctgaaatcg

SEQ ID NO: 18480 - protein, 319 aa, Zea mays subsp. mays
  peptide (1)..(319): Ceres Seq. ID no. 12378247
ARDHYLEHPNQKFRCARPSARPSALVSSYKSGSRRPWPSPDSAAARTAGLQPAGGSDGQHRRRRRGVRAGERLGPRHRRGRRQRQRVPFQGRQEQQWHRHPSPLRHLRLPGLRHAGLRLPRRLQWLQCPSSGLVPWEPVEAERPVRRRQLRAVAGGAGPGPGVRRHRRVHEVAGGRVQGRGGVQEAGRDRVLLRRRAPRGDAGARRRELLQRGGLLLRVPDGRVPGRPRRGARPVRVRRRRPAVPRGDGAGAGGARERRPGGGVRRQGPRVRAPAAVGGGGRRRRGRVQRDAGVAARPPARLIGRSDAVHGFGVANQGC

SEQ ID NO: 18481 - protein, 245 aa, Zea mays subsp. mays
  peptide (1)..(245): Ceres Seq. ID no. 12378248
MGSTVDDDEACELVSGSDLVIGEGDDSVSAYLFKAVKNNNGTGILLLSDIFGFQDSATRDFAYRVACNGYNVLVPDLFRGNPWKLNVPFDGDSFERWLAGQAPGRVSGDIDACTRWLVDEFKAAGVSKKLGVIGFCYGGGRLVETLARDAESCFSAGVCFYGSRMDASLGDRVAAPVLFVCGDGDPLCPVETVRELEGRARGARAAVYAGRGHGFAHRPQSVEEDGDAEDAFNAMRGWLHDHLLA

SEQ ID NO: 18482 - DNA, 757 bp, Zea mays subsp. mays
  misc_feature (1)..(757): Ceres Seq. ID no. 12566307
  misc_feature (1)..(757): Ortholog of  Ceres SEQ ID NO 15178860 as cited in SEQ ID NO 0
atctcgcaatcgaggcgtttttttctgcttcgtaagttcgtggtcgatccagcgagcgagcgagcagaccggcggctaaccgcggagggagagatggcgcaggggacgctggaggtgcttctcgtcggagccaggggcctcgagaacaccgattacctgagcaacatggacccctacgcgcttctgcaatgtcgctcccacgagcagaagagcagcgtcgcatctggcaaaggctgtgaacctgagtggaacgagaccttcgtgttcaccgtctccgatggcgcagcagagctgttcatcaagctcctggacagtgacggtggcactgatgacgattttgttggtgaggcaacgattcctctggaagcagtttacacggaaggaaacatccctccgactgtttacaatgttgtgaaagacgaagaataccgcggagaaatcaaagttggcctcacgttcactccagaggaccagggcttctgaggaataacttggcgtgtggccgctggaactggaggcagcaggcagtcgtcttatgattcagaagcaaacgacggatcgattcccttgatgtactgcagtccagtgagcgtgcatctacaacttgtagaagaagcctgcaacatgatcacgggatcctgtactgcatcactctaaagcctagctaaaaccaccagctcctgtacttgatgccgggcgggcttgtcatgtactgaaacctacaataacggtcgccgaaccccactctttgatgttc

SEQ ID NO: 18483 - protein, 160 aa, Zea mays subsp. mays
  peptide (1)..(160): Ceres Seq. ID no. 12566308
ISQSRRFFLLRKFVVDPASERADRRLTAEGEMAQGTLEVLLVGARGLENTDYLSNMDPYALLQCRSHEQKSSVASGKGCEPEWNETFVFTVSDGAAELFIKLLDSDGGTDDDFVGEATIPLEAVYTEGNIPPTVYNVVKDEEYRGEIKVGLTFTPEDQGF

SEQ ID NO: 18484 - protein, 129 aa, Zea mays subsp. mays
  peptide (1)..(129): Ceres Seq. ID no. 12566309
MAQGTLEVLLVGARGLENTDYLSNMDPYALLQCRSHEQKSSVASGKGCEPEWNETFVFTVSDGAAELFIKLLDSDGGTDDDFVGEATIPLEAVYTEGNIPPTVYNVVKDEEYRGEIKVGLTFTPEDQGF

SEQ ID NO: 18485 - protein, 105 aa, Zea mays subsp. mays
  peptide (1)..(105): Ceres Seq. ID no. 12566310
MDPYALLQCRSHEQKSSVASGKGCEPEWNETFVFTVSDGAAELFIKLLDSDGGTDDDFVGEATIPLEAVYTEGNIPPTVYNVVKDEEYRGEIKVGLTFTPEDQGF

SEQ ID NO: 18486 - DNA, 513 bp, Zea mays subsp. mays
  misc_feature (1)..(513): Ceres Seq. ID no. 12566894
  misc_feature (1)..(513): Ortholog of  Ceres SEQ ID NO 14307827 as cited in SEQ ID NO 54367
cagcaagacacagtgtatgttgctggcctccagatggagctccagcaagcacgtgataggataagtgagctggaagtggagcggcggtcggctaggaagaagcttgatcacttgttcaagaaacttgcagaggagaaagcagcttggagaaacagagagcatgaaaaggtgcgtgctatcctcgaagatatgaaggcagaccttgaccatgagaagaaaaacaggaggcggctggagatgattaacttgaaactcgtcaatgagctgaaggaggccaagatgtcagcaaaacagctgttacaagagtatgagacagagaggaaggcgcgtgagctcaccgaggaggtatgcaacgagctagcaagagaggtgggggaagacaaagctgagattgaggccttgaaacgtgactccctgaggttgcgagaggaggtagacgaggaacggaagatgctccagatggctgaggtgtggccgtgaaacttttaatcaaatcagttcactcttttgcct

SEQ ID NO: 18487 - protein, 159 aa, Zea mays subsp. mays
  peptide (1)..(159): Ceres Seq. ID no. 12566895
QQDTVYVAGLQMELQQARDRISELEVERRSARKKLDHLFKKLAEEKAAWRNREHEKVRAILEDMKADLDHEKKNRRRLEMINLKLVNELKEAKMSAKQLLQEYETERKARELTEEVCNELAREVGEDKAEIEALKRDSLRLREEVDEERKMLQMAEVWP

SEQ ID NO: 18488 - protein, 148 aa, Zea mays subsp. mays
  peptide (1)..(148): Ceres Seq. ID no. 12566896
MELQQARDRISELEVERRSARKKLDHLFKKLAEEKAAWRNREHEKVRAILEDMKADLDHEKKNRRRLEMINLKLVNELKEAKMSAKQLLQEYETERKARELTEEVCNELAREVGEDKAEIEALKRDSLRLREEVDEERKMLQMAEVWP

SEQ ID NO: 18489 - protein, 96 aa, Zea mays subsp. mays
  peptide (1)..(96): Ceres Seq. ID no. 12566897
MKADLDHEKKNRRRLEMINLKLVNELKEAKMSAKQLLQEYETERKARELTEEVCNELAREVGEDKAEIEALKRDSLRLREEVDEERKMLQMAEVWP

SEQ ID NO: 18490 - DNA, 1330 bp, Zea mays subsp. mays
  misc_feature (1)..(1330): Ceres Seq. ID no. 12418837
  misc_feature (1)..(1330): Ortholog of  Ceres SEQ ID NO 15169419 as cited in SEQ ID NO 58491
gcacgagaccattacctagaacatcctaatcgaaaacccgcttggtcactcctgcttccttgccgttcgagagctatccgacacctgaacagagctccagttcctctatcgacctgagggcattgggttcttgatgggagacagcaggaggcacgaaccgagggttagcctccaaccggatggctggctgcgcaggcctgcgttgggattgaacagcctgatgcagattcccgataagattcagagctctcttaaggtgcaatttgggcgtttcttgaacaaggatggtgctgtccgccgcatgagtgctgagatatcgtcagagaagcgaaaccgtcgtgttctgctgctgcttccgcggaggttcgcttggataggcatctccaagcttggtgggacaatcctagctggaccgacgagccaccagaaataaaggtgactgtaccagaaggttccctttgcaacctcaatctgagatttaaggccggattaccaccagatgcagtatacaatatcataattgatccagagaacaaaagggtgttcaagaatattaaggaagtaatatcaaggaaagtcttgctcgacgaaggatcaagacaagtagtcgaagtggagcaggcagcaatctggaagttcctctggtggtctggcaccttttccgttcatgtttttgttgatcagaacagaaaaaaacacaccgtaaagtttaggcaagggcgagctggctttatgaggaagtttgagggttgctggacgatagaacccctttttgttgacaaggaattatgccttcctctgaacccacattcattggaggaatatgaatcttgtactggtggcagggggagagttggatctgccattaccttggaccaacttatcgagcctgctcttttacccccaccacccatttcgtggtacttgagaggaattactacaaggacaactgagatgctggtgaacgatctgatagcggaaactgctcgattgcgcaccatctcaaacaacgcaaatgccaagcaaggtactgaagaaaccggtgatgctaacataggtgatccagctagagagtgtggtgacattaaggaaaggtggcgacagagaagaaaaagtggacgtcacggatcatcccttagattaacaagtcgattcttgtaagataagctatgaagcagtgctcattttaggacccgatttacctgtatcttagtttgtaaggttttggttgtaggtaacattgtgtaagatggttgtttgtgaacatgtagaagctggttgttcaatacttatatatgttttatttatatgaataaaggtttacttgctc

SEQ ID NO: 18491 - protein, 142 aa, Zea mays subsp. mays
  peptide (1)..(142): Ceres Seq. ID no. 12418838
MRKFEGCWTIEPLFVDKELCLPLNPHSLEEYESCTGGRGRVGSAITLDQLIEPALLPPPPISWYLRGITTRTTEMLVNDLIAETARLRTISNNANAKQGTEETGDANIGDPARECGDIKERWRQRRKSGRHGSSLRLTSRFL

SEQ ID NO: 18492 - protein, 99 aa, Zea mays subsp. mays
  peptide (1)..(99): Ceres Seq. ID no. 12418839
MGDSRRHEPRVSLQPDGWLRRPALGLNSLMQIPDKIQSSLKVQFGRFLNKDGAVRRMSAEISSEKRNRRVLLLLPRRFAWIGISKLGGTILAGPTSHQK

SEQ ID NO: 18493 - DNA, 1372 bp, Zea mays subsp. mays
  misc_feature (1)..(1372): Ceres Seq. ID no. 12359071
  misc_feature (1)..(1372): Ortholog of  Ceres SEQ ID NO 15177463 as cited in SEQ ID NO 0
aagtggggcgtgcactcaaacccctcatccccatgagaccgcacgagttggagcaaggctcagtgcccgcctgcccccgcatgccgtgcgatgccatggaggcgcgcgtccctgggcgtcgtcacgtcctcactccttgtccgtctgcctgtcgccttgtctcgccttgcaggtcgtagacggcagacgaggagcagcagcagcacgaggcggccgggcccgggccacgccatgccggagaaggaggcgcaggccgccgcgttctgcggcgaggcggtgatcgccgagttcgagtccctcacgcgggacgccgccgccgtgcagcgcgacacgctgcgccggatcctggcagacaacgcctgcgccgagtacctccgctgccggggcctcgcgggccgcaccgacgccgccagcttccgcgcctgcgtgccgctcgccacgcacgccgacatcgagccctacattgcgcgtatcgccgacggcgacacgtcccccgtgctcaccgccaagcccatcacctccatctccctcagctccggcacgacgcaggggaagcgcaagtacctgcccttcaaccaggagctcgtcaagtccacgatgcagatataccggacttcctacgccttcaggaacagggctgtaccggtaccgtctaggggacgtggtgcaggtggccgggttctacaactcgacgccgaagctcaagttcgtgtgccggcggaacctgttgctgagcatcaacatcgacaagagcagcgagcaggacctgcagctggccgtggacagcgcggccaaggtcctggcggcggagaagctggaggtggtggactacagcagccacgcggaggtgtcgcgcgacccgggccactacgtggtgttctgggagctgaacgccgacgccggcgacgacgtgctgcagagctgctgcgacgagctggaccgcgccttcgcggacccgggctacgtcgggtcgcggagggcgcgcagcatcggcccgctcgagctgcgggtgctgcagcgcggcaccttccagaaggtgctccgccactacctctccctcggcgcccccgtcagccagttcaagtcgccccgctgcgtcggccgggccaacaactccggcgtcctccagatcctctccgccaacgtcgtcaaggccttcttcagcgccgcctacgactgaacccgctgcgttcggtggcgacagatcctcaggtagttgtagactctgcatgcagctgtgctgctgtctgtgactgtgtattcacaggattccaggtgctcgatctgcgcgtagatgacgcatcgcatttgtggcctgtttgcaaagttagcagtgtcgtctatggatcgagtgaaataaaacctattgatt

SEQ ID NO: 18494 - protein, 427 aa, Zea mays subsp. mays
  peptide (1)..(427): Ceres Seq. ID no. 12359072
MPWRRASLGVVTSSLLVRLPVALSRLAGRRRQTRSSSSTRRPGPGHAMPEKEAQAAAFCGEAVIAEFESLTRDAAAVQRDTLRRILADNACAEYLRCRGLAGRTDAASFRACVPLATHADIEPYIARIADGDTSPVLTAKPITSISLSSGTTQGKRKYLPFNQELVKSTMQIYRTSYAFRNRAVPVPSRGRGAGGRVLQLDAEAQVRVPAEPVAEHQHRQEQRAGPAAGRGQRGQGPGGGEAGGGGLQQPRGGVARPGPLRGVLGAERRRRRRRAAELLRRAGPRLRGPGLRRVAEGAQHRPARAAGAAARHLPEGAPPLPLPRRPRQPVQVAPLRRPGQQLRRPPDPLRQRRQGLLQRRLRLNPLRSVATDPQVVVDSACSCAAVCDCVFTGFQVLDLRVDDASHLWPVCKVSSVVYGSSEIKPID

SEQ ID NO: 18495 - protein, 380 aa, Zea mays subsp. mays
  peptide (1)..(380): Ceres Seq. ID no. 12359073
MPEKEAQAAAFCGEAVIAEFESLTRDAAAVQRDTLRRILADNACAEYLRCRGLAGRTDAASFRACVPLATHADIEPYIARIADGDTSPVLTAKPITSISLSSGTTQGKRKYLPFNQELVKSTMQIYRTSYAFRNRAVPVPSRGRGAGGRVLQLDAEAQVRVPAEPVAEHQHRQEQRAGPAAGRGQRGQGPGGGEAGGGGLQQPRGGVARPGPLRGVLGAERRRRRRRAAELLRRAGPRLRGPGLRRVAEGAQHRPARAAGAAARHLPEGAPPLPLPRRPRQPVQVAPLRRPGQQLRRPPDPLRQRRQGLLQRRLRLNPLRSVATDPQVVVDSACSCAAVCDCVFTGFQVLDLRVDDASHLWPVCKVSSVVYGSSEIKPID

SEQ ID NO: 18496 - protein, 258 aa, Zea mays subsp. mays
  peptide (1)..(258): Ceres Seq. ID no. 12359074
MQIYRTSYAFRNRAVPVPSRGRGAGGRVLQLDAEAQVRVPAEPVAEHQHRQEQRAGPAAGRGQRGQGPGGGEAGGGGLQQPRGGVARPGPLRGVLGAERRRRRRRAAELLRRAGPRLRGPGLRRVAEGAQHRPARAAGAAARHLPEGAPPLPLPRRPRQPVQVAPLRRPGQQLRRPPDPLRQRRQGLLQRRLRLNPLRSVATDPQVVVDSACSCAAVCDCVFTGFQVLDLRVDDASHLWPVCKVSSVVYGSSEIKPID

SEQ ID NO: 18497 - DNA, 675 bp, Zea mays subsp. mays
  misc_feature (1)..(675): Ceres Seq. ID no. 12360054
  misc_feature (1)..(675): Ortholog of  Ceres SEQ ID NO 15224912 as cited in SEQ ID NO 63475
ccttccaggttccgggaggtctatgactactattcggcactttttgattcactggatgccacccttccaagggaaagcccagatagaatgaacgtggagcgccagtgcctcgcacgggaaatcgtcaacatcttagcttgtgaaggccctgaccgtgtggaaaggtatgaagtggctgggaaatggagagctaggatggcaatggcgggctttgtgccgtccccatttaacagcggcgcggttgatggcataagatctctactgaaatcgtactgcgataagtacaggttcgagaaggtccaggacggcctccactttggctggggcgacaagacgctcgtcttctcttcggcgtggcaatagaagcttgcttgtagtattgccgatctgagcactttccagcgttttaggagcatctggtgcaagggctgtaaagagatttctgtcgccgtattgttgaagtacactcgtagctaaccttagcgtgttgcctgcctgtaggcttgtgaggtctacggtttacctagtttcttagatgaagtatgttgtgcattgtacacctactgaactacatgtagactgtagagtcgcgggtgtatttaattttgcccttcttttggaggggcagaatcacaatatgtcgacattgtttcgtgtataaagtactggatgatg

SEQ ID NO: 18498 - protein, 120 aa, Zea mays subsp. mays
  peptide (1)..(120): Ceres Seq. ID no. 12360055
PSRFREVYDYYSALFDSLDATLPRESPDRMNVERQCLAREIVNILACEGPDRVERYEVAGKWRARMAMAGFVPSPFNSGAVDGIRSLLKSYCDKYRFEKVQDGLHFGWGDKTLVFSSAWQ

SEQ ID NO: 18499 - protein, 91 aa, Zea mays subsp. mays
  peptide (1)..(91): Ceres Seq. ID no. 12360056
MNVERQCLAREIVNILACEGPDRVERYEVAGKWRARMAMAGFVPSPFNSGAVDGIRSLLKSYCDKYRFEKVQDGLHFGWGDKTLVFSSAWQ

SEQ ID NO: 18500 - DNA, 979 bp, Zea mays subsp. mays
  misc_feature (1)..(979): Ceres Seq. ID no. 13586215
  misc_feature (1)..(979): Ortholog of  Ceres SEQ ID NO 14306309 as cited in SEQ ID NO 1394
  misc_feature (1)..(979): Ortholog of  Ceres SEQ ID NO 12618538 as cited in SEQ ID NO 64474
gaaaaagcagccgtgacggatccagccgaaccccctcgcagtcgcagccccctcacgccacgcgacatgggcaagatcaggatgcccgtgccgtccctgttccgccgccgctcctccaagccgccgccgccgcagccgcagcagcaggcgcctgccgcgggcgacggcgacggcagcgggtccccggagcgggcgacggcggaggaggagatggcgcgcgtgttccgcaagttcgacgcgaacggcgacgggcggatctcgcggtcggagctggcggcgctgttcgagagcctgggccacggcgcgtcggacgacgaggtggcgcgcatgatggccgaggcggacgcggacggcgacggcttcatcagcctgcccgagttcgcggccctcaacgccacggtggccggcgacgcggccgccgtcgaggaggacctgcgccacgccttccgcgtcttcgacgccgacggcagcggcgccatctccgccgccgagctcgcgcgcgtcctccgcagcctcggcgagcccgcctccgtcgcgcagtgccgccgcatgatcgagggcgtcgaccagaacggcgacggcctcatctccttcgacgagttcaaggtcatgatggccaggggaggaggctgcttcgctaagatcgcctaggtaattagaggttccctcccggcccagccctttcgaatctctgctgctccacccatcccccccacctccgttcacagcagccgagagtatggcgtcgtgtgcggtcttaagtaaagtgtatatagaagccaagatcatcgtggagaagcactagcgctagattcttctctctactaataattgggaaccacggcggatattgctttttgcaagattggagcctggatgaaagcagtggttcagagctaacttctgttctagagatgcggatgcttgactctgtgaatgaaagagtagacgattcgaacctactcctatgtggatctct

SEQ ID NO: 18501 - protein, 216 aa, Zea mays subsp. mays
  peptide (1)..(216): Ceres Seq. ID no. 13586216
EKAAVTDPAEPPRSRSPLTPRDMGKIRMPVPSLFRRRSSKPPPPQPQQQAPAAGDGDGSGSPERATAEEEMARVFRKFDANGDGRISRSELAALFESLGHGASDDEVARMMAEADADGDGFISLPEFAALNATVAGDAAAVEEDLRHAFRVFDADGSGAISAAELARVLRSLGEPASVAQCRRMIEGVDQNGDGLISFDEFKVMMARGGGCFAKIA

SEQ ID NO: 18502 - protein, 212 aa, Zea mays subsp. mays
  peptide (1)..(212): Ceres Seq. ID no. 13586217
KSSRDGSSRTPSQSQPPHATRHGQDQDARAVPVPPPLLQAAAAAAAAAGACRGRRRRQRVPGAGDGGGGDGARVPQVRRERRRADLAVGAGGAVREPGPRRVGRRGGAHDGRGGRGRRRLHQPARVRGPQRHGGRRRGRRRGGPAPRLPRLRRRRQRRHLRRRARARPPQPRRARLRRAVPPHDRGRRPERRRPHLLRRVQGHDGQGRRLLR

SEQ ID NO: 18503 - protein, 194 aa, Zea mays subsp. mays
  peptide (1)..(194): Ceres Seq. ID no. 13586218
MGKIRMPVPSLFRRRSSKPPPPQPQQQAPAAGDGDGSGSPERATAEEEMARVFRKFDANGDGRISRSELAALFESLGHGASDDEVARMMAEADADGDGFISLPEFAALNATVAGDAAAVEEDLRHAFRVFDADGSGAISAAELARVLRSLGEPASVAQCRRMIEGVDQNGDGLISFDEFKVMMARGGGCFAKIA

SEQ ID NO: 18504 - DNA, 657 bp, Zea mays subsp. mays
  misc_feature (1)..(657): Ceres Seq. ID no. 13492707
  misc_feature (1)..(657): Ortholog of  Ceres SEQ ID NO 13655108 as cited in SEQ ID NO 62996
gtagtttcaattatcataacctccgactccgacgatctgaactgtgaagatgagcacttatccaccgccgacgggggaatggaccaccggcctctgtggctgcttcagcgactgcaagagctgttgcctgtcgttcttgtgcccgtgtatcccgttcggacaggtggcagaggtcttggacaagggcatgacatcctgtggtctggccggcctcctctactgtttgctgctgcatgccggggtggctgtggtcccgtgccactgcatctacacctgcacctaccgtcgcaagctccgggcggcgtacgacctgccgccggagccgtgcgccgattgctgcgtccacatgtggtgcgggccatgcgccatctcccagatgtaccgggagctcaagaacagaggcgccgacccggccatgggatgggaagtgctctcgaaaaagacgactatggctcctgtaccaatgcaagacatgacgcgctgacgacagcaactcgatctcctagcaaaccaggattacgtgttgcatatatgcacagtttgtgtgttatgtggctatgtcagcaagtaaatggatcggagtctatgagtggataaaattaagtggatgtgttcgcgtcttagtaataagtgaataaaatttcataagtgttactt

SEQ ID NO: 18505 - protein, 198 aa, Zea mays subsp. mays
  peptide (1)..(198): Ceres Seq. ID no. 13492708
VVSIIITSDSDDLNCEDEHLSTADGGMDHRPLWLLQRLQELLPVVLVPVYPVRTGGRGLGQGHDILWSGRPPLLFAAACRGGCGPVPLHLHLHLPSQAPGGVRPAAGAVRRLLRPHVVRAMRHLPDVPGAQEQRRRPGHGMGSALEKDDYGSCTNARHDALTTATRSPSKPGLRVAYMHSLCVMWLCQQVNGSESMSG

SEQ ID NO: 18506 - protein, 172 aa, Zea mays subsp. mays
  peptide (1)..(172): Ceres Seq. ID no. 13492709
MDHRPLWLLQRLQELLPVVLVPVYPVRTGGRGLGQGHDILWSGRPPLLFAAACRGGCGPVPLHLHLHLPSQAPGGVRPAAGAVRRLLRPHVVRAMRHLPDVPGAQEQRRRPGHGMGSALEKDDYGSCTNARHDALTTATRSPSKPGLRVAYMHSLCVMWLCQQVNGSESMSG

SEQ ID NO: 18507 - protein, 144 aa, Zea mays subsp. mays
  peptide (1)..(144): Ceres Seq. ID no. 13492710
MSTYPPPTGEWTTGLCGCFSDCKSCCLSFLCPCIPFGQVAEVLDKGMTSCGLAGLLYCLLLHAGVAVVPCHCIYTCTYRRKLRAAYDLPPEPCADCCVHMWCGPCAISQMYRELKNRGADPAMGWEVLSKKTTMAPVPMQDMTR

SEQ ID NO: 18508 - DNA, 1349 bp, Zea mays subsp. mays
  misc_feature (1)..(1349): Ceres Seq. ID no. 13499297
  misc_feature (1)..(1349): Ortholog of  Ceres SEQ ID NO 13581579 as cited in SEQ ID NO 58361
  misc_feature (1)..(1349): Ortholog of  Ceres SEQ ID NO 13596474 as cited in SEQ ID NO 62169
  misc_feature (1)..(1349): Ortholog of  Ceres SEQ ID NO 13596969 as cited in SEQ ID NO 63375
  misc_feature (1)..(1349): Ortholog of  Ceres SEQ ID NO 13597519 as cited in SEQ ID NO 64759
  misc_feature (1)..(1349): Ortholog of  Ceres SEQ ID NO 13597870 as cited in SEQ ID NO 64982
  misc_feature (1)..(1349): Ortholog of  Ceres SEQ ID NO 13595926 as cited in SEQ ID NO 67778
  misc_feature (1)..(1349): Ortholog of  Ceres SEQ ID NO 13596362 as cited in SEQ ID NO 67877
taatcgaaaaaccgcgagctcttgcagcctaacggccttagctaatttaagagagattagtaaacaaacagcagacttaagagcgagcctagctagcggcagtaccatgaggcgcctccagttcctggccgccgccgccgccgccatcttcctcctcgcgcttccgctgatggcgacggcccagccgaagctgaggccggactactacgccggcgtctgcccgaacctcgagagcattgtccgcggcgccgtgcggcagtccgtggcgctctcgccgctcgccgccccggccacgctccggctcttcttccacgactgcgcggtcaggggctgcgacgcgtcggtgatgctcatcgacccggccggcggcgacgagtggcggagccccgacggcgtgatgctgaagccggaagggttcagcacggtgatgagcgccaaggcggcggtggacagcgacccgcagtgccggaacattgtgtcctgcgccgacatcttggccctcgccgccagggactccgtgttcctgagcggagggccagactacgaagtggagctgggcaggttcgacggcagggtgtcgagtggtggcagcgtcgtggttcctcatggcacgttcgacctcgaccagctcaacgccttcttctccagcctcggtctctcccagaccgacatgatcgcactgtcagggggtcacacgatcggcgcggcgtcgtgcggctccttcgcgtaccgggtgggcgcggatccggccatggacccggcgctcgcgcagcaggtcctggcgcgctgcccggggggcgggccagccgggttcgcgttcctggacgccacgacgccgctgcggttcgacaacgagtactaccggaacctgctcggcgggatggggatcctggcctccgaccaggtgctgtacgccgacccgaggtcccgcggcgccgtcgagcgctacgccgcggaccaggccgccttcttcggggactttgccgcggcaatgacgaggctcggcagggtcggggtccgcacggcggccgacggcgagatacgccgcgactgcaggttccccaacccccaactgatgggttcgccggctggctgtggcttggcttgtggttgcgcacttgcgcttgcgcgacggttttgtgttgcttctatcttctgtgacgtcacccgtggacgtggcgcgagtgggtgtctgtgttgcgttgttgacttgagtggacgtgcagaaggccgcgtgtcttttggaccaggaaggctctgggcctggtgggctgtgtcctgtgtggctccaagatgggtgtcatatctgttgtgaagggaaatgaaatgtaaagattggtggttggcct

SEQ ID NO: 18509 - protein, 437 aa, Zea mays subsp. mays
  peptide (1)..(437): Ceres Seq. ID no. 13499298
NRKTASSCSLTALANLREISKQTADLRASLASGSTMRRLQFLAAAAAAIFLLALPLMATAQPKLRPDYYAGVCPNLESIVRGAVRQSVALSPLAAPATLRLFFHDCAVRGCDASVMLIDPAGGDEWRSPDGVMLKPEGFSTVMSAKAAVDSDPQCRNIVSCADILALAARDSVFLSGGPDYEVELGRFDGRVSSGGSVVVPHGTFDLDQLNAFFSSLGLSQTDMIALSGGHTIGAASCGSFAYRVGADPAMDPALAQQVLARCPGGGPAGFAFLDATTPLRFDNEYYRNLLGGMGILASDQVLYADPRSRGAVERYAADQAAFFGDFAAAMTRLGRVGVRTAADGEIRRDCRFPNPQLMGSPAGCGLACGCALALARRFCVASIFCDVTRGRGASGCLCCVVDLSGRAEGRVSFGPGRLWAWWAVSCVAPRWVSYLL

SEQ ID NO: 18510 - protein, 402 aa, Zea mays subsp. mays
  peptide (1)..(402): Ceres Seq. ID no. 13499299
MRRLQFLAAAAAAIFLLALPLMATAQPKLRPDYYAGVCPNLESIVRGAVRQSVALSPLAAPATLRLFFHDCAVRGCDASVMLIDPAGGDEWRSPDGVMLKPEGFSTVMSAKAAVDSDPQCRNIVSCADILALAARDSVFLSGGPDYEVELGRFDGRVSSGGSVVVPHGTFDLDQLNAFFSSLGLSQTDMIALSGGHTIGAASCGSFAYRVGADPAMDPALAQQVLARCPGGGPAGFAFLDATTPLRFDNEYYRNLLGGMGILASDQVLYADPRSRGAVERYAADQAAFFGDFAAAMTRLGRVGVRTAADGEIRRDCRFPNPQLMGSPAGCGLACGCALALARRFCVASIFCDVTRGRGASGCLCCVVDLSGRAEGRVSFGPGRLWAWWAVSCVAPRWVSYLL

SEQ ID NO: 18511 - protein, 381 aa, Zea mays subsp. mays
  peptide (1)..(381): Ceres Seq. ID no. 13499300
MATAQPKLRPDYYAGVCPNLESIVRGAVRQSVALSPLAAPATLRLFFHDCAVRGCDASVMLIDPAGGDEWRSPDGVMLKPEGFSTVMSAKAAVDSDPQCRNIVSCADILALAARDSVFLSGGPDYEVELGRFDGRVSSGGSVVVPHGTFDLDQLNAFFSSLGLSQTDMIALSGGHTIGAASCGSFAYRVGADPAMDPALAQQVLARCPGGGPAGFAFLDATTPLRFDNEYYRNLLGGMGILASDQVLYADPRSRGAVERYAADQAAFFGDFAAAMTRLGRVGVRTAADGEIRRDCRFPNPQLMGSPAGCGLACGCALALARRFCVASIFCDVTRGRGASGCLCCVVDLSGRAEGRVSFGPGRLWAWWAVSCVAPRWVSYLL

SEQ ID NO: 18512 - DNA, 1773 bp, Zea mays subsp. mays; identical to SEQ ID NO: 3856
  misc_feature (1)..(1773): Ceres Seq. ID no. 12407294
  misc_feature (1)..(1773): Ortholog of  Ceres SEQ ID NO 13594345 as cited in SEQ ID NO 58043
  misc_feature (1)..(1773): Ortholog of  Ceres SEQ ID NO 12614112 as cited in SEQ ID NO 60891
  misc_feature (1)..(1773): Ortholog of  Ceres SEQ ID NO 14302832 as cited in SEQ ID NO 64926
  misc_feature (1)..(1773): Ortholog of  Ceres SEQ ID NO 12617417 as cited in SEQ ID NO 65089
  misc_feature (1)..(1773): Ortholog of  Ceres SEQ ID NO 13662880 as cited in SEQ ID NO 65422
  misc_feature (1)..(1773): Ortholog of  Ceres SEQ ID NO 13596089 as cited in SEQ ID NO 68373

SEQ ID NO: 18513 - protein, 532 aa, Zea mays subsp. mays; identical to SEQ ID NO: 3857
  peptide (1)..(532): Ceres Seq. ID no. 12407295
  misc_feature (274)..(274): Xaa is any aa, unknown or other

SEQ ID NO: 18514 - protein, 499 aa, Zea mays subsp. mays; identical to SEQ ID NO: 3858
  peptide (1)..(499): Ceres Seq. ID no. 12407296
  misc_feature (232)..(232): Xaa is any aa, unknown or other

SEQ ID NO: 18515 - protein, 496 aa, Zea mays subsp. mays; identical to SEQ ID NO: 3859
  peptide (1)..(496): Ceres Seq. ID no. 12407297
  misc_feature (229)..(229): Xaa is any aa, unknown or other

SEQ ID NO: 18516 - DNA, 1121 bp, Zea mays subsp. mays
  misc_feature (1)..(1121): Ceres Seq. ID no. 12359075
  misc_feature (1)..(1121): Ortholog of  Ceres SEQ ID NO 15180793 as cited in SEQ ID NO 0
accattgagccgagcatcctgcgagagcgagcaagagaatcacgacttataactagggttctccacaggtaccgagatacgaatagctagctaggatgatgctgcttgcactgcattctccatctaccggtaccgtcgcttggcgtcgtcgtcgtccggctccattacccgccatctcgcgccgcgctcgcattatccggccgtctccattcgctctgtccaccgcggcggccacggacacgagcaccggccatgccccggccacggccgatcgcgaggcgccgctactccagctcctccacagcggggtgcgggcagagtcgctgccgcggcacgtagggttggtgatcgatgggcacgcgagatgggcgcgcgccagggggctgtcggtgtcggagggccacgcggttgggcggcgcacggtggagcacacggtgcgactgtcgcgagcgtggggcatccgcgtgctcaccgtcttcgcctgctcccacgagaacatgacgacccgccccaaggcggagatggacttcttcatgcagctgtacgaggggtttatccgtgacaacgtcgaccagttctgcagggagggaatccggctgcatctcatcggcgactcgccgggattgccagcgtccctgctgcgcgcggcgagggaagccaaccagctggccacgcagagcgagtcggagatggtcctgatgctggccatgggctacagcgggcggcgggacatactgcgggcgtgccaagagctcgccacggaggtgcagcggaacctgctgaggccagaggacatcgacgaggcgctcatcgccgggaagctggggaccagtatcgccggcggcgagctctcttaccccgacctggtcatcaggaccagcggcgagctgcggctgagcaacttcctgctgtggcagtccgcattcgcggagctcttcttctctgacgtcatgtggccggattttggggaggacgagtacctcggggccttgcgttcctaccagaccagacaacggcgcttcggccaacgaaagtagagctcacttcttcttcttttttcctttcaaaatacaacaaacgaggaaataaaaagctacatcactactatatagatttgattc

SEQ ID NO: 18517 - protein, 313 aa, Zea mays subsp. mays
  peptide (1)..(313): Ceres Seq. ID no. 12359076
MMLLALHSPSTGTVAWRRRRPAPLPAISRRARIIRPSPFALSTAAATDTSTGHAPATADREAPLLQLLHSGVRAESLPRHVGLVIDGHARWARARGLSVSEGHAVGRRTVEHTVRLSRAWGIRVLTVFACSHENMTTRPKAEMDFFMQLYEGFIRDNVDQFCREGIRLHLIGDSPGLPASLLRAAREANQLATQSESEMVLMLAMGYSGRRDILRACQELATEVQRNLLRPEDIDEALIAGKLGTSIAGGELSYPDLVIRTSGELRLSNFLLWQSAFAELFFSDVMWPDFGEDEYLGALRSYQTRQRRFGQRK

SEQ ID NO: 18518 - protein, 312 aa, Zea mays subsp. mays
  peptide (1)..(312): Ceres Seq. ID no. 12359077
MLLALHSPSTGTVAWRRRRPAPLPAISRRARIIRPSPFALSTAAATDTSTGHAPATADREAPLLQLLHSGVRAESLPRHVGLVIDGHARWARARGLSVSEGHAVGRRTVEHTVRLSRAWGIRVLTVFACSHENMTTRPKAEMDFFMQLYEGFIRDNVDQFCREGIRLHLIGDSPGLPASLLRAAREANQLATQSESEMVLMLAMGYSGRRDILRACQELATEVQRNLLRPEDIDEALIAGKLGTSIAGGELSYPDLVIRTSGELRLSNFLLWQSAFAELFFSDVMWPDFGEDEYLGALRSYQTRQRRFGQRK

SEQ ID NO: 18519 - protein, 179 aa, Zea mays subsp. mays
  peptide (1)..(179): Ceres Seq. ID no. 12359078
MTTRPKAEMDFFMQLYEGFIRDNVDQFCREGIRLHLIGDSPGLPASLLRAAREANQLATQSESEMVLMLAMGYSGRRDILRACQELATEVQRNLLRPEDIDEALIAGKLGTSIAGGELSYPDLVIRTSGELRLSNFLLWQSAFAELFFSDVMWPDFGEDEYLGALRSYQTRQRRFGQRK

SEQ ID NO: 18520 - DNA, 922 bp, Zea mays subsp. mays
  misc_feature (1)..(922): Ceres Seq. ID no. 12358505
  misc_feature (1)..(922): Ortholog of  Ceres SEQ ID NO 15173936 as cited in SEQ ID NO 61736
  misc_feature (1)..(922): Ortholog of  Ceres SEQ ID NO 13596373 as cited in SEQ ID NO 67991
ccggcagtctgcgatcaaaccgcacgcaagcgaaccacagcgtgctcgccatctcactgactgtgacgacggcaacaagccagtgagcagctcgccatggcagcagtgtccaccgcgccggcgctcgaaggccgcatcgcgctcgtcaccggcggctcccggggcatcggccgcgaggtgtcgtcccacctcgccgcgctcggcgcgcgtgtcgtggtcaactacgccaccaacccggccaaggccgaggagctcgtcgcggagctcgcctcgcgcggcctccgcgccgtggccgtgcgcgcggacgtctccgatccggacgccgtgcgcgcgctcttcgaccgcgccgaggaggccttcgggtccccgccccacgtagtggtcgcctgcgcgggcatcatggacgccaagtaccccgcgctggtcgacactgccgtcgaggacttcgacgccacgttcgcggtgaacacgcgcggcaagttcctggtgtgccgggaggccgcccggcgcatcccccccaacagcggtgggcgcatcgtgacgttctcgtccacgacggttgccgtgctgccgccgggctacgcggcgtacgctgcgtccaacgccgctgtggaggcgatgacgaaggtcctggccaaggaggtggcgccgaaggggatcacggccaacgtggtggcgccgggccctgtgcgcacggagctcttccttgccgggaaggatgaggcgttcctagagagggtaaagaactccatgcgtatagccgagacgacagacatagcgcccgtggtggcgttcctggcgagcgaggcctcgggctgggtgaacgggcaggttatcagggtcaatgggggcgtcgcatgagtgcggcgttgttattattacctcattatctgccatggctttccaaggatgttgttttcct

SEQ ID NO: 18521 - protein, 254 aa, Zea mays subsp. mays
  peptide (1)..(254): Ceres Seq. ID no. 12358506
MAAVSTAPALEGRIALVTGGSRGIGREVSSHLAALGARVVVNYATNPAKAEELVAELASRGLRAVAVRADVSDPDAVRALFDRAEEAFGSPPHVVVACAGIMDAKYPALVDTAVEDFDATFAVNTRGKFLVCREAARRIPPNSGGRIVTFSSTTVAVLPPGYAAYAASNAAVEAMTKVLAKEVAPKGITANVVAPGPVRTELFLAGKDEAFLERVKNSMRIAETTDIAPVVAFLASEASGWVNGQVIRVNGGVA

SEQ ID NO: 18522 - protein, 153 aa, Zea mays subsp. mays
  peptide (1)..(153): Ceres Seq. ID no. 12358507
MDAKYPALVDTAVEDFDATFAVNTRGKFLVCREAARRIPPNSGGRIVTFSSTTVAVLPPGYAAYAASNAAVEAMTKVLAKEVAPKGITANVVAPGPVRTELFLAGKDEAFLERVKNSMRIAETTDIAPVVAFLASEASGWVNGQVIRVNGGVA

SEQ ID NO: 18523 - DNA, 1521 bp, Zea mays subsp. mays
  misc_feature (1)..(1521): Ceres Seq. ID no. 12375567
  misc_feature (1)..(1521): Ortholog of  Ceres SEQ ID NO 13654989 as cited in SEQ ID NO 63117
  misc_feature (1)..(1521): Ortholog of  Ceres SEQ ID NO 13657138 as cited in SEQ ID NO 65923
  misc_feature (1)..(1521): Ortholog of  Ceres SEQ ID NO 13584744 as cited in SEQ ID NO 69137
gcacgagaccattacctagaacatcctaatcaaaaagcgaaaccatcagcggattacataagccgacaggcaccggtcgttgcgtcttgctcatcagaacgctagctaggactaggagaagcttaacctctgcaaccaccgataagagttactactatttacataggagcggcagctgctaccgcgtgcgccggcgatggggtggtgggagaacgccaagagcgtgttcggcgacgccgggaacgtcggctgcttcccgaggatcgggaggaagcagtccaagaactcgtacgctttcccggcggatcctgggagcgagaaacggagagggtcaggcggccccgcccccgccccggaggaggtgatcacggtggaggtgccggaggtgcgcctgcgcgagctgaacgagatcacggcgtccttctcaggcgagaagctgatcgggcaagggtcctacgccaaggtctaccaggccacgacgcggaccggcaggctggccgtcgtcaagcggctggagaagccctccaagcacgcgtccaacgacgtcttcctcaagcagctcggggtggcgtccaggctcaagcacgacaacttcgtccgcctgctcgggtacaccatcagcggcgacctccgcgtgctggtctacgagttcgccaccatgggcaccctccacgacgtgcttcacggggacagggatgtgctgaggctaccgccgccggagcagctgggcagcgccgccaggccggtgctgagctggattcaccgcgtgcacatcgcgctggatgcggcgagggggctggagtacctgcacgagatggtgcagccgccggtgacgcacaaggacgtgcgctccaccaacgtcctgctgttcgacggcttcagggccaagatcgccgactacaacatgttcagccaggccgcggacatggccaggctcaaccgctccacgcacacgctcggttccttcggctaccaggcgcccgagtacgccatgacgggccagatgacggacaagagcgacgtgtacagcttcggcatcgttctcctggagctcctgacgggtaggaagccattggaccggacgctgccgccgggccagcgaagcctggtgaactgggcaactccgatgctgacggaagacagggttcaggaatgcatcgatccgcaacttggtgatcagtatcctcctgctggagctgtcaagctcgggcgaatcgcggtgcagtgcctgcagtacgaccccaccttccggccgtccatgggcaccgtcgcccgcgtcatcaactacgccgtcttgcgagaccagcagggcgtcgtctgatttgatggcatgccgaattttgctactatagctgtgaatatcatgcatgtcttgctgtgctatatgttatgtaagctgagcagcggttattatctgagaatggatactatccttggaagcagcacggaatggttgcggttacgaccatgcataaaacaatgggctagtttgtaatatcaatatatttttctctgagaatg

SEQ ID NO: 18524 - protein, 374 aa, Zea mays subsp. mays
  peptide (1)..(374): Ceres Seq. ID no. 12375568
MGWWENAKSVFGDAGNVGCFPRIGRKQSKNSYAFPADPGSEKRRGSGGPAPAPEEVITVEVPEVRLRELNEITASFSGEKLIGQGSYAKVYQATTRTGRLAVVKRLEKPSKHASNDVFLKQLGVASRLKHDNFVRLLGYTISGDLRVLVYEFATMGTLHDVLHGDRDVLRLPPPEQLGSAARPVLSWIHRVHIALDAARGLEYLHEMVQPPVTHKDVRSTNVLLFDGFRAKIADYNMFSQAADMARLNRSTHTLGSFGYQAPEYAMTGQMTDKSDVYSFGIVLLELLTGRKPLDRTLPPGQRSLVNWATPMLTEDRVQECIDPQLGDQYPPAGAVKLGRIAVQCLQYDPTFRPSMGTVARVINYAVLRDQQGVV

SEQ ID NO: 18525 - protein, 220 aa, Zea mays subsp. mays
  peptide (1)..(220): Ceres Seq. ID no. 12375569
MGTLHDVLHGDRDVLRLPPPEQLGSAARPVLSWIHRVHIALDAARGLEYLHEMVQPPVTHKDVRSTNVLLFDGFRAKIADYNMFSQAADMARLNRSTHTLGSFGYQAPEYAMTGQMTDKSDVYSFGIVLLELLTGRKPLDRTLPPGQRSLVNWATPMLTEDRVQECIDPQLGDQYPPAGAVKLGRIAVQCLQYDPTFRPSMGTVARVINYAVLRDQQGVV

SEQ ID NO: 18526 - DNA, 1336 bp, Zea mays subsp. mays
  misc_feature (1)..(1336): Ceres Seq. ID no. 12376632
  misc_feature (1)..(1336): Ortholog of  Ceres SEQ ID NO 12609045 as cited in SEQ ID NO 51314
  misc_feature (1)..(1336): Ortholog of  Ceres SEQ ID NO 13657914 as cited in SEQ ID NO 66230
  misc_feature (1)..(1336): Ortholog of  Ceres SEQ ID NO 13595877 as cited in SEQ ID NO 67702
  misc_feature (1)..(1336): Ortholog of  Ceres SEQ ID NO 13654367 as cited in SEQ ID NO 67993
gcacgagaccattacctagaacatcctaatcgaaaaatcagttcagtaagttcagccttcttgacttgtacagttgtactgaggtaggtctcgtctgagttggcaacgaccatgcctgccgtctcggccgccgcctgctgcgccgccacaacgccggcaaacgaggtggcggaggacctcctcggcttcctccgcgttctcagagacggcaccgtgctccggtcgccggcggacccagtgttctgcccggccaccttccccggcagccacccgtccgtgcagtggaaggaggccgtctacgacaagcccaagaacctccgcgtccgcgtgtacaggccgacgacgccgccggggacgaagaagaagctcccagtgctcgtccacttccacggcggcggcttctgcctggggtcgtgcacgtgggccaacgtccacgagttctgcctccgcctggccgcggaggccggcgccgtcgtgctctccgcgggataccgcctggcccccgagcaccgcctccccgcggccttcgacgacggggccgggttcatgcgctggctccgggaccagtcagcgatcggcggcgccggcgcctccgacgcctggctcgcggaggccgccgatttcggccgcgtgctcgtcaccggcgactcggcgggcgccacgatcgcgcaccacctcgccgtgcgcgccgnnctcggccgcggcggagccagagccggagccggagccgggcctcctcacggtccgcggctacgttctgctcatgccgttcttcggcggcgtccggcgcacggcctcggaggccgagtgcgcggaggaggcgttcccgaaccttgacctggtggaccggttctggaggctgtcgctgccggccggcgccaccagggaccacccggcgtccaacccgttcgggccggacagccctgacctgggcccggtggacttccggtccgtgctcgtggtggccggcggcctcgacctgatacgcgaccgcaccgtcgactacgccgagcggctggcggcgatgggcaagcccgtggagctcgccgagttcgccggcatgccccacgggttctacctgcaccagccggggtcccaggccaccggcgagctcatccagaccgtcgcccggttcgtccacgtcgttgcgccagaggctgcggcttaatttactcggcatatgcatgcatccgtgcatgtatcccgtttcttgtcgtcgtgttgtggttcactcgtatacctcatcttttttctcttatgaaattcttgtagagtaaaacccttctctctctgatgtctcggttgaatgatccaaataatggaccactggtttggg

SEQ ID NO: 18527 - protein, 241 aa, Zea mays subsp. mays
  peptide (1)..(241): Ceres Seq. ID no. 12376633
  misc_feature (194)..(194): Xaa is any aa, unknown or other
MPAVSAAACCAATTPANEVAEDLLGFLRVLRDGTVLRSPADPVFCPATFPGSHPSVQWKEAVYDKPKNLRVRVYRPTTPPGTKKKLPVLVHFHGGGFCLGSCTWANVHEFCLRLAAEAGAVVLSAGYRLAPEHRLPAAFDDGAGFMRWLRDQSAIGGAGASDAWLAEAADFGRVLVTGDSAGATIAHHLAVRAXLGRGGARAGAGAGPPHGPRLRSAHAVLRRRPAHGLGGRVRGGGVPEP

SEQ ID NO: 18528 - protein, 134 aa, Zea mays subsp. mays
  peptide (1)..(134): Ceres Seq. ID no. 12376634
MPFFGGVRRTASEAECAEEAFPNLDLVDRFWRLSLPAGATRDHPASNPFGPDSPDLGPVDFRSVLVVAGGLDLIRDRTVDYAERLAAMGKPVELAEFAGMPHGFYLHQPGSQATGELIQTVARFVHVVAPEAAA

SEQ ID NO: 18529 - DNA, 454 bp, Zea mays subsp. mays
  misc_feature (1)..(454): Ceres Seq. ID no. 12637897
  misc_feature (1)..(454): Ortholog of  Ceres SEQ ID NO 15226273 as cited in SEQ ID NO 64934
  misc_feature (1)..(454): Ortholog of  Ceres SEQ ID NO 12617639 as cited in SEQ ID NO 65219
cactcgcgtccgcccccgccgccgcctttcgtcccagcccctaaaccattctccattcctctcatcagtttagcacaatggcactggctaataagcttggtggtctgctcaagaaagccacaagttcaaatctgtctgtctaccaagcaatcagatgcatgtcatccaagctctttgttggagggatttcttatcaaactgatgatcacagtctcagggacgagtttgccaaatatgggcaagtcattgaagctaggattatcattgaccttgaatctgggaggtctagaggttttggctttgtaacttacacgtcttctgaggaggcttcagctgccattactgccttggatggaaagactctcgatggacggagcatacgtgttaatcatgctaacgagaagacaggtgcgccaagagcaaggcgagtcgcgagaggaagatgctaggaggg

SEQ ID NO: 18530 - protein, 123 aa, Zea mays subsp. mays
  peptide (1)..(123): Ceres Seq. ID no. 12637898
MALANKLGGLLKKATSSNLSVYQAIRCMSSKLFVGGISYQTDDHSLRDEFAKYGQVIEARIIIDLESGRSRGFGFVTYTSSEEASAAITALDGKTLDGRSIRVNHANEKTGAPRARRVARGRC

SEQ ID NO: 18531 - protein, 101 aa, Zea mays subsp. mays
  peptide (1)..(101): Ceres Seq. ID no. 12637899
HSRPPPPPPFVPAPKPFSIPLISLAQWHWLISLVVCSRKPQVQICLSTKQSDACHPSSLLEGFLIKLMITVSGTSLPNMGKSLKLGLSLTLNLGGLEVLAL

SEQ ID NO: 18532 - protein, 96 aa, Zea mays subsp. mays
  peptide (1)..(96): Ceres Seq. ID no. 12637900
MSSKLFVGGISYQTDDHSLRDEFAKYGQVIEARIIIDLESGRSRGFGFVTYTSSEEASAAITALDGKTLDGRSIRVNHANEKTGAPRARRVARGRC

SEQ ID NO: 18533 - DNA, 1481 bp, Zea mays subsp. mays
  misc_feature (1)..(1481): Ceres Seq. ID no. 12381705
  misc_feature (1)..(1481): Ortholog of  Ceres SEQ ID NO 13655684 as cited in SEQ ID NO 63866
gcacgagaccattacctagaacatcctaatcgaaaaattgccatctctacccacacgccacacacgcccaccgcatcggagcagaacccaccaaaccctacgtcgccgcggcggtcggagcgggcagggaccctggactggaggatggtggcgatctcgatgtaccgcggcaacctccacattggcggccccgacagcggcgcctctgccccgcgccgatgggaggcgccccggccgaccctcgacgtgaagcggttccgccgcctcctgcgcaaccgcttccgtgctgtcgcgcgcctcgccgggacgccgctggggcaggcctccccgtcctcctcgggcatggatggcggccgtggcgccgcggaccccgagcgggaggcaccggacgaggagggaggagcgggcgacgggggagaagaggagcaggagcagttgcagcacgaccaggaccaggaccagcaacatcaggaggagcaggggaacgtggaggcggaggcggaggatccggaacagcaggaggaagaagaggagggggcggtggaggacgcggacatggaagatgcgggggaggtagtcgttgatggcgatgcggaagaaggtcagggtgaaagtgaaggtgttgacccaaagccggaggaggaggcgagttatcctgatggaattgatgacaagaacagaaaacttaatgaaaagctggacgccctaaataaaaagaagcatggccttgtgcagatgctgaagcaggtcttaaatgctgaagaagaaatccgaaggcgcaacatgcaggcttcattgcgcgctgccatgccccagccatcagaaaacgcaacagatggaagttctgtttctaggttggcccctagaatgactgttgatgtcaattttggtgatgttgctggcgattcagatgctggttccaaccagggcactcctggacgccccttgcatcacttccacagtatctctccttcaacagcctcttttgcgaggtcaccgtttggttctctacagggccacactccaaggagtccggcaacattctctacggcaagtccatcacgcttcgccacaaatatacacccaggacaacctcctgctctttattcagcatcgttgccaggaagtaactatgtagccacatcaccttccccggccgcatctggtggttcctcctcggtgttcagggaccctcggccacctaactctacataggttctatgctttgctcggagttctactcattggtaatgttgctaaattctctacccagggatttaggtaatgtcgtgcttcgggcaacactagtgttaaaacaaattcgtgtctctgtgaacggtaaataacgtgatagcactgaaattcaaaattagtatattaatttcacaattatattatattaaaaacaaggcttgtactcggtctaggggaaagatcacctccaatcgttgccccgactaattgcaaacttcccttttccc

SEQ ID NO: 18534 - protein, 404 aa, Zea mays subsp. mays
  peptide (1)..(404): Ceres Seq. ID no. 12381706
ARDHYLEHPNRKIAISTHTPHTPTASEQNPPNPTSPRRSERAGTLDWRMVAISMYRGNLHIGGPDSGASAPRRWEAPRPTLDVKRFRRLLRNRFRAVARLAGTPLGQASPSSSGMDGGRGAADPEREAPDEEGGAGDGGEEEQEQLQHDQDQDQQHQEEQGNVEAEAEDPEQQEEEEEGAVEDADMEDAGEVVVDGDAEEGQGESEGVDPKPEEEASYPDGIDDKNRKLNEKLDALNKKKHGLVQMLKQVLNAEEEIRRRNMQASLRAAMPQPSENATDGSSVSRLAPRMTVDVNFGDVAGDSDAGSNQGTPGRPLHHFHSISPSTASFARSPFGSLQGHTPRSPATFSTASPSRFATNIHPGQPPALYSASLPGSNYVATSPSPAASGGSSSVFRDPRPPNST

SEQ ID NO: 18535 - protein, 356 aa, Zea mays subsp. mays
  peptide (1)..(356): Ceres Seq. ID no. 12381707
MVAISMYRGNLHIGGPDSGASAPRRWEAPRPTLDVKRFRRLLRNRFRAVARLAGTPLGQASPSSSGMDGGRGAADPEREAPDEEGGAGDGGEEEQEQLQHDQDQDQQHQEEQGNVEAEAEDPEQQEEEEEGAVEDADMEDAGEVVVDGDAEEGQGESEGVDPKPEEEASYPDGIDDKNRKLNEKLDALNKKKHGLVQMLKQVLNAEEEIRRRNMQASLRAAMPQPSENATDGSSVSRLAPRMTVDVNFGDVAGDSDAGSNQGTPGRPLHHFHSISPSTASFARSPFGSLQGHTPRSPATFSTASPSRFATNIHPGQPPALYSASLPGSNYVATSPSPAASGGSSSVFRDPRPPNST

SEQ ID NO: 18536 - protein, 351 aa, Zea mays subsp. mays
  peptide (1)..(351): Ceres Seq. ID no. 12381708
MYRGNLHIGGPDSGASAPRRWEAPRPTLDVKRFRRLLRNRFRAVARLAGTPLGQASPSSSGMDGGRGAADPEREAPDEEGGAGDGGEEEQEQLQHDQDQDQQHQEEQGNVEAEAEDPEQQEEEEEGAVEDADMEDAGEVVVDGDAEEGQGESEGVDPKPEEEASYPDGIDDKNRKLNEKLDALNKKKHGLVQMLKQVLNAEEEIRRRNMQASLRAAMPQPSENATDGSSVSRLAPRMTVDVNFGDVAGDSDAGSNQGTPGRPLHHFHSISPSTASFARSPFGSLQGHTPRSPATFSTASPSRFATNIHPGQPPALYSASLPGSNYVATSPSPAASGGSSSVFRDPRPPNST

SEQ ID NO: 18537 - DNA, 534 bp, Zea mays subsp. mays
  misc_feature (1)..(534): Ceres Seq. ID no. 12417822
  misc_feature (1)..(534): Ortholog of  Ceres SEQ ID NO 13654557 as cited in SEQ ID NO 68444
ccgaggcctaagatgtccaacgctgacctgggcaggatcatcaactctgacgaggtgcagtctgtggtgaagccactcaacaaggaagtgaagcgcagggagaagaggaagaacccactcaagaacatggctgctgtgctcaaactcaacccctacctcggcactgcccggaagatggccacccttgctgaggctgctcgtgtgaaggccaggaaggcgaagctcgactccaagaggaccaagcttaccccggagactgccaaggttaaggctgctggcaaggcatggtacaagaccatggtctcggacagcgactacaccgagtttgagaacttctcaaagtggctcggcgtgactcagtgagcggcaagggtagttaagttttgagtagctcagcttatgttgagaggaaagaggatccatcaaatctgttttatcctgcatcatcataacaagttgctacaagtcttgcatgttcgtgttgtttgtgcatttccgcgagaacatagtatttttatattcgaaccagttgtc

SEQ ID NO: 18538 - protein, 120 aa, Zea mays subsp. mays
  peptide (1)..(120): Ceres Seq. ID no. 12417823
PRPKMSNADLGRIINSDEVQSVVKPLNKEVKRREKRKNPLKNMAAVLKLNPYLGTARKMATLAEAARVKARKAKLDSKRTKLTPETAKVKAAGKAWYKTMVSDSDYTEFENFSKWLGVTQ

SEQ ID NO: 18539 - protein, 116 aa, Zea mays subsp. mays
  peptide (1)..(116): Ceres Seq. ID no. 12417824
MSNADLGRIINSDEVQSVVKPLNKEVKRREKRKNPLKNMAAVLKLNPYLGTARKMATLAEAARVKARKAKLDSKRTKLTPETAKVKAAGKAWYKTMVSDSDYTEFENFSKWLGVTQ

SEQ ID NO: 18540 - protein, 78 aa, Zea mays subsp. mays
  peptide (1)..(78): Ceres Seq. ID no. 12417825
MAAVLKLNPYLGTARKMATLAEAARVKARKAKLDSKRTKLTPETAKVKAAGKAWYKTMVSDSDYTEFENFSKWLGVTQ

SEQ ID NO: 18541 - DNA, 1022 bp, Zea mays subsp. mays
  misc_feature (1)..(1022): Ceres Seq. ID no. 12355114
  misc_feature (1)..(1022): Ortholog of  Ceres SEQ ID NO 12611884 as cited in SEQ ID NO 51018
  misc_feature (1)..(1022): Ortholog of  Ceres SEQ ID NO 12609839 as cited in SEQ ID NO 52022
  misc_feature (1)..(1022): Ortholog of  Ceres SEQ ID NO 13638885 as cited in SEQ ID NO 55803
  misc_feature (1)..(1022): Ortholog of  Ceres SEQ ID NO 12587429 as cited in SEQ ID NO 63113
  misc_feature (1)..(1022): Ortholog of  Ceres SEQ ID NO 12615635 as cited in SEQ ID NO 63133
  misc_feature (1)..(1022): Ortholog of  Ceres SEQ ID NO 13654441 as cited in SEQ ID NO 67814
aataccagagcattagacgatcgtactttgtgaggcgctggtctcttgcacagactcggagcaagataggcctagctggttacaagccaagaacaagtagagcggtagagggaaaatatatctggagagggaaacaatggcgggcgaggagggtcttaaggtcctcggcctgcaggtgagcccgttcgtgctccgcgtgtgcttggcgctgaacatgaaaggagtgagttacgagtacgtcgaggaggacatatccaacaagagtgagctcctgctcaagtccaacccggtgcacaagaaggtgcccgtgctcatccacaacggtaagcccatctgcgagtcactcgtcatcatgcagtacgtcgacgagctgttcgccggccggccgatcctcccaaccgacccctacgagcgcgccactgctcgcttctgggctgcctacgccgacgacaagttgtttccagcgtggtacggcatggtgaaggcccagccggaggaggagagggcggagaaggcgaaggagacgctcgccgccatcgagcacatggaagtgaccttcgccaagtgctccggcggcaacgccttcttcggtggcgactccatcggctacgtcgacatcgtgctgacgtgctcggctccttcttgttctggttcgaggcggtgcgcagggttttcgacctggagatcattaacgctagcaagactccgctgttggctgcgtgggcggagcggtttgtagggactgtagaagcgaaggaggtggtgccgttgcccacggcggacatggcggtacagtacatcaataagcttcatgcccccctgccgccgccatgagttcacaatgagtcgtgtaagtgtaaccaagcagggaaaaaggtaaatggtgcggtgctttggtccaaattccaaccgaataatgttcaaagcttatattgataggcttgggttgttgtcatcaaatattgtggttcagtcgtctcctctgcaataaatataaatatgattattactttctttgccgt

SEQ ID NO: 18542 - protein, 200 aa, Zea mays subsp. mays
  peptide (1)..(200): Ceres Seq. ID no. 12355115
MAGEEGLKVLGLQVSPFVLRVCLALNMKGVSYEYVEEDISNKSELLLKSNPVHKKVPVLIHNGKPICESLVIMQYVDELFAGRPILPTDPYERATARFWAAYADDKLFPAWYGMVKAQPEEERAEKAKETLAAIEHMEVTFAKCSGGNAFFGGDSIGYVDIVLTCSAPSCSGSRRCAGFSTWRSLTLARLRCWLRGRSGL

SEQ ID NO: 18543 - protein, 174 aa, Zea mays subsp. mays
  peptide (1)..(174): Ceres Seq. ID no. 12355116
MKGVSYEYVEEDISNKSELLLKSNPVHKKVPVLIHNGKPICESLVIMQYVDELFAGRPILPTDPYERATARFWAAYADDKLFPAWYGMVKAQPEEERAEKAKETLAAIEHMEVTFAKCSGGNAFFGGDSIGYVDIVLTCSAPSCSGSRRCAGFSTWRSLTLARLRCWLRGRSGL

SEQ ID NO: 18544 - protein, 128 aa, Zea mays subsp. mays
  peptide (1)..(128): Ceres Seq. ID no. 12355117
MQYVDELFAGRPILPTDPYERATARFWAAYADDKLFPAWYGMVKAQPEEERAEKAKETLAAIEHMEVTFAKCSGGNAFFGGDSIGYVDIVLTCSAPSCSGSRRCAGFSTWRSLTLARLRCWLRGRSGL

SEQ ID NO: 18545 - DNA, 635 bp, Zea mays subsp. mays
  misc_feature (1)..(635): Ceres Seq. ID no. 12417963
  misc_feature (1)..(635): Ortholog of  Ceres SEQ ID NO 13595054 as cited in SEQ ID NO 56253
  misc_feature (1)..(635): Ortholog of  Ceres SEQ ID NO 14305152 as cited in SEQ ID NO 0
ggactgcgatggctcgtgcgctcggcgcttgcgtgctgctcgccgtcctgctcggtgccctggcggcggcggccgcgcgcggcccacgacgaccagggcagcggggccggcatacggcagccgagcggcgagtaccgcgggaggaaggtgggggccaggacggaggtgcgggacgtggagggcgacggcgaggtgcaggagctcggccggttctccgtcgccgagtacaaccggcagctccgagaaggcggcggcaggctcgagttcggcagggtggtggcggcgcagcggcaggtggtgtcggggctcaagtactacctccgcgtcgtggccgtggaggagggcggcggcgcggggaacggcggcgagcgcgtgttcgacgccgtcgtcgtcgtcaagccctggctcgactcgcgcaccctgctcacgttcgcgccggcggccgccaagtaagcgcggcgctaccgccggtgtagacgtctagtgtagtatctctggtctgcccttctcggagaccatggacgctgaataaagtcttgtgtgttttgtataagcgaagcgtactagagagtgaagatggacgaactctgcgctgccgcgcgcagatcgatgttttttttttcaaaggctgttgc

SEQ ID NO: 18546 - protein, 160 aa, Zea mays subsp. mays
  peptide (1)..(160): Ceres Seq. ID no. 12417964
DCDGSCARRLRAARRPARCPGGGGRARPTTTRAAGPAYGSRAASTAGGRWGPGRRCGTWRATARCRSSAGSPSPSTTGSSEKAAAGSSSAGWWRRSGRWCRGSSTTSASWPWRRAAARGTAASACSTPSSSSSPGSTRAPCSRSRRRPPSKRGATAGVDV

SEQ ID NO: 18547 - protein, 157 aa, Zea mays subsp. mays
  peptide (1)..(157): Ceres Seq. ID no. 12417965
TAMARALGACVLLAVLLGALAAAAARGPRRPGQRGRHTAAERRVPREEGGGQDGGAGRGGRRRGAGARPVLRRRVQPAAPRRRRQARVRQGGGGAAAGGVGAQVLPPRRGRGGGRRRGERRRARVRRRRRRQALARLAHPAHVRAGGRQVSAALPPV

SEQ ID NO: 18548 - protein, 155 aa, Zea mays subsp. mays
  peptide (1)..(155): Ceres Seq. ID no. 12417966
MARALGACVLLAVLLGALAAAAARGPRRPGQRGRHTAAERRVPREEGGGQDGGAGRGGRRRGAGARPVLRRRVQPAAPRRRRQARVRQGGGGAAAGGVGAQVLPPRRGRGGGRRRGERRRARVRRRRRRQALARLAHPAHVRAGGRQVSAALPPV

SEQ ID NO: 18549 - protein, 150 aa, Zea mays subsp. mays
  peptide (1)..(150): Ceres Seq. ID no. 12417967
GLRWLVRSALACCSPSCSVPWRRRPRAAHDDQGSGAGIRQPSGEYRGRKVGARTEVRDVEGDGEVQELGRFSVAEYNRQLREGGGRLEFGRVVAAQRQVVSGLKYYLRVVAVEEGGGAGNGGERVFDAVVVVKPWLDSRTLLTFAPAAAK

SEQ ID NO: 18550 - DNA, 456 bp, Zea mays subsp. mays; identical to SEQ ID NO: 15556
  misc_feature (1)..(456): Ceres Seq. ID no. 12595566
  misc_feature (1)..(456): Ortholog of  Ceres SEQ ID NO 14305657 as cited in SEQ ID NO 52544

SEQ ID NO: 18551 - protein, 151 aa, Zea mays subsp. mays; identical to SEQ ID NO: 15557
  peptide (1)..(151): Ceres Seq. ID no. 12595567

SEQ ID NO: 18552 - protein, 120 aa, Zea mays subsp. mays; identical to SEQ ID NO: 15558
  peptide (1)..(120): Ceres Seq. ID no. 12595568

SEQ ID NO: 18553 - protein, 96 aa, Zea mays subsp. mays; identical to SEQ ID NO: 15559
  peptide (1)..(96): Ceres Seq. ID no. 12595569

SEQ ID NO: 18554 - DNA, 992 bp, Zea mays subsp. mays
  misc_feature (1)..(992): Ceres Seq. ID no. 12391473
  misc_feature (1)..(992): Ortholog of  Ceres SEQ ID NO 13638849 as cited in SEQ ID NO 52046
  misc_feature (1)..(992): Ortholog of  Ceres SEQ ID NO 13599613 as cited in SEQ ID NO 0
  misc_feature (1)..(992): Ortholog of  Ceres SEQ ID NO 15179570 as cited in SEQ ID NO 0
gcacgagaccattacctagaacatcctaatcgaaaagatcgaagtgtgcttgcgtcctgatcccaccaaccgcagaggacagaggaccatggagagcggcacggagcggcggcggcaccacttcgtgctggtgcacggcacctgccacggcgcgtggtgctggtacaaggtggccaccctcctgtcatccgcgggccaccgcgtgacggcgctggacatggccgcgtgcggcgccagccccgggcgcgccgaggaggtgccgtcctttgaggagtacagccgcccgctcctggccacggtggccggcctggcgcccgaggagaaggtggtcctcgtcggccacagcttcggcggggtcagcctcgcgctggccatggagcagtacccggacagggtcgccgtcgccgtcttcgtcgcgaccggcatgccctccgctgggaagccgatggcgttcgtcttcgagcagtttttgcaagaagagtacccagcggaccgctacatggactgcgaattcgaaaccagcggcgacccccagcgtcccgtggagacatttcggttcgggccacagtacctgaagcagagactgtaccagctcagccccccagaggatttgaccctggcaatggcgatgttgaggccgtcacagcggttccgagacgacgcgacgatgaaggggggcgtcctgacggcggagcggtacggcggcgtgaggcgggtgtgcgtcgtcgccgaggacgacgcgtcagtgccggcaggcttcctgcggcggatggcgtcgtggaaccccggcacggaggtgagggggttgcagggagccgatcatatgtccatgctctcgaaaccaggggagctgtcagaacttctcatggaggttgccaacaagtacagctgaaacttgtatcatgtaaatggctatcagcaaaatggttgttcaggtacgcttgtttcagatgaacaaatggagacggaagtttgaagtaacacgatgaaat

SEQ ID NO: 18555 - protein, 267 aa, Zea mays subsp. mays
  peptide (1)..(267): Ceres Seq. ID no. 12391474
MESGTERRRHHFVLVHGTCHGAWCWYKVATLLSSAGHRVTALDMAACGASPGRAEEVPSFEEYSRPLLATVAGLAPEEKVVLVGHSFGGVSLALAMEQYPDRVAVAVFVATGMPSAGKPMAFVFEQFLQEEYPADRYMDCEFETSGDPQRPVETFRFGPQYLKQRLYQLSPPEDLTLAMAMLRPSQRFRDDATMKGGVLTAERYGGVRRVCVVAEDDASVPAGFLRRMASWNPGTEVRGLQGADHMSMLSKPGELSELLMEVANKYS

SEQ ID NO: 18556 - protein, 224 aa, Zea mays subsp. mays
  peptide (1)..(224): Ceres Seq. ID no. 12391475
MAACGASPGRAEEVPSFEEYSRPLLATVAGLAPEEKVVLVGHSFGGVSLALAMEQYPDRVAVAVFVATGMPSAGKPMAFVFEQFLQEEYPADRYMDCEFETSGDPQRPVETFRFGPQYLKQRLYQLSPPEDLTLAMAMLRPSQRFRDDATMKGGVLTAERYGGVRRVCVVAEDDASVPAGFLRRMASWNPGTEVRGLQGADHMSMLSKPGELSELLMEVANKYS

SEQ ID NO: 18557 - protein, 172 aa, Zea mays subsp. mays
  peptide (1)..(172): Ceres Seq. ID no. 12391476
MEQYPDRVAVAVFVATGMPSAGKPMAFVFEQFLQEEYPADRYMDCEFETSGDPQRPVETFRFGPQYLKQRLYQLSPPEDLTLAMAMLRPSQRFRDDATMKGGVLTAERYGGVRRVCVVAEDDASVPAGFLRRMASWNPGTEVRGLQGADHMSMLSKPGELSELLMEVANKYS

SEQ ID NO: 18558 - DNA, 717 bp, Zea mays subsp. mays
  misc_feature (1)..(717): Ceres Seq. ID no. 12384292
  misc_feature (1)..(717): Ortholog of  Ceres SEQ ID NO 13599324 as cited in SEQ ID NO 0
gcacgagaccattacctagaacatcctaatcaaaaacagaagtgtgctcgaaggtcgggctctgcacgttcgatgggacacgcggagtaagtgctgctggcatcgagagtgtaccgggatccgtagacggcatggcggaagctctatgcaacgcgtgcgagatagtagtgttctggacgcaaagcgagctgagcccgaacaggagcaacgagggcacgctggagtacgtggacaggctctgcgaaagcatgcccgatccggtggggtcgcgcgtggactgcggacgcgtgggttccctgcagaccgttgcgttcagcatcggtggaagggcgttcgagctccggcctgaccagtacgtcctcaaggtcggcgaggggttcgccgcgcactgcatcagcgggttcacggctctggacgtgccccctccggtaggccctctgtggatactgggtgacgtcttcatggagcctaccataccatctttgactacggcaagatgaggatcgggttcgcagattccgcgtgagacacgggcgttcttccactaatgaccgcgaccactatagctgcagtatgttcctcagagaagccctgcgtggtgtagtgctggattttcactactacgccctgcagagcttttctcgagcttctgtagagcacatacactacgcgcaggacaaatgtgtatcgctgcatcgagaaagaaataaaggaaac

SEQ ID NO: 18559 - protein, 122 aa, Zea mays subsp. mays
  peptide (1)..(122): Ceres Seq. ID no. 12384293
MAEALCNACEIVVFWTQSELSPNRSNEGTLEYVDRLCESMPDPVGSRVDCGRVGSLQTVAFSIGGRAFELRPDQYVLKVGEGFAAHCISGFTALDVPPPVGPLWILGDVFMEPTIPSLTTAR

SEQ ID NO: 18560 - protein, 83 aa, Zea mays subsp. mays
  peptide (1)..(83): Ceres Seq. ID no. 12384294
MPDPVGSRVDCGRVGSLQTVAFSIGGRAFELRPDQYVLKVGEGFAAHCISGFTALDVPPPVGPLWILGDVFMEPTIPSLTTAR

SEQ ID NO: 18561 - protein, 67 aa, Zea mays subsp. mays
  peptide (1)..(67): Ceres Seq. ID no. 12384295
MQRVRDSSVLDAKRAEPEQEQRGHAGVRGQALRKHARSGGVARGLRTRGFPADRCVQHRWKGVRAPA

SEQ ID NO: 18562 - DNA, 1047 bp, Zea mays subsp. mays; identical to SEQ ID NO: 5732
  misc_feature (1)..(1047): Ceres Seq. ID no. 12565996
  misc_feature (1)..(1047): Ortholog of  Ceres SEQ ID NO 13587439 as cited in SEQ ID NO 0

SEQ ID NO: 18563 - protein, 282 aa, Zea mays subsp. mays; identical to SEQ ID NO: 5733
  peptide (1)..(282): Ceres Seq. ID no. 12565997

SEQ ID NO: 18564 - protein, 194 aa, Zea mays subsp. mays; identical to SEQ ID NO: 5734
  peptide (1)..(194): Ceres Seq. ID no. 12565998

SEQ ID NO: 18565 - protein, 189 aa, Zea mays subsp. mays; identical to SEQ ID NO: 5735
  peptide (1)..(189): Ceres Seq. ID no. 12565999

SEQ ID NO: 18566 - DNA, 651 bp, Zea mays subsp. mays
  misc_feature (1)..(651): Ceres Seq. ID no. 12381563
  misc_feature (1)..(651): Ortholog of  Ceres SEQ ID NO 12589728 as cited in SEQ ID NO 0
acacaactgatgagaatgagccgttacaggcaatgatgaaagaccagttcgcaaactatgtggtgcagaaggttctggagatatgtgatgaccagaaccgtgaattgattctttcccgtatcaaggtccacttgaatgcactgaaaagatacacctatgggaagcatatcgtggcacgtgttgagaagcttattgctgcaggagaacgggcgcattggtgccccatcctcttgctgagatggcaataaagctatatacaggtcgcagaataacacctgtacagacagacagggatagcgaggcctagctttttaccattactagtagtcggtaatattgagcgacggagaggttaaaaaaggctcccaaatcctttgatgtaaataaaggatagccgctggaaataaataaaaagaatgagaaaagatgaagagattttgcttgtccttgagggaagagttgtatatttgtgtggtttattttcccctcttgaagcagatggataaatgttttaggatcatagatgatgggaagcaagggcagctgtagattatcctttctttttttccttgggtttcattagtcaatgtataatgtattaatgttcatggtgatgctaatctctgtaaagcctgccttgagtttnctgac

SEQ ID NO: 18567 - protein, 81 aa, Zea mays subsp. mays
  peptide (1)..(81): Ceres Seq. ID no. 12381564
TTDENEPLQAMMKDQFANYVVQKVLEICDDQNRELILSRIKVHLNALKRYTYGKHIVARVEKLIAAGERAHWCPILLLRWQ

SEQ ID NO: 18568 - protein, 71 aa, Zea mays subsp. mays
  peptide (1)..(71): Ceres Seq. ID no. 12381565
MMKDQFANYVVQKVLEICDDQNRELILSRIKVHLNALKRYTYGKHIVARVEKLIAAGERAHWCPILLLRWQ

SEQ ID NO: 18569 - protein, 70 aa, Zea mays subsp. mays
  peptide (1)..(70): Ceres Seq. ID no. 12381566
MKDQFANYVVQKVLEICDDQNRELILSRIKVHLNALKRYTYGKHIVARVEKLIAAGERAHWCPILLLRWQ

SEQ ID NO: 18570 - DNA, 929 bp, Zea mays subsp. mays
  misc_feature (1)..(929): Ceres Seq. ID no. 12418011
  misc_feature (1)..(929): Ortholog of  Ceres SEQ ID NO 14315045 as cited in SEQ ID NO 52345
  misc_feature (1)..(929): Ortholog of  Ceres SEQ ID NO 15170171 as cited in SEQ ID NO 67284
tgttctgatgctacagttgttcttggtgctgttggtaaggtagtaaaagtggagcattgtgaaagagtgcatatcattgcagctgcaaaacggatttgtattgccaactgccgggaatgcatcttctacataggagtaaatcaccaacctcttgtgttgggggacaaccataaattacaagttgctccattcaatacgtgctacccacaactgcatgaacatatgatacaagtggctgtcgatcccagtgtcaacaaatgggaccaaccttttgtgttgggagttgttgatccacatgattcattatcccatcctgctggagtttcagatgttaaagctgaatcagcaacatgtctggatcctgatctattcaccaattttttgattcctagttggtttggggatgaaaatcaagggcctacaaactgcaatcctttcccactgcctgaaatttatgggacatcccaaagcaaaaagcgttctgctctggaagatatccaaaaaggatgattcgggagctgcagcttgatgagaaccggaaaagggaattggcaactgcccttcacgttcagttcaaggattggttatacgcttcaggcaatatccgccagctctactgtctacagggcgattaacgatgggatttgcaagactgactatccttttgccgactccaaaacattcgacaattgtcgaaagctgaccttccttccctgggagagaggattcccacccgcgcagaaggatgtgaagatgtactgttacctacttttttacagattcatttgggtattccctttgctgcgagttggaggtactaattaggatgtaatctccaagcctactcatttttttggcccttgataacgtccacgagtatgtaatagggggactgatggatcatacgttgttgaataaacatttcttct

SEQ ID NO: 18571 - protein, 169 aa, Zea mays subsp. mays
  peptide (1)..(169): Ceres Seq. ID no. 12418012
CSDATVVLGAVGKVVKVEHCERVHIIAAAKRICIANCRECIFYIGVNHQPLVLGDNHKLQVAPFNTCYPQLHEHMIQVAVDPSVNKWDQPFVLGVVDPHDSLSHPAGVSDVKAESATCLDPDLFTNFLIPSWFGDENQGPTNCNPFPLPEIYGTSQSKKRSALEDIQKG

SEQ ID NO: 18572 - protein, 98 aa, Zea mays subsp. mays
  peptide (1)..(98): Ceres Seq. ID no. 12418013
MRTGKGNWQLPFTFSSRIGYTLQAISASSTVYRAINDGICKTDYPFADSKTFDNCRKLTFLPWERGFPPAQKDVKMYCYLLFYRFIWVFPLLRVGGTN

SEQ ID NO: 18573 - protein, 95 aa, Zea mays subsp. mays
  peptide (1)..(95): Ceres Seq. ID no. 12418014
MIQVAVDPSVNKWDQPFVLGVVDPHDSLSHPAGVSDVKAESATCLDPDLFTNFLIPSWFGDENQGPTNCNPFPLPEIYGTSQSKKRSALEDIQKG

SEQ ID NO: 18574 - DNA, 783 bp, Zea mays subsp. mays
  misc_feature (1)..(783): Ceres Seq. ID no. 12379672
  misc_feature (1)..(783): Ortholog of  Ceres SEQ ID NO 12610267 as cited in SEQ ID NO 51993
  misc_feature (1)..(783): Ortholog of  Ceres SEQ ID NO 13495070 as cited in SEQ ID NO 53216
  misc_feature (1)..(783): Ortholog of  Ceres SEQ ID NO 13661333 as cited in SEQ ID NO 61620
  misc_feature (1)..(783): Ortholog of  Ceres SEQ ID NO 13596812 as cited in SEQ ID NO 62283
  misc_feature (1)..(783): Ortholog of  Ceres SEQ ID NO 13623021 as cited in SEQ ID NO 0
agattccaactctgcgagaaaagctaaaataatcggacccatctcttggaccgtgcgatcgcccccctccgccgccgcccacggatcaacgccacgccaccacgccggaagaccgggatcgtgacggccacatggacatggctacggcggccgccgcgttgccatggggaggcggttccccggcgtggatcgacgtgcctgagcggagcaagagcgcgttcatggagctgaagcggaggaaggtccaccggtatgtgatcttcaagatcgacgacagtagagaggaggtcgtcgtcgacaagatcggcgcgcccggggagagctacgacgacttcacggcgtcgctaccgaccgatgattgccggtacgccgtctacgatctggatttcgtaagcgacgacaactgccggaaaagcaagattttcttcatctcctggtctccttcagattctcgcatccgtgccaagaccatatatgccgtgtcaaggaaccaattccgtcatgagcttgacggagtgcacttcgagatccaagccaccgatcccgatgacatgaatctagaagttctcagggggcgtgctaacagaacctgattcactagcgagcaacccaaaatgcagctcggaggtcgctgatctgatgaggcatgacgtagaagtataggctgccgatcacacccgggcatgcattgtttctttttacttcttcctttccttttggagttatacttccgtgatgtttgcctaactacataggttccctctaatatgatgtggactgtgg

SEQ ID NO: 18575 - protein, 153 aa, Zea mays subsp. mays
  peptide (1)..(153): Ceres Seq. ID no. 12379673
MDMATAAAALPWGGGSPAWIDVPERSKSAFMELKRRKVHRYVIFKIDDSREEVVVDKIGAPGESYDDFTASLPTDDCRYAVYDLDFVSDDNCRKSKIFFISWSPSDSRIRAKTIYAVSRNQFRHELDGVHFEIQATDPDDMNLEVLRGRANRT

SEQ ID NO: 18576 - protein, 151 aa, Zea mays subsp. mays
  peptide (1)..(151): Ceres Seq. ID no. 12379674
MATAAAALPWGGGSPAWIDVPERSKSAFMELKRRKVHRYVIFKIDDSREEVVVDKIGAPGESYDDFTASLPTDDCRYAVYDLDFVSDDNCRKSKIFFISWSPSDSRIRAKTIYAVSRNQFRHELDGVHFEIQATDPDDMNLEVLRGRANRT

SEQ ID NO: 18577 - protein, 123 aa, Zea mays subsp. mays
  peptide (1)..(123): Ceres Seq. ID no. 12379675
MELKRRKVHRYVIFKIDDSREEVVVDKIGAPGESYDDFTASLPTDDCRYAVYDLDFVSDDNCRKSKIFFISWSPSDSRIRAKTIYAVSRNQFRHELDGVHFEIQATDPDDMNLEVLRGRANRT

SEQ ID NO: 18578 - DNA, 464 bp, Zea mays subsp. mays
  misc_feature (1)..(464): Ceres Seq. ID no. 2789088
  misc_feature (1)..(464): Ortholog of  Ceres SEQ ID NO 12583413 as cited in SEQ ID NO 56816
  misc_feature (1)..(464): Ortholog of  Ceres SEQ ID NO 15168480 as cited in SEQ ID NO 57927
  misc_feature (1)..(464): Ortholog of  Ceres SEQ ID NO 15177738 as cited in SEQ ID NO 0
gacttccctgggcgcgtccgtgcaggtcgggatggagttctgggcgcggtgggcgcaccgggcgctatggcacgcctccctgtggcacatgcacgagtcgcaccaccggtcgtgcgagggcccattcgagctcaacgacgtgttcgccatcgtcaacgccgtgccggccatctccctcctcggtgacgtcgcgagcagatacaccatatggacaattttgagggcgtcccgtatgggctcttcctgggaccaaaggagctggaggaggtcggtggcctggacgagctggaaaaggagctcgcgcgaatcggccagaccatctgatggatttgtccggattccggcgcggcgatctccgctccgctccgtgattccggcgcagcctcatggttggggagccgacgaccagaacctccagaagggatttggtttggatgcgcgagcgtagatcttgacctgcattt

SEQ ID NO: 18579 - protein, 148 aa, Zea mays subsp. mays
  peptide (1)..(148): Ceres Seq. ID no. 2789089
TSLGASVQVGMEFWARWAHRALWHASLWHMHESHHRSCEGPFELNDVFAIVNAVPAISLLGDVASRYTIWTILRASRMGSSWDQRSWRRSVAWTSWKRSSRESARPSDGFVRIPARRSPLRSVIPAQPHGWGADDQNLQKGFGLDARA

SEQ ID NO: 18580 - protein, 138 aa, Zea mays subsp. mays
  peptide (1)..(138): Ceres Seq. ID no. 2789090
MEFWARWAHRALWHASLWHMHESHHRSCEGPFELNDVFAIVNAVPAISLLGDVASRYTIWTILRASRMGSSWDQRSWRRSVAWTSWKRSSRESARPSDGFVRIPARRSPLRSVIPAQPHGWGADDQNLQKGFGLDARA

SEQ ID NO: 18581 - protein, 119 aa, Zea mays subsp. mays
  peptide (1)..(119): Ceres Seq. ID no. 2789091
MHESHHRSCEGPFELNDVFAIVNAVPAISLLGDVASRYTIWTILRASRMGSSWDQRSWRRSVAWTSWKRSSRESARPSDGFVRIPARRSPLRSVIPAQPHGWGADDQNLQKGFGLDARA

SEQ ID NO: 18582 - DNA, 1036 bp, Zea mays subsp. mays
  misc_feature (1)..(1036): Ceres Seq. ID no. 12350771
  misc_feature (1)..(1036): Ortholog of  Ceres SEQ ID NO 13660872 as cited in SEQ ID NO 60830
ctaaacccaatcccccttccaccccaccgacaaggagatcttccgcggcagtagtccccgccgcgtgctcgtcggcatgaagaagacgctcgtcttctacacgggccgcgcgccgcgcggaggcaagacgccgtgggtcatgcacgagtaccgcctcgagggcagcctgccgcccaacctccaccgcggggccaaggacgaatgggctgtgtgtaaggtgatcaacaaagacttggcgggcaaggctgggcagcaacaaatggcgccgccgcacgccgtgtccgtgggcatggagcgcagcgactcgctggccttcctcgacgacctggtgctcgacaacgccgacgacctgcccccgctcatcgactcgacaacgtacgccgcggcggggacgaccacgacgacgaacgacgacagcggcgggtaccaacaagccaccaaggcggagccgcagccgcatctgcccgcgccgagcaacagcccgtaccagcagcaggccatacggaggcactgcaaggcggaggcgccggcgccggcgatggttctgagcccgtcgcgcgagacgccgggcgcggacatgttccagctccagcatgtggacgagctgctccagctggacggcggcttcatggaggactactacaacatgaacatgtggaaggtctagttaggccgctcggatcgtcggttgcctggcggatgatggattgattagttggttgattggattaacctgttattagacgaagaggagtggaaaggccggccgcgccgattggcatggacgaggtctgtctgacgaagatgtgtcgagacctcgccggcggtgtggtttgtgataattggttagttagctaatcttcattagctagctagctagctagctactgattagaacagctagcagtagtgtgtaaccgcgcgcgtgtcgttgcctctgctggtcgagaggattgaagcacgcatgtgtacataataataggtaggagtcgtcgtcgttgagtgatgagaaaaatgaatgaaacatactatntgt

SEQ ID NO: 18583 - protein, 196 aa, Zea mays subsp. mays
  peptide (1)..(196): Ceres Seq. ID no. 12350772
MKKTLVFYTGRAPRGGKTPWVMHEYRLEGSLPPNLHRGAKDEWAVCKVINKDLAGKAGQQQMAPPHAVSVGMERSDSLAFLDDLVLDNADDLPPLIDSTTYAAAGTTTTTNDDSGGYQQATKAEPQPHLPAPSNSPYQQQAIRRHCKAEAPAPAMVLSPSRETPGADMFQLQHVDELLQLDGGFMEDYYNMNMWKV

SEQ ID NO: 18584 - protein, 175 aa, Zea mays subsp. mays
  peptide (1)..(175): Ceres Seq. ID no. 12350773
MHEYRLEGSLPPNLHRGAKDEWAVCKVINKDLAGKAGQQQMAPPHAVSVGMERSDSLAFLDDLVLDNADDLPPLIDSTTYAAAGTTTTTNDDSGGYQQATKAEPQPHLPAPSNSPYQQQAIRRHCKAEAPAPAMVLSPSRETPGADMFQLQHVDELLQLDGGFMEDYYNMNMWKV

SEQ ID NO: 18585 - protein, 135 aa, Zea mays subsp. mays
  peptide (1)..(135): Ceres Seq. ID no. 12350774
MAPPHAVSVGMERSDSLAFLDDLVLDNADDLPPLIDSTTYAAAGTTTTTNDDSGGYQQATKAEPQPHLPAPSNSPYQQQAIRRHCKAEAPAPAMVLSPSRETPGADMFQLQHVDELLQLDGGFMEDYYNMNMWKV

SEQ ID NO: 18586 - DNA, 699 bp, Zea mays subsp. mays
  misc_feature (1)..(699): Ceres Seq. ID no. 12381542
  misc_feature (1)..(699): Ortholog of  Ceres SEQ ID NO 13660334 as cited in SEQ ID NO 67468
agaggaaaacgcactgccaacggagtcaggtgcggcgggaggtagcatgagggagcagcaggattccggcgacgtgacggggcgccggggcggggtcatcaggtcgctgctgggcgtcgagcgccggcttgcggagggcgacgcggacgccgagggggcgctcggagcctcctcggagaagcagcatttggccgcggacagcggcgaggagaggaaggcggtggtgagggtggtggcggctgacatgccgcccgcgctgcagcgccgcgcgttccgctgcgcccgcgacgagctcgcggcgatgccgcacttcccgcgccggctcgagcccaagcgcctcgcgctggcgctcaagaaggagtttgatactgcttacgggccagcttggcactgcatcgtggggacgagtttcggttcgtatgtcacgcacgcccggggtggtttcttgtatttttccgtcgataaggtctacatcctgctnttcaggacagccgtggagccctcgaatcattgacggccaccggcctgccagcaatggaccaatggctcataaaaacgcgcagttcttgggacagcttgcaccaaattcagttgttcagtcagctaggccgagcccttgtaacttgtaaatcgcattgtttcttggtaggcaaatgtaaactactccttatgcttctgataaaatttaacatttcagtc

SEQ ID NO: 18587 - protein, 170 aa, Zea mays subsp. mays
  peptide (1)..(170): Ceres Seq. ID no. 12381543
  misc_feature (160)..(160): Xaa is any aa, unknown or other
EENALPTESGAAGGSMREQQDSGDVTGRRGGVIRSLLGVERRLAEGDADAEGALGASSEKQHLAADSGEERKAVVRVVAADMPPALQRRAFRCARDELAAMPHFPRRLEPKRLALALKKEFDTAYGPAWHCIVGTSFGSYVTHARGGFLYFSVDKVYILXFRTAVEPSNH

SEQ ID NO: 18588 - protein, 155 aa, Zea mays subsp. mays
  peptide (1)..(155): Ceres Seq. ID no. 12381544
  misc_feature (145)..(145): Xaa is any aa, unknown or other
MREQQDSGDVTGRRGGVIRSLLGVERRLAEGDADAEGALGASSEKQHLAADSGEERKAVVRVVAADMPPALQRRAFRCARDELAAMPHFPRRLEPKRLALALKKEFDTAYGPAWHCIVGTSFGSYVTHARGGFLYFSVDKVYILXFRTAVEPSNH

SEQ ID NO: 18589 - protein, 89 aa, Zea mays subsp. mays
  peptide (1)..(89): Ceres Seq. ID no. 12381545
  misc_feature (79)..(79): Xaa is any aa, unknown or other
MPPALQRRAFRCARDELAAMPHFPRRLEPKRLALALKKEFDTAYGPAWHCIVGTSFGSYVTHARGGFLYFSVDKVYILXFRTAVEPSNH

SEQ ID NO: 18590 - DNA, 941 bp, Zea mays subsp. mays
  misc_feature (1)..(941): Ceres Seq. ID no. 12369394
  misc_feature (1)..(941): Ortholog of  Ceres SEQ ID NO 12611884 as cited in SEQ ID NO 51018
  misc_feature (1)..(941): Ortholog of  Ceres SEQ ID NO 12609093 as cited in SEQ ID NO 52008
  misc_feature (1)..(941): Ortholog of  Ceres SEQ ID NO 12609839 as cited in SEQ ID NO 52022
  misc_feature (1)..(941): Ortholog of  Ceres SEQ ID NO 13638931 as cited in SEQ ID NO 52200
  misc_feature (1)..(941): Ortholog of  Ceres SEQ ID NO 13638885 as cited in SEQ ID NO 55803
  misc_feature (1)..(941): Ortholog of  Ceres SEQ ID NO 12587429 as cited in SEQ ID NO 63113
  misc_feature (1)..(941): Ortholog of  Ceres SEQ ID NO 12615635 as cited in SEQ ID NO 63133
  misc_feature (1)..(941): Ortholog of  Ceres SEQ ID NO 12586351 as cited in SEQ ID NO 64028
  misc_feature (1)..(941): Ortholog of  Ceres SEQ ID NO 14301603 as cited in SEQ ID NO 67721
  misc_feature (1)..(941): Ortholog of  Ceres SEQ ID NO 13654441 as cited in SEQ ID NO 67814
  misc_feature (1)..(941): Ortholog of  Ceres SEQ ID NO 12585194 as cited in SEQ ID NO 68878
  misc_feature (1)..(941): Ortholog of  Ceres SEQ ID NO 12589186 as cited in SEQ ID NO 0
gttaacacgcaaacgcaagctcccaagcagctaccaaccagccgggagagggagcgcacgcactgcgagaatggccacggccggcggaggggccgggcatctgaagctgctgggcgcgtggccgagccccttcgtgaaccgtgtacgcatggcgctgcacctcaaggggctggagtacgagaacgtggaggaggacctcaccaacaagagcgacctgctcctcgcctccaaccccgtccacaagctcgttcccgtcctcctccacggcgacaagcccatctccgagtcactcgtcatcgtggagtacctcgacgacgccttccccggcgctggccaggccgtcctccccgccgacccctatgaacgcgccgtcgctcgcttctgggccaaatacgtcgacggcaagttgcacggcatgatggtgaaggcgctcatgggggcaacggaggaggagagggcgacggcgacggtggacgcgctggccgctatggacacgctggagggcgcgttcgccgagtgctccggcgggaaaaagttcttcgccggcgacgcgcccgggtacctggacgtcgcgctgggaggcttcatcggctggctgcgcgcctgggacaaggtggggggcgtcaagctgctggacgccggccgggtcccgcgcctggccacgtgggcggagcgcttcgccgcgctcgacgtagccaaggaggtcatcccggaccccgaccacatcgccgagtttgccaaggtgctgcaggcacgctccgcggcagctgccaccagcaactgagctcgcaagtgaatgctgctgctctgccttcctgataaaatcatatcatggtacccggtttgttcgtttaatctggcgcggaaaaaacatggtttgttgtcgtaccaaactaagagtatgcatgcatgcttgttcttaattatatgtacattcgttc

SEQ ID NO: 18591 - protein, 260 aa, Zea mays subsp. mays
  peptide (1)..(260): Ceres Seq. ID no. 12369395
LTRKRKLPSSYQPAGRGSARTARMATAGGGAGHLKLLGAWPSPFVNRVRMALHLKGLEYENVEEDLTNKSDLLLASNPVHKLVPVLLHGDKPISESLVIVEYLDDAFPGAGQAVLPADPYERAVARFWAKYVDGKLHGMMVKALMGATEEERATATVDALAAMDTLEGAFAECSGGKKFFAGDAPGYLDVALGGFIGWLRAWDKVGGVKLLDAGRVPRLATWAERFAALDVAKEVIPDPDHIAEFAKVLQARSAAAATSN

SEQ ID NO: 18592 - protein, 237 aa, Zea mays subsp. mays
  peptide (1)..(237): Ceres Seq. ID no. 12369396
MATAGGGAGHLKLLGAWPSPFVNRVRMALHLKGLEYENVEEDLTNKSDLLLASNPVHKLVPVLLHGDKPISESLVIVEYLDDAFPGAGQAVLPADPYERAVARFWAKYVDGKLHGMMVKALMGATEEERATATVDALAAMDTLEGAFAECSGGKKFFAGDAPGYLDVALGGFIGWLRAWDKVGGVKLLDAGRVPRLATWAERFAALDVAKEVIPDPDHIAEFAKVLQARSAAAATSN

SEQ ID NO: 18593 - protein, 211 aa, Zea mays subsp. mays
  peptide (1)..(211): Ceres Seq. ID no. 12369397
MALHLKGLEYENVEEDLTNKSDLLLASNPVHKLVPVLLHGDKPISESLVIVEYLDDAFPGAGQAVLPADPYERAVARFWAKYVDGKLHGMMVKALMGATEEERATATVDALAAMDTLEGAFAECSGGKKFFAGDAPGYLDVALGGFIGWLRAWDKVGGVKLLDAGRVPRLATWAERFAALDVAKEVIPDPDHIAEFAKVLQARSAAAATSN

SEQ ID NO: 18594 - DNA, 1288 bp, Zea mays subsp. mays
  misc_feature (1)..(1288): Ceres Seq. ID no. 12360617
  misc_feature (1)..(1288): Ortholog of  Ceres SEQ ID NO 15225613 as cited in SEQ ID NO 649
  misc_feature (1)..(1288): Ortholog of  Ceres SEQ ID NO 13647762 as cited in SEQ ID NO 20426
  misc_feature (1)..(1288): Ortholog of  Ceres SEQ ID NO 15171289 as cited in SEQ ID NO 51570
gcacgagaccattacctagaacatcctaatcgaaaaaagctctctcatccagctaactaatggaagtagctagcaaacgtacgtattcttcttcaccatctgtttcttggggaaattaaaccccagtacgcgtacgtcacaatcgcgcgcaatggagaaggagaaggagaagtccagggccaggccgtcgaggggccactggcggcccggcgaggacgacaagctgcggcagctcgtcgacaagtacggcccgcggaactggaactccattgctgagagtctggaggggagatcaggcaagagctgccggctacgatggttcaaccagcttgacccgcggatcaaccggcggcccttcacggtggcggaggaggagctgctcctgcgggcgcaccgcgcccacggcaaccgctgggcgatcatctcccgcctcttcccgggccgcaccgacaacgccgtcaagaaccactggcacgtcgtcatggcgcgccgccgccgccgtaccctcgtcggcgaggccgcagccatcggctctgtcgttgtaccgcctcgtcatcagtacttccattttggaagctgctcgccgccgccgccgacccgctcgctgtgcttcgcggtgcctgcaggtttcggtccgctcggactcagcagaccagctgcaagttgcggtgtcaggaactgcaatgtgcccactgccgtcgcattactggacgacggccatcgtcatgacatgagcaaagaccttggtggcgacgatgacaatggcggtgatgcgcttgcaaagaggaaggacgtgcaattcttcgacttcttgggcgtcgggatctaaagcaaaataatgatgctactaatggtacattaattagtacactacatttcaacgatacactattggggtcttcttttccgtcgaagattcttttaaaaaacatcttcgacaaaatgatacaaaggatcaccgaagccaccttcagtctcgatttatctcctcaagacgaagactctgtatagagccgacagtgcaagatgccgaagctcaatggcctcagcccacatcaagcaaggaaggaaaaaggactagataggccttattggttttaattacttgtaaacaagtgttcaagggcatggatgtaattttaccgggctgcgtcccgtgactataaatagatgaacagtaccccgaccgtactattcacgctggattgtaatcactctcgcatcatcctcgttctctcaccttttggcaagccgaaagtaccaatataatatgaatattgttgatgtt

SEQ ID NO: 18595 - protein, 225 aa, Zea mays subsp. mays
  peptide (1)..(225): Ceres Seq. ID no. 12360618
MEKEKEKSRARPSRGHWRPGEDDKLRQLVDKYGPRNWNSIAESLEGRSGKSCRLRWFNQLDPRINRRPFTVAEEELLLRAHRAHGNRWAIISRLFPGRTDNAVKNHWHVVMARRRRRTLVGEAAAIGSVVVPPRHQYFHFGSCSPPPPTRSLCFAVPAGFGPLGLSRPAASCGVRNCNVPTAVALLDDGHRHDMSKDLGGDDDNGGDALAKRKDVQFFDFLGVGI

SEQ ID NO: 18596 - protein, 115 aa, Zea mays subsp. mays
  peptide (1)..(115): Ceres Seq. ID no. 12360619
MARRRRRTLVGEAAAIGSVVVPPRHQYFHFGSCSPPPPTRSLCFAVPAGFGPLGLSRPAASCGVRNCNVPTAVALLDDGHRHDMSKDLGGDDDNGGDALAKRKDVQFFDFLGVGI

SEQ ID NO: 18597 - DNA, 1260 bp, Zea mays subsp. mays
  misc_feature (1)..(1260): Ceres Seq. ID no. 12368126
  misc_feature (1)..(1260): Ortholog of  Ceres SEQ ID NO 12636774 as cited in SEQ ID NO 372
  misc_feature (1)..(1260): Ortholog of  Ceres SEQ ID NO 13582350 as cited in SEQ ID NO 56734
  misc_feature (1)..(1260): Ortholog of  Ceres SEQ ID NO 12476493 as cited in SEQ ID NO 58163
  misc_feature (1)..(1260): Ortholog of  Ceres SEQ ID NO 12582113 as cited in SEQ ID NO 58349
  misc_feature (1)..(1260): Ortholog of  Ceres SEQ ID NO 12615466 as cited in SEQ ID NO 62761
  misc_feature (1)..(1260): Ortholog of  Ceres SEQ ID NO 14314080 as cited in SEQ ID NO 63105
  misc_feature (1)..(1260): Ortholog of  Ceres SEQ ID NO 13597295 as cited in SEQ ID NO 63743
  misc_feature (1)..(1260): Ortholog of  Ceres SEQ ID NO 12617090 as cited in SEQ ID NO 64005
  misc_feature (1)..(1260): Ortholog of  Ceres SEQ ID NO 13597439 as cited in SEQ ID NO 64081
  misc_feature (1)..(1260): Ortholog of  Ceres SEQ ID NO 13599438 as cited in SEQ ID NO 0
agtcaaacaaattgtttactagcctaagtgtaagagcagcacgatggtgcatcaggctcagggacagatggtgcaggaggtggccgccgccggcctccccgcgctgccgagccggtacgtgctgagggaggaggaccgcccaactggtgacgtcgcggcacccgagttggccttccccaccgtggacgtcaatgtcttgccgaccccggtgacgtggaggaggccagcaagctccggtcggcgctcgaatcctggggcctcttcaaggtgaccggccacggcatgccggtatccctgctggacggcatccgggacgccgggctggagttcttccacctgccagcggcggagaagctgaagcacgccaaccgggacgacgccggcgagttccagcccgagggttacggcatcgaccgcgtggacaccgacggtcaggtgctggactggtgcgaccggctgtacctgacggtgcagccggaggaggagcggcggatgcagttctggcccgcgcggccggcgtcgctcgtggggctcctgcacgagtacgccctgggcagcgagcaggtggccaggcgcgtgctccgggccatggcgcgggtgctggggttcggcgaggggttcttcctcgggcacgtgggcgagaagggcggcacgtacgcgcggttcacctactaccctccctgcccgcgcccggacctcgtgtacgggctgaagccccacacggacaactccgtcgtcaccgtgctcctcctcgaccgcgacgtcggcggcctccaggtgctgctcagggggcctggccccggcccggtgggtggacgtgcccgtgctcgcccgcgacgagctgctcgtcgtcgtcggcgaggagatggagatcatgagcaacgcggtgttcagggcgcccacgcaccgcgtggtcaccagcggcagggagaggatgtcgctcgtgctcttctaccagccggagccgcacaaggacctgcagcccgcggaggagctggtgagcgaggaccggcccgcgatttacaggaggctcaaggccaagaccttcggcgacgggttctgggatgcgttcgcgctcggcgagcgcaccatcgacttcctcaacatcaaggtcgacgacaaggagcatggaggcggattagtaacctcagcgccagcttgacgccatgcatgtgaacgaactactgtacacgatgtatcactggtagtgtaatgtaataagagacatggagcggttttccatgcaatataatctagttt

SEQ ID NO: 18598 - protein, 297 aa, Zea mays subsp. mays
  peptide (1)..(297): Ceres Seq. ID no. 12368127
MPVSLLDGIRDAGLEFFHLPAAEKLKHANRDDAGEFQPEGYGIDRVDTDGQVLDWCDRLYLTVQPEEERRMQFWPARPASLVGLLHEYALGSEQVARRVLRAMARVLGFGEGFFLGHVGEKGGTYARFTYYPPCPRPDLVYGLKPHTDNSVVTVLLLDRDVGGLQVLLRGPGPGPVGGRARARPRRAARRRRRGDGDHEQRGVQGAHAPRGHQRQGEDVARALLPAGAAQGPAARGGAGERGPARDLQEAQGQDLRRRVLGCVRARRAHHRLPQHQGRRQGAWRRISNLSASLTPCM

SEQ ID NO: 18599 - protein, 227 aa, Zea mays subsp. mays
  peptide (1)..(227): Ceres Seq. ID no. 12368128
MQFWPARPASLVGLLHEYALGSEQVARRVLRAMARVLGFGEGFFLGHVGEKGGTYARFTYYPPCPRPDLVYGLKPHTDNSVVTVLLLDRDVGGLQVLLRGPGPGPVGGRARARPRRAARRRRRGDGDHEQRGVQGAHAPRGHQRQGEDVARALLPAGAAQGPAARGGAGERGPARDLQEAQGQDLRRRVLGCVRARRAHHRLPQHQGRRQGAWRRISNLSASLTPCM

SEQ ID NO: 18600 - protein, 195 aa, Zea mays subsp. mays
  peptide (1)..(195): Ceres Seq. ID no. 12368129
MARVLGFGEGFFLGHVGEKGGTYARFTYYPPCPRPDLVYGLKPHTDNSVVTVLLLDRDVGGLQVLLRGPGPGPVGGRARARPRRAARRRRRGDGDHEQRGVQGAHAPRGHQRQGEDVARALLPAGAAQGPAARGGAGERGPARDLQEAQGQDLRRRVLGCVRARRAHHRLPQHQGRRQGAWRRISNLSASLTPCM

SEQ ID NO: 18601 - DNA, 1487 bp, Zea mays subsp. mays
  misc_feature (1)..(1487): Ceres Seq. ID no. 12363475
  misc_feature (1)..(1487): Ortholog of  Ceres SEQ ID NO 12613725 as cited in SEQ ID NO 68196
gcacgagaccattacctagaacatcctaatcgaaaaatgtgtgtgtatatatatgcacaaataaataaataaataaataatataaagaacaatcgtctacgcgcaggaccgcgccggctggggcgccgccaccgtcgcgctcgccgccgtcatggccgcctcgctcgccgtcttcctcgccggccgccggtactaccgctacagggtgcccgagggcagcccgctcacgccgctgctccaggtcctcgtcgccgccttccggaataggcggctcccgttgccggacgacgacgccgagctgtacgaggtcaggcggccgcagagtagcaagaggaggctgctttgccacacctaccagctgaggttcctcgacaaggcagccatagtggagcccggcgccggcgaggacgcctgcgggccgtggcggctggcgacggtgacgcaggtggaggagacgaagctggtgctggcgatggtgcccatctgggtgtgcacgctgcccttcgggcatggcggtggcgcaggtgtccaccttcttcatcaagcagggcagcgtgatggaccgtcgcctgggcccgcacttggaggccccggcggcgtcggtgttcgcgctgtcggcggtggccatgatcgccacggtggcggcctacgacaaggcgctggtgccgtacctgcggcgcgccacgggaggggagcgcgggatcagcatccttgggcgcgtgggcatcggcatggcgttcgccatcgcggggctgggcgtggcggcggcggtggagcggcggcgcctgctgtcggcgggcgccgcgcggccgtcgacgtcggtgctgtggctggtgccgcagttcgcgctgatgggcgtggccgacgggttcgcgctggtgggcctgcaggagtacttctacgagcaggtccccgacggcatgcgcagcctgggcatcggcctctacctcagcgtcattggcgccgggagcttcctgancagcctggtgatcaacggcggcggaccgcgccagctcccgcggagggcgcnccggctggttcgccaaggacctcaaccgcagcaggctggacctcttctactggctgctggcgtgcatcagcgccgtcaacctggcattctacgcgctggtcgccaccaagtgctcgtacaagcagaccgtcagggccggcagggtcggcgacgaggtcgagtgcgccgccgcgtagctgctgctgtacgtggtggtcatgaaaccaaccatgcatcagccgcacgaccatgtgtattattattattattataggggctaatagtaactagctactcgttgatcgtgttgttgttctagctagcttgggtacaagtagtacattcatgccacgtcgtgttgtatatgctgctcgtagacgttggtgtatatatgtgtactggcgcgtcgtcgaaacaatacgtgtacaagtactgtttggttcgttgtagcagcgatttatcagctaaattaattact

SEQ ID NO: 18602 - protein, 359 aa, Zea mays subsp. mays
  peptide (1)..(359): Ceres Seq. ID no. 12363476
  misc_feature (276)..(276): Xaa is any aa, unknown or other
  misc_feature (293)..(293): Xaa is any aa, unknown or other
MAASLAVFLAGRRYYRYRVPEGSPLTPLLQVLVAAFRNRRLPLPDDDAELYEVRRPQSSKRRLLCHTYQLRFLDKAAIVEPGAGEDACGPWRLATVTQVEETKLVLAMVPIWVCTLPFGHGGGAGVHLLHQAGQRDGPSPGPALGGPGGVGVRAVGGGHDRHGGGLRQGAGAVPAARHGRGARDQHPWARGHRHGVRHRGAGRGGGGGAAAPAVGGRRAAVDVGAVAGAAVRADGRGRRVRAGGPAGVLLRAGPRRHAQPGHRPLPQRHWRRELPXQPGDQRRRTAPAPAEGXPAGSPRTSTAAGWTSSTGCWRASAPSTWHSTRWSPPSARTSRPSGPAGSATRSSAPPRSCCCTWWS

SEQ ID NO: 18603 - protein, 257 aa, Zea mays subsp. mays
  peptide (1)..(257): Ceres Seq. ID no. 12363477
  misc_feature (157)..(157): Xaa is any aa, unknown or other
  misc_feature (174)..(174): Xaa is any aa, unknown or other
MAVAQVSTFFIKQGSVMDRRLGPHLEAPAASVFALSAVAMIATVAAYDKALVPYLRRATGGERGISILGRVGIGMAFAIAGLGVAAAVERRRLLSAGAARPSTSVLWLVPQFALMGVADGFALVGLQEYFYEQVPDGMRSLGIGLYLSVIGAGSFLXSLVINGGGPRQLPRRAXRLVRQGPQPQQAGPLLLAAGVHQRRQPGILRAGRHQVLVQADRQGRQGRRRGRVRRRVAAAVRGGHETNHASAARPCVLLLLL

SEQ ID NO: 18604 - protein, 252 aa, Zea mays subsp. mays
  peptide (1)..(252): Ceres Seq. ID no. 12363478
  misc_feature (169)..(169): Xaa is any aa, unknown or other
  misc_feature (186)..(186): Xaa is any aa, unknown or other
MVPIWVCTLPFGHGGGAGVHLLHQAGQRDGPSPGPALGGPGGVGVRAVGGGHDRHGGGLRQGAGAVPAARHGRGARDQHPWARGHRHGVRHRGAGRGGGGGAAAPAVGGRRAAVDVGAVAGAAVRADGRGRRVRAGGPAGVLLRAGPRRHAQPGHRPLPQRHWRRELPXQPGDQRRRTAPAPAEGXPAGSPRTSTAAGWTSSTGCWRASAPSTWHSTRWSPPSARTSRPSGPAGSATRSSAPPRSCCCTWWS

SEQ ID NO: 18605 - DNA, 1573 bp, Zea mays subsp. mays
  misc_feature (1)..(1573): Ceres Seq. ID no. 12391535
  misc_feature (1)..(1573): Ortholog of  Ceres SEQ ID NO 13655463 as cited in SEQ ID NO 69035
  misc_feature (1)..(1573): Ortholog of  Ceres SEQ ID NO 15180063 as cited in SEQ ID NO 0
atccatcactcacgagcaggatcgagtcgaggcctcagctccctcctcggcgtcctcgcaacgaaggaaaggaacaatgtcagcggctcgtcgtcggtccccaatccccgttctcctcttcttcctcctcctccactccgcgtcgccgagccccatcaagacggtggtggtgctggtgatggagaaccgctccttcgaccacattctggggtggatgaagcggctgaacccggagatcgacggcgtgacggggcgggagtggaacccggccaacgcgtcggacccggcggcggggcgcgtctacttccgcgacggcgccgcgtacgtggacccggacccgggccactcgttccaggagatccggcagcaggtcttcggctccgacgacgacgccgcggacaacccgccccgcatggacggcttcgcgcagcaggcgcgctccatcggcggcggcgccatgtccgacgccgtcatgcgcggcttcaaccccgccgacgtcgccgtctaccgcgagctcgtctcgcagttcgccgtctgcgaccgatggttcgcgtccgtgccgtcgtccacgcagcccaaccgcctgttcgtgcactccggaacgtccggcggcgccaccagcaacaacccgacgctgctggcggagggctacccgcagcggaccatcttcgacaacctccacgacgccggcctctccttcggcgtctacttccaggacgtgccggcggtgctcttctaccggaacctccgcaagctcaagtacctgctggacttccacccgctgcgcccctccttcgccgaccacgcccgccgcgggacgctccccaactacgccgtcatcacctacgacgagcacggcggcttcttcgaccacgtgcccacgcccgtcgccggcgtgcccagccccgacggcatcgtcggcccgccgccctacaacttcaccttcgaccgcctcggcgtccgcgtcccggccatcctcgtgtccccctggatcgacaggggcaccgtcgtccacgggccccacggccccacgcccacgtcgcagtacgagcactcgtccatcccggccactgtcaagaagatcttcggcctgccgcaggacttcctcacgaggcgggacgcgtgggcggggaccttcgagggcgtggtgcaggggaggaccgagccacgcaccgactgccccgagcagctgcccacgccgacgaggatcaggcagacggaggcggacgaggaggccaagcttagcgagttccagcaggagatcatccagctcgcctccgtgctcaacggcgaccaccacctcgccaccctgcaggaccggatcaagaacgacatgaacgtcagggaaggcatcgactacatgaaggccgccgtcaaacgctacttccaggccggcgcgtccgccagaaggatgggcgtcgacggcgaccagatcgtcaagatgagaccctccctcaccaccaggatccaacgcccatagacagactgtctaatcaaagcgggatcggttatgttcacaaacaggattggactacatatatatattctaaaaatacagatcacattcagtgct

SEQ ID NO: 18606 - protein, 492 aa, Zea mays subsp. mays
  peptide (1)..(492): Ceres Seq. ID no. 12391536
SITHEQDRVEASAPSSASSQRRKGTMSAARRRSPIPVLLFFLLLHSASPSPIKTVVVLVMENRSFDHILGWMKRLNPEIDGVTGREWNPANASDPAAGRVYFRDGAAYVDPDPGHSFQEIRQQVFGSDDDAADNPPRMDGFAQQARSIGGGAMSDAVMRGFNPADVAVYRELVSQFAVCDRWFASVPSSTQPNRLFVHSGTSGGATSNNPTLLAEGYPQRTIFDNLHDAGLSFGVYFQDVPAVLFYRNLRKLKYLLDFHPLRPSFADHARRGTLPNYAVITYDEHGGFFDHVPTPVAGVPSPDGIVGPPPYNFTFDRLGVRVPAILVSPWIDRGTVVHGPHGPTPTSQYEHSSIPATVKKIFGLPQDFLTRRDAWAGTFEGVVQGRTEPRTDCPEQLPTPTRIRQTEADEEAKLSEFQQEIIQLASVLNGDHHLATLQDRIKNDMNVREGIDYMKAAVKRYFQAGASARRMGVDGDQIVKMRPSLTTRIQRP

SEQ ID NO: 18607 - protein, 467 aa, Zea mays subsp. mays
  peptide (1)..(467): Ceres Seq. ID no. 12391537
MSAARRRSPIPVLLFFLLLHSASPSPIKTVVVLVMENRSFDHILGWMKRLNPEIDGVTGREWNPANASDPAAGRVYFRDGAAYVDPDPGHSFQEIRQQVFGSDDDAADNPPRMDGFAQQARSIGGGAMSDAVMRGFNPADVAVYRELVSQFAVCDRWFASVPSSTQPNRLFVHSGTSGGATSNNPTLLAEGYPQRTIFDNLHDAGLSFGVYFQDVPAVLFYRNLRKLKYLLDFHPLRPSFADHARRGTLPNYAVITYDEHGGFFDHVPTPVAGVPSPDGIVGPPPYNFTFDRLGVRVPAILVSPWIDRGTVVHGPHGPTPTSQYEHSSIPATVKKIFGLPQDFLTRRDAWAGTFEGVVQGRTEPRTDCPEQLPTPTRIRQTEADEEAKLSEFQQEIIQLASVLNGDHHLATLQDRIKNDMNVREGIDYMKAAVKRYFQAGASARRMGVDGDQIVKMRPSLTTRIQRP

SEQ ID NO: 18608 - protein, 433 aa, Zea mays subsp. mays
  peptide (1)..(433): Ceres Seq. ID no. 12391538
MENRSFDHILGWMKRLNPEIDGVTGREWNPANASDPAAGRVYFRDGAAYVDPDPGHSFQEIRQQVFGSDDDAADNPPRMDGFAQQARSIGGGAMSDAVMRGFNPADVAVYRELVSQFAVCDRWFASVPSSTQPNRLFVHSGTSGGATSNNPTLLAEGYPQRTIFDNLHDAGLSFGVYFQDVPAVLFYRNLRKLKYLLDFHPLRPSFADHARRGTLPNYAVITYDEHGGFFDHVPTPVAGVPSPDGIVGPPPYNFTFDRLGVRVPAILVSPWIDRGTVVHGPHGPTPTSQYEHSSIPATVKKIFGLPQDFLTRRDAWAGTFEGVVQGRTEPRTDCPEQLPTPTRIRQTEADEEAKLSEFQQEIIQLASVLNGDHHLATLQDRIKNDMNVREGIDYMKAAVKRYFQAGASARRMGVDGDQIVKMRPSLTTRIQRP

SEQ ID NO: 18609 - DNA, 1673 bp, Zea mays subsp. mays
  misc_feature (1)..(1673): Ceres Seq. ID no. 12418201
  misc_feature (1)..(1673): Ortholog of  Ceres SEQ ID NO 15177878 as cited in SEQ ID NO 59929
  misc_feature (1)..(1673): Ortholog of  Ceres SEQ ID NO 13658888 as cited in SEQ ID NO 66542
gcacgagaccattacctagaacatcctaatcgaaaacgcctccccgagagcccccgttttctgtcacaaatcgccactaaaaccctagccttccgccatggccacctcccctgccgcctcgtcctcctccgctccgaccgcctccgcggtggctgcggctacgatggctgttgaggccaccgacgggccggtgctcagcgtagtatcgaagcgtctccgcgcactgcggaagaagtacaaccgaatcacgcagattgaggagtcgctcgccgccggcaagacgctcaaccgagagcaggaggaggttctccgctccaagcccgtcgtcgccgctctgatcgacgagctcgagcgcctccgccctccgctcgcctccgccctcgcggaggagctcttctnccgncccgcccccgccccctccgccgcttcctcctccgactcagattcgtcagtccaggacttgcttgcgctcgtctacttcggctccctctttgacgtcaagcagcaaagcgacttcgtctctttggtttacacgcgcgaactcgagcggagcagctgcctcacttatgactacgtcggggatgatccggaggacagtctcgcggagaccgatctgaacgcggtttctgcccttgcctccctcgccgcgttgcgccctcctgctgcagccggagtctcgcaccgtgacgcccttcaggcttgtgctcatcacgcccgcctctggctctgccgtgcggatgaacccatccatcctgactccaccatcacatatgctggggtgagggcaaagctggataggatcatggcatcgggctacttcacagcgcagctagaaatgaggacaccattggatctggctgctgcagtggcaagttttggagctggaggtgtgcaggtgcaagagagcatggttgtgtcacctcaggcaccggaagcagtggaggagagccaggctgttgaaggacacaagaatgagaaggaagattctcaggctacagaaatctacaatgatcatcctgttgttgactctgaacatgtggaggatgaagtcctggtgcatccaactgatgaagttcctccagctgagacagagcaggagcaggagacatttgatgctgatgtgaaggatcaggagcaaaaggaccaacaattcatccagcggcggtcttaccagaaccagcgtggtggtggtcgtggtggcagcaggagaggctatcctaatggtcgtggaggacgtggtggccgaggtggcgggtaccagaatggccgtggtggataccagaatggtcgtggcggtgctggcgggtactactacgaatctggatactaccagccgaggaactacaacagaggccggggtggtcgctccggcggtggcaactcttactacaacagccatggtggaggtgcacaggggcatcatcctgggagtgttgagctgggcgcaaacgcctagcttcgctgactgttctgtttgataatgaggagcgagtgagtcgtgccattttgttattatagaactaacttagcctgttattacgtcaccgttggtcccatccgtgagtctttttgctgctcgagtgactgcatatggtcggtcggtattgaggaaatactctgggaaagtagtttcaggtcatattcgttttctaagttacgtttttttttgtgtt

SEQ ID NO: 18610 - protein, 452 aa, Zea mays subsp. mays
  peptide (1)..(452): Ceres Seq. ID no. 12418202
  misc_feature (101)..(101): Xaa is any aa, unknown or other
  misc_feature (102)..(102): Xaa is any aa, unknown or other
MATSPAASSSSAPTASAVAAATMAVEATDGPVLSVVSKRLRALRKKYNRITQIEESLAAGKTLNREQEEVLRSKPVVAALIDELERLRPPLASALAEELFXXPAPAPSAASSSDSDSSVQDLLALVYFGSLFDVKQQSDFVSLVYTRELERSSCLTYDYVGDDPEDSLAETDLNAVSALASLAALRPPAAAGVSHRDALQACAHHARLWLCRADEPIHPDSTITYAGVRAKLDRIMASGYFTAQLEMRTPLDLAAAVASFGAGGVQVQESMVVSPQAPEAVEESQAVEGHKNEKEDSQATEIYNDHPVVDSEHVEDEVLVHPTDEVPPAETEQEQETFDADVKDQEQKDQQFIQRRSYQNQRGGGRGGSRRGYPNGRGGRGGRGGGYQNGRGGYQNGRGGAGGYYYESGYYQPRNYNRGRGGRSGGGNSYYNSHGGGAQGHHPGSVELGANA

SEQ ID NO: 18611 - protein, 430 aa, Zea mays subsp. mays
  peptide (1)..(430): Ceres Seq. ID no. 12418203
  misc_feature (79)..(79): Xaa is any aa, unknown or other
  misc_feature (80)..(80): Xaa is any aa, unknown or other
MAVEATDGPVLSVVSKRLRALRKKYNRITQIEESLAAGKTLNREQEEVLRSKPVVAALIDELERLRPPLASALAEELFXXPAPAPSAASSSDSDSSVQDLLALVYFGSLFDVKQQSDFVSLVYTRELERSSCLTYDYVGDDPEDSLAETDLNAVSALASLAALRPPAAAGVSHRDALQACAHHARLWLCRADEPIHPDSTITYAGVRAKLDRIMASGYFTAQLEMRTPLDLAAAVASFGAGGVQVQESMVVSPQAPEAVEESQAVEGHKNEKEDSQATEIYNDHPVVDSEHVEDEVLVHPTDEVPPAETEQEQETFDADVKDQEQKDQQFIQRRSYQNQRGGGRGGSRRGYPNGRGGRGGRGGGYQNGRGGYQNGRGGAGGYYYESGYYQPRNYNRGRGGRSGGGNSYYNSHGGGAQGHHPGSVELGANA

SEQ ID NO: 18612 - DNA, 489 bp, Zea mays subsp. mays
  misc_feature (1)..(489): Ceres Seq. ID no. 1850217
  misc_feature (1)..(489): Ortholog of  Ceres SEQ ID NO 13596261 as cited in SEQ ID NO 67817
ctccctctgcaagtacaagttgtcctgtctttggtttagtttgcgcccctgtatttgttcagggttttggtcgcgtgttgaggaaagattcggggttcttaagtgaaacaaatggggtcatcaaggaatgtgccgcacaaagtgatgcaagatgagatcacacctcttctcccgatcaaagctgaggaggacgcagttcatgagttcgacggagcttctttctctggcgcggtcttcaatctgtcaacaaccattgtaggagctggaatcatggctctgcctgcgagtatcaagatgctaggccttatacctggtattctaatgatcatccttgtggcgctgctcaccgagacatccattgacatgctggtcaggtgcagccaccagggcaagattacatcctacggctggttgatgggtgacacatttggtcagtgggggagaattgcgctacaagcatcggtggtgataaacaatgtcggcgtgttg

SEQ ID NO: 18613 - protein, 126 aa, Zea mays subsp. mays
  peptide (1)..(126): Ceres Seq. ID no. 1850218
MGSSRNVPHKVMQDEITPLLPIKAEEDAVHEFDGASFSGAVFNLSTTIVGAGIMALPASIKMLGLIPGILMIILVALLTETSIDMLVRCSHQGKITSYGWLMGDTFGQWGRIALQASVVINNVGVL

SEQ ID NO: 18614 - protein, 115 aa, Zea mays subsp. mays
  peptide (1)..(115): Ceres Seq. ID no. 1850219
MQDEITPLLPIKAEEDAVHEFDGASFSGAVFNLSTTIVGAGIMALPASIKMLGLIPGILMIILVALLTETSIDMLVRCSHQGKITSYGWLMGDTFGQWGRIALQASVVINNVGVL

SEQ ID NO: 18615 - protein, 73 aa, Zea mays subsp. mays
  peptide (1)..(73): Ceres Seq. ID no. 1850220
MALPASIKMLGLIPGILMIILVALLTETSIDMLVRCSHQGKITSYGWLMGDTFGQWGRIALQASVVINNVGVL

SEQ ID NO: 18616 - DNA, 1103 bp, Zea mays subsp. mays
  misc_feature (1)..(1103): Ceres Seq. ID no. 12368722
  misc_feature (1)..(1103): Ortholog of  Ceres SEQ ID NO 14314838 as cited in SEQ ID NO 52573
gcacgagaccattacctagaacatcctaatcgaaaaagagcgaagtgtaatttgaatggcaggcacaagacagagaagcaggtgggaagtcgacgcagttgtttgttgtggatgagttgcgtgtgttgctgctgccgcgcgtgcgtgtcccccgacggccccggaccacgactccctcctcccgccgccgccttctccttcgtcggggaccgaatgcagcgggtcgtcgtcatgcgccacggcgatcgcctcgaccattccgagcccatgtggcccgccaacaagccgcgcccctgggatccgcctctcgacgacgccggcctcctccgcgcctggaccgtcggcaagtgcatcagggccgccgccgccaagcagggatgggccctccaccgggtcctcgtctccccgttcctgcgatgccgacagaccgccgcgcgcgccgtcgccgcgctatgtgccgtccccgacgacgacgcgctgctcgcggtcggcgacccggccaatgtgcccctcgacacctcacgcgtcaaggtgtctatcgagtatggattgtctgagatgatgaacacccaagcaatgggcattactgttagcaagctggctcccaacgtcagcaagtggtttcctgacttgccagagcttgaagccgacttcccggctggaaccatcgaccattctgcagaaccaatctacccggagctaccaaagtgggaggaatccatcatggaggcaagaagcagatacgcaagcataatcaaagctcttgctgacaaatatcctcatgaaaacctgctattagtaacacacggtgagggcgttggtgcatccatttcctactttgagatgggactagagatctacgacgtggagtactgtgcgtactctgttctggagaggcaggtgactgcagagcctggtgatgagcatgggggctttacctttaccgcggatagcttcaaggtcatgaccaagagtggtagcacaggcatacgatacgccccggtgtgagagggctggtttcttggttgagcaatatttttttaaaagcatgaatacctggactgtctttttaatactttcaacttttttatgacgatcttttg

SEQ ID NO: 18617 - protein, 335 aa, Zea mays subsp. mays
  peptide (1)..(335): Ceres Seq. ID no. 12368723
ARDHYLEHPNRKRAKCNLNGRHKTEKQVGSRRSCLLWMSCVCCCCRACVSPDGPGPRLPPPAAAFSFVGDRMQRVVVMRHGDRLDHSEPMWPANKPRPWDPPLDDAGLLRAWTVGKCIRAAAAKQGWALHRVLVSPFLRCRQTAARAVAALCAVPDDDALLAVGDPANVPLDTSRVKVSIEYGLSEMMNTQAMGITVSKLAPNVSKWFPDLPELEADFPAGTIDHSAEPIYPELPKWEESIMEARSRYASIIKALADKYPHENLLLVTHGEGVGASISYFEMGLEIYDVEYCAYSVLERQVTAEPGDEHGGFTFTADSFKVMTKSGSTGIRYAPV

SEQ ID NO: 18618 - protein, 298 aa, Zea mays subsp. mays
  peptide (1)..(298): Ceres Seq. ID no. 12368724
MSCVCCCCRACVSPDGPGPRLPPPAAAFSFVGDRMQRVVVMRHGDRLDHSEPMWPANKPRPWDPPLDDAGLLRAWTVGKCIRAAAAKQGWALHRVLVSPFLRCRQTAARAVAALCAVPDDDALLAVGDPANVPLDTSRVKVSIEYGLSEMMNTQAMGITVSKLAPNVSKWFPDLPELEADFPAGTIDHSAEPIYPELPKWEESIMEARSRYASIIKALADKYPHENLLLVTHGEGVGASISYFEMGLEIYDVEYCAYSVLERQVTAEPGDEHGGFTFTADSFKVMTKSGSTGIRYAPV

SEQ ID NO: 18619 - protein, 264 aa, Zea mays subsp. mays
  peptide (1)..(264): Ceres Seq. ID no. 12368725
MQRVVVMRHGDRLDHSEPMWPANKPRPWDPPLDDAGLLRAWTVGKCIRAAAAKQGWALHRVLVSPFLRCRQTAARAVAALCAVPDDDALLAVGDPANVPLDTSRVKVSIEYGLSEMMNTQAMGITVSKLAPNVSKWFPDLPELEADFPAGTIDHSAEPIYPELPKWEESIMEARSRYASIIKALADKYPHENLLLVTHGEGVGASISYFEMGLEIYDVEYCAYSVLERQVTAEPGDEHGGFTFTADSFKVMTKSGSTGIRYAPV

SEQ ID NO: 18620 - DNA, 1703 bp, Zea mays subsp. mays
  misc_feature (1)..(1703): Ceres Seq. ID no. 12376841
  misc_feature (1)..(1703): Ortholog of  Ceres SEQ ID NO 13593919 as cited in SEQ ID NO 54135
  misc_feature (1)..(1703): Ortholog of  Ceres SEQ ID NO 14303359 as cited in SEQ ID NO 54913
  misc_feature (1)..(1703): Ortholog of  Ceres SEQ ID NO 13596017 as cited in SEQ ID NO 62012
gcacgagaccattacctagaacatcctaatcgaaaagaccgaataaccacccgtctgccgctgtgccgcacggcccgcaccccgcacgagacccgtccttgaggggcacgtcctagatcggtggcgccttcctctcgccgccgatacggtgcctctcgcggtctcgctccccctcgcaggtcttttggtttttttagttcctccctttgcttcttggaggtgtttgttgccgtctcacccgcagttcttgaggtacgcacgcagtaatccggcttctttctatgttccgatgtcttgctggttggatgaggagggtacgacgctctgtggagagatctaatcgcgctggtaaactggggcgatcggtgtgggggaatcggatagcgtggatgggatttgggattggaagagaagctggaggatgccttttttctggatgacggtgataatcgtggacgagctaagctcattgagtgtctggctgatgtgggattgggtggcatatgctggattgctaactgttccatctggtgcaccaagcaattggactgcactggggttgggattgggattgggatgggattgctttgcctttgattgtgtatatgcttattatgtgctcatccgctgtggctttggccggaactttgcagacatgcagagccagatagtgtgccacgggtgcaggacccttctgttctacccaagaggtgctccgagcgtgtgttgtgcggtatgccatgtggtcaccaatgtgccgcctccagcaatggagatggctcgacttatatgtggtggctgccagacattattgatgtatgctcgcagtgcaacaactgtaagatgctcatgttgtgacacagtcaatcttgtcagaccagtgagtagcatagctcatgtgaactgtggccagtgccaaacagtgttgatgtatccatacggagcaccgtctgtcaaatgtgctgtttgcaacttcattacaaatgttggcggggtgactcccatgatacctttgccaccaccagcactacctgcatcaagtggaacttcatatatcatcccgtcaatttccgtgccgacgaatcaaccgcggaatgtaactgttgtcgttgaaaacccaatgacagtagatgacaagggaaaattggtgagcaatgttgtagtaggggttacgagcggcgggaaaaagtgacggcatatcacaaccgtgtgtagctttgtccaaactatctaaaaagggtttaagaatacataccttgtatcatactgctgtttggcgatcggctgctcgacggaggaatccccctccctggagagcgtagtggcaaagcagcgaggctttcgccactgcgaacgagccaaaaaaaaacgaagtgcgggtgtgcatactcagagtatatctgtagcttgttaccccttgattcttttgtatgtaatatgggctctgcctgactttcactgtgtgatcaaatttccaagcccgtgggcgctgttgctgcgtgccttgttattagtgaataacaaacattgcaaatggctcttgaaatacagtgtgtgtgtgttttaatctctctgcatttatgttaatcagcaggtgccaccatttgctgttccagactgataatgcagagtttgtatccacgttctttggagaaaacatttgaggctcatacgctgtttcatgtcccatnngtatattttct

SEQ ID NO: 18621 - protein, 256 aa, Zea mays subsp. mays
  peptide (1)..(256): Ceres Seq. ID no. 12376842
MPFFWMTVIIVDELSSLSVWLMWDWVAYAGLLTVPSGAPSNWTALGLGLGLGWDCFAFDCVYAYYVLIRCGFGRNFADMQSQIVCHGCRTLLFYPRGAPSVCCAVCHVVTNVPPPAMEMARLICGGCQTLLMYARSATTVRCSCCDTVNLVRPVSSIAHVNCGQCQTVLMYPYGAPSVKCAVCNFITNVGGVTPMIPLPPPALPASSGTSYIIPSISVPTNQPRNVTVVVENPMTVDDKGKLVSNVVVGVTSGGKK

SEQ ID NO: 18622 - protein, 251 aa, Zea mays subsp. mays
  peptide (1)..(251): Ceres Seq. ID no. 12376843
MTVIIVDELSSLSVWLMWDWVAYAGLLTVPSGAPSNWTALGLGLGLGWDCFAFDCVYAYYVLIRCGFGRNFADMQSQIVCHGCRTLLFYPRGAPSVCCAVCHVVTNVPPPAMEMARLICGGCQTLLMYARSATTVRCSCCDTVNLVRPVSSIAHVNCGQCQTVLMYPYGAPSVKCAVCNFITNVGGVTPMIPLPPPALPASSGTSYIIPSISVPTNQPRNVTVVVENPMTVDDKGKLVSNVVVGVTSGGKK

SEQ ID NO: 18623 - protein, 235 aa, Zea mays subsp. mays
  peptide (1)..(235): Ceres Seq. ID no. 12376844
MWDWVAYAGLLTVPSGAPSNWTALGLGLGLGWDCFAFDCVYAYYVLIRCGFGRNFADMQSQIVCHGCRTLLFYPRGAPSVCCAVCHVVTNVPPPAMEMARLICGGCQTLLMYARSATTVRCSCCDTVNLVRPVSSIAHVNCGQCQTVLMYPYGAPSVKCAVCNFITNVGGVTPMIPLPPPALPASSGTSYIIPSISVPTNQPRNVTVVVENPMTVDDKGKLVSNVVVGVTSGGKK

SEQ ID NO: 18624 - DNA, 1573 bp, Zea mays subsp. mays
  misc_feature (1)..(1573): Ceres Seq. ID no. 12435633
  misc_feature (1)..(1573): Ortholog of  Ceres SEQ ID NO 13599900 as cited in SEQ ID NO 531
  misc_feature (1)..(1573): Ortholog of  Ceres SEQ ID NO 13596509 as cited in SEQ ID NO 62004
  misc_feature (1)..(1573): Ortholog of  Ceres SEQ ID NO 13659971 as cited in SEQ ID NO 67565
  misc_feature (1)..(1573): Ortholog of  Ceres SEQ ID NO 13500385 as cited in SEQ ID NO 67583
gcacgagaccattacctagaacatcctaatcgaaaagtaaactaaccaccaaagccgaagaaggcggcttgccctgcccgccgccttggtgccgcgcgcgccatggccaagagcaagtcgtccgccaaggccggccccccgctcctcggcaagtacgagctcggccacctcctcggccggggcaacttcgccaaggtataccacgcgcgctgcctcggcggaggcgaccccgtggccgtgaaggtgctggacaaggccgggctggccgccacgggcatggcgtcgcggctcctgcgcgaggtgtccgccatgcgccgcctgagccaccccaacgtgctccgcctccacgaggtgctggcgacgcgctccaaggtgtacctcgtgatggagctggccccgggcggggacctcctgtcccggctggcgtcgctgccgtcccgcaggctccccgagcacgcggcgcggcgcgtgttcctccagctggcgtcggcgctcatctacagccacgcgcgcggggtgttccaccgcgacgtgaagccgcagaacgtgctgctggacgccgagggcaacctcaaggtgtccgacttcggcctcgcggcgctcccggactcggtccgcgacgacgggcgcctgcacacggcgtgcggcaccccggcgttcgcggcgcccgaggtgctccggcgcagggcctacgacggcgccaaggcggacgcgtggtcctgcggggtcatcctcttcgtcctcctcgcgggccacctccccttcgacgacgccaacatcgccgacatgtgccgcagggcgcaccgccgggagtacacggtcccgcggtgggtgtcgcagccggcgcgccgcctcgtggcgcgcctgctggacccgaacccggcgacgcgcctcgccgtcgcggagctcgccggccacccctggttcaagcgctcgctcagcgtggactcccagctcggcggcctcctggacggccaggcggagcgcgagctggcgttccaggccccgccggcgctgaacgccttcgacatcatctccatgtccccagggctggacctgtcgggcctgttcggcgagggcaggcgccgccgcgagaagcggttcatgacgacggcgtccccggagcgggcggtggagcggctcgcgcaggccggcgcgaggctcggctacttcattgtggggaagaagggggccgagcgcctgccgctgggcgtcctgccgggcctcgtggccatgtcgatggagatgtcggaggtgtcgccggagctgatgctggtggagctgaggctggagggcggccacggccgacgaggacgaggcgttcgggtgggaggagctccgggttgagctgggggacgtggtaacagcatggcacgtgagtgaagaaggttaaaaattcgcaagaggaaatgcgagaacgatttcgcaggtgtatcagtgtagtatgtatagccgtatagcaagtgcgcatctcatctcgtgtacgtgaaattagttggttaggacgaacagcagcgtgtgatgttggggattaactagactggtagtttcaatcaaatgtgtgatgtgtggg

SEQ ID NO: 18625 - protein, 414 aa, Zea mays subsp. mays
  peptide (1)..(414): Ceres Seq. ID no. 12435634
MAKSKSSAKAGPPLLGKYELGHLLGRGNFAKVYHARCLGGGDPVAVKVLDKAGLAATGMASRLLREVSAMRRLSHPNVLRLHEVLATRSKVYLVMELAPGGDLLSRLASLPSRRLPEHAARRVFLQLASALIYSHARGVFHRDVKPQNVLLDAEGNLKVSDFGLAALPDSVRDDGRLHTACGTPAFAAPEVLRRRAYDGAKADAWSCGVILFVLLAGHLPFDDANIADMCRRAHRREYTVPRWVSQPARRLVARLLDPNPATRLAVAELAGHPWFKRSLSVDSQLGGLLDGQAERELAFQAPPALNAFDIISMSPGLDLSGLFGEGRRRREKRFMTTASPERAVERLAQAGARLGYFIVGKKGAERLPLGVLPGLVAMSMEMSEVSPELMLVELRLEGGHGRRGRGVRVGGAPG

SEQ ID NO: 18626 - protein, 356 aa, Zea mays subsp. mays
  peptide (1)..(356): Ceres Seq. ID no. 12435635
MASRLLREVSAMRRLSHPNVLRLHEVLATRSKVYLVMELAPGGDLLSRLASLPSRRLPEHAARRVFLQLASALIYSHARGVFHRDVKPQNVLLDAEGNLKVSDFGLAALPDSVRDDGRLHTACGTPAFAAPEVLRRRAYDGAKADAWSCGVILFVLLAGHLPFDDANIADMCRRAHRREYTVPRWVSQPARRLVARLLDPNPATRLAVAELAGHPWFKRSLSVDSQLGGLLDGQAERELAFQAPPALNAFDIISMSPGLDLSGLFGEGRRRREKRFMTTASPERAVERLAQAGARLGYFIVGKKGAERLPLGVLPGLVAMSMEMSEVSPELMLVELRLEGGHGRRGRGVRVGGAPG

SEQ ID NO: 18627 - protein, 345 aa, Zea mays subsp. mays
  peptide (1)..(345): Ceres Seq. ID no. 12435636
MRRLSHPNVLRLHEVLATRSKVYLVMELAPGGDLLSRLASLPSRRLPEHAARRVFLQLASALIYSHARGVFHRDVKPQNVLLDAEGNLKVSDFGLAALPDSVRDDGRLHTACGTPAFAAPEVLRRRAYDGAKADAWSCGVILFVLLAGHLPFDDANIADMCRRAHRREYTVPRWVSQPARRLVARLLDPNPATRLAVAELAGHPWFKRSLSVDSQLGGLLDGQAERELAFQAPPALNAFDIISMSPGLDLSGLFGEGRRRREKRFMTTASPERAVERLAQAGARLGYFIVGKKGAERLPLGVLPGLVAMSMEMSEVSPELMLVELRLEGGHGRRGRGVRVGGAPG

SEQ ID NO: 18628 - DNA, 912 bp, Zea mays subsp. mays; identical to SEQ ID NO: 6225
  misc_feature (1)..(912): Ceres Seq. ID no. 12414036
  misc_feature (1)..(912): Ortholog of  Ceres SEQ ID NO 13660597 as cited in SEQ ID NO 67655

SEQ ID NO: 18629 - protein, 128 aa, Zea mays subsp. mays; identical to SEQ ID NO: 6226
  peptide (1)..(128): Ceres Seq. ID no. 12414037

SEQ ID NO: 18630 - protein, 89 aa, Zea mays subsp. mays; identical to SEQ ID NO: 6227
  peptide (1)..(89): Ceres Seq. ID no. 12414038

SEQ ID NO: 18631 - protein, 84 aa, Zea mays subsp. mays; identical to SEQ ID NO: 6228
  peptide (1)..(84): Ceres Seq. ID no. 12414039

SEQ ID NO: 18632 - DNA, 1637 bp, Zea mays subsp. mays
  misc_feature (1)..(1637): Ceres Seq. ID no. 12418899
  misc_feature (1)..(1637): Ortholog of  Ceres SEQ ID NO 13582281 as cited in SEQ ID NO 51014
  misc_feature (1)..(1637): Ortholog of  Ceres SEQ ID NO 14315606 as cited in SEQ ID NO 53515
  misc_feature (1)..(1637): Ortholog of  Ceres SEQ ID NO 15176795 as cited in SEQ ID NO 54453
  misc_feature (1)..(1637): Ortholog of  Ceres SEQ ID NO 14310508 as cited in SEQ ID NO 58965
  misc_feature (1)..(1637): Ortholog of  Ceres SEQ ID NO 12617417 as cited in SEQ ID NO 65089
gcacgagaccattacctagaacatcctaatcgaaaaccatttcactcgtattctatcagctagctacccactgtcgccaactcgccgcaacaaagaaccaccatcatgcacctgctgatgctcccttggctcgccttcggccacatcgtgccgttcgtgcagctggcgcggaggctgctgtcctccacctcctcctccgtccgcgtcacgttcctcacggccgctggcaacgtcccgcgcgtcgaggccatgctgtcctctccctcgtccaccggcgaggcggccgtcgtcgtgccgctgcgcctgccccacgtgccggggctgcccgaggacgccgccagcacggcggacctctcgcccgagggcgccgagcttcttaaggccgcgctggacgctgcccggccgcagtggccgcgctgctggccgagctccgcccggacgccgtgctgctcgacttcgccaccccgtgggccgccgaggacgccgcggcgctgggcgccaagtcgctccggttcagcgtcttctccgccgtcncangcgcctacctctccgtccccgcgcgccgccccgacgcggcgggccagctgccgtcggcgcgcgacctcatgtccgcccctgccggcttccccggctcctccccgctcgccgnngccggcgtcccggcgtaccaggcagccgacttcacctacatgttcaccagcttcggcggccagccctgcgtccacgaacgcgtggtggccggcatccgggcctgcgacggcctcgtgctcaagacctgcgccgagatggagggtgcctacatcgactacctnnccgcgcagnttcgcaagcccgtgctcgtggcggggcccctgntgcctggcccgccggcgggagatctcgacgaccactgggccacctggttgtccgcgttcccggacggcgccgtcgtcttcgcctcgttcggcagcgagacgttcctgccgcccgccgcggccacggagctgctcctggggctcgaggccacgggtcgcccgttcctcgccgtgctcaactccccggacggcgccgtcccgccgccggggttcgcggagagggtgtcggggagagggctcgttcatgccgggtgggtgccgcagcagcacatcctgcgccaccggagcgtggggtgctacctcacccacgccggcttcagctccgtcgtggagggcctcgtcgccggctgccgcctcgtactgctgcccatgaagggcgaccagttcctcaacgcggcgctgttcgcgcgcgagctccgcgtgggcgtggaggtggcgcgccgcgacgacgacggctggttcgggcgccaggacgtgtgcgacgcgatcgccgcagcggtggcggacgggggggaaagggacgccaggaagtgggccgactttttgacggacgacggcgtgcaagggaggttcgccgacgagttcgtccggcagctcagggagctcgtcggcgcggcctccagttgatttgagcgctcgacgacgtttctcgtggaacacgcggcaagtgcgattattgaagaaataattccacccacctatttatttgtacattaataacattgcccacccacctgtactgtatcattattgaagaaataattccagccatggatattgcac

SEQ ID NO: 18633 - protein, 373 aa, Zea mays subsp. mays
  peptide (1)..(373): Ceres Seq. ID no. 12418900
  misc_feature (143)..(143): Xaa is any aa, unknown or other
  misc_feature (144)..(144): Xaa is any aa, unknown or other
  misc_feature (182)..(182): Xaa is any aa, unknown or other
  misc_feature (236)..(236): Xaa is any aa, unknown or other
  misc_feature (239)..(239): Xaa is any aa, unknown or other
  misc_feature (250)..(250): Xaa is any aa, unknown or other
MHLLMLPWLAFGHIVPFVQLARRLLSSTSSSVRVTFLTAAGNVPRVEAMLSSPSSTGEAAVVVPLRLPHVPGLPEDAASTADLSPEGAELLKAALDAARPQWPRCWPSSARTPCCSTSPPRGPPRTPRRWAPSRSGSASSPPXXAPTSPSPRAAPTRRASCRRRATSCPPLPASPAPPRSPXPASRRTRQPTSPTCSPASAASPASTNAWWPASGPATASCSRPAPRWRVPTSTTXPRXFASPCSWRGPXCLARRREISTTTGPPGCPRSRTAPSSSPRSAARRSCRPPRPRSCSWGSRPRVARSSPCSTPRTAPSRRRGSRRGCRGEGSFMPGGCRSSTSCATGAWGATSPTPASAPSWRASSPAAASYCCP

SEQ ID NO: 18634 - protein, 369 aa, Zea mays subsp. mays
  peptide (1)..(369): Ceres Seq. ID no. 12418901
  misc_feature (139)..(139): Xaa is any aa, unknown or other
  misc_feature (140)..(140): Xaa is any aa, unknown or other
  misc_feature (178)..(178): Xaa is any aa, unknown or other
  misc_feature (232)..(232): Xaa is any aa, unknown or other
  misc_feature (235)..(235): Xaa is any aa, unknown or other
  misc_feature (246)..(246): Xaa is any aa, unknown or other
MLPWLAFGHIVPFVQLARRLLSSTSSSVRVTFLTAAGNVPRVEAMLSSPSSTGEAAVVVPLRLPHVPGLPEDAASTADLSPEGAELLKAALDAARPQWPRCWPSSARTPCCSTSPPRGPPRTPRRWAPSRSGSASSPPXXAPTSPSPRAAPTRRASCRRRATSCPPLPASPAPPRSPXPASRRTRQPTSPTCSPASAASPASTNAWWPASGPATASCSRPAPRWRVPTSTTXPRXFASPCSWRGPXCLARRREISTTTGPPGCPRSRTAPSSSPRSAARRSCRPPRPRSCSWGSRPRVARSSPCSTPRTAPSRRRGSRRGCRGEGSFMPGGCRSSTSCATGAWGATSPTPASAPSWRASSPAAASYCCP

SEQ ID NO: 18635 - protein, 325 aa, Zea mays subsp. mays
  peptide (1)..(325): Ceres Seq. ID no. 12418902
  misc_feature (95)..(95): Xaa is any aa, unknown or other
  misc_feature (96)..(96): Xaa is any aa, unknown or other
  misc_feature (134)..(134): Xaa is any aa, unknown or other
  misc_feature (188)..(188): Xaa is any aa, unknown or other
  misc_feature (191)..(191): Xaa is any aa, unknown or other
  misc_feature (202)..(202): Xaa is any aa, unknown or other
MLSSPSSTGEAAVVVPLRLPHVPGLPEDAASTADLSPEGAELLKAALDAARPQWPRCWPSSARTPCCSTSPPRGPPRTPRRWAPSRSGSASSPPXXAPTSPSPRAAPTRRASCRRRATSCPPLPASPAPPRSPXPASRRTRQPTSPTCSPASAASPASTNAWWPASGPATASCSRPAPRWRVPTSTTXPRXFASPCSWRGPXCLARRREISTTTGPPGCPRSRTAPSSSPRSAARRSCRPPRPRSCSWGSRPRVARSSPCSTPRTAPSRRRGSRRGCRGEGSFMPGGCRSSTSCATGAWGATSPTPASAPSWRASSPAAASYCCP

SEQ ID NO: 18636 - protein, 291 aa, Zea mays subsp. mays
  peptide (1)..(291): Ceres Seq. ID no. 12418903
  misc_feature (15)..(15): Xaa is any aa, unknown or other
  misc_feature (69)..(69): Xaa is any aa, unknown or other
  misc_feature (70)..(70): Xaa is any aa, unknown or other
  misc_feature (73)..(73): Xaa is any aa, unknown or other
  misc_feature (84)..(84): Xaa is any aa, unknown or other
MSAPAGFPGSSPLAXAGVPAYQAADFTYMFTSFGGQPCVHERVVAGIRACDGLVLKTCAEMEGAYIDYXXAQXRKPVLVAGPLXPGPPAGDLDDHWATWLSAFPDGAVVFASFGSETFLPPAAATELLLGLEATGRPFLAVLNSPDGAVPPPGFAERVSGRGLVHAGWVPQQHILRHRSVGCYLTHAGFSSVVEGLVAGCRLVLLPMKGDQFLNAALFARELRVGVEVARRDDDGWFGRQDVCDAIAAAVADGGERDARKWADFLTDDGVQGRFADEFVRQLRELVGAASS

SEQ ID NO: 18637 - DNA, 491 bp, Zea mays subsp. mays
  misc_feature (1)..(491): Ceres Seq. ID no. 1845739
  misc_feature (1)..(491): Ortholog of  Ceres SEQ ID NO 14313228 as cited in SEQ ID NO 67057
gcgcaasskctcgaccattgcaatgctgagaacaggaaaatctatcatgatttgaatgcttatagggtactttttgatgaggtacacaacaggaaggtgatccccgcttgtcaagttttggattaatgaagaacagccgtgatgggaaaagttatagcactaacctggcttacactccaccagagtttctacgaactggcagagtaattccggagagtgtgatctatagctatggaactgtcctgttggatcttttgagcggaaaacacattcctcctagtcatgccctagatttaataaggggaaagaatatactgttgctgatggattcctccttagaagggcagtatgctaatgaagatgcttcgaaattggttgatcttgcatcaaagtgtctgcaatttgaatctagggatagaccgaacataaagtatcttctgtcttctgttggtcctcttcagaatcaaaaggaggttgcatcacatgtgttc

SEQ ID NO: 18638 - protein, 122 aa, Zea mays subsp. mays
  peptide (1)..(122): Ceres Seq. ID no. 1845740
MKNSRDGKSYSTNLAYTPPEFLRTGRVIPESVIYSYGTVLLDLLSGKHIPPSHALDLIRGKNILLLMDSSLEGQYANEDASKLVDLASKCLQFESRDRPNIKYLLSSVGPLQNQKEVASHVF

SEQ ID NO: 18639 - DNA, 1414 bp, Zea mays subsp. mays
  misc_feature (1)..(1414): Ceres Seq. ID no. 12383423
  misc_feature (1)..(1414): Ortholog of  Ceres SEQ ID NO 14307639 as cited in SEQ ID NO 54779
actcttccgatcccgaggaggtaaaaacaccgtcgctcaccaccaacacaacgccaaccaacctgccccctcacccccgctggccgctgcttaacaaaccgccgccacaggacaagacaaacttattacagctccacctcagtgctgcagagactgagggccagccaaaccgctcaccgcacacgcggaattcaagcagcatgtacgccgacgccgggttcgccttcgccttcgccgccgcctactcccccaccctcacttcctcgcagccccagccgccgccgccgccgttcgactacgccttctcctccgagccacccctcctctccatgcccgccatggaccacgacgcctacctggggaacttggtacagccatccatggtatcagaatatgacctgggaggagaaggggacctgttcaaagctccagaagccatcatcgaggaaccgctgctcagcctcgatcctgtcgcagctgccttttcaatgatggctggcaatggaagtgctgtcatggatcaaactattaaggacgcaggcaccggcaccatccaaaatgaccccctcctgagtgaggtgctgtacgagtgcgagaaggaactcatggagaagtccacaatcgaagagacaatttctgaacttatggatgttaagattcctatgctgcaagttgaagaaatcccaagccaagctgaacaggttcttatacagaaccagcagctcccggccatggagaaagagaagcaatccgttcctgaatgctcgctccaaaaaagtgttagttctggatgcctcaactcagcagattggatgaatggacctgccaggccaaactttctagacttccaggggctggactttgaggcagcatttgggctgaggagagcttacagcgaaggagacattcagaaccttggagccaacacgcctcgaccagcagcaaatgtttgtgtgaccatcagtgacctcaagaccgaagaaaggaagcaaaagctttccaggtataggaagaagaagatcaagcggaactttggcaggaagatcaagtacgcgtgcaggaaggctctggcagacagccagccaagagtgcgagggagatttgccaagatcgaagaatgcgacctgctgaagccaagcaagtagatccaagtatgcttggttttggcttctagctaggcgccgctccatcgtccttaccttgtgcgctggagaggcgccgcgatgcccgtcggaattcattcaattgacctctcctgtttctctcgggcagcatgctgtgtaataataatctcctccgggcccttgggtgcgagtgaagagctgaaaatttggtatggtagtctagcccccctgtactgtacaaaaggcttgaagatggtaataaaactcagctcccctcttgcttgcttggc

SEQ ID NO: 18640 - protein, 380 aa, Zea mays subsp. mays
  peptide (1)..(380): Ceres Seq. ID no. 12383424
SSDPEEVKTPSLTTNTTPTNLPPHPRWPLLNKPPPQDKTNLLQLHLSAAETEGQPNRSPHTRNSSSMYADAGFAFAFAAAYSPTLTSSQPQPPPPPFDYAFSSEPPLLSMPAMDHDAYLGNLVQPSMVSEYDLGGEGDLFKAPEAIIEEPLLSLDPVAAAFSMMAGNGSAVMDQTIKDAGTGTIQNDPLLSEVLYECEKELMEKSTIEETISELMDVKIPMLQVEEIPSQAEQVLIQNQQLPAMEKEKQSVPECSLQKSVSSGCLNSADWMNGPARPNFLDFQGLDFEAAFGLRRAYSEGDIQNLGANTPRPAANVCVTISDLKTEERKQKLSRYRKKKIKRNFGRKIKYACRKALADSQPRVRGRFAKIEECDLLKPSK

SEQ ID NO: 18641 - protein, 314 aa, Zea mays subsp. mays
  peptide (1)..(314): Ceres Seq. ID no. 12383425
MYADAGFAFAFAAAYSPTLTSSQPQPPPPPFDYAFSSEPPLLSMPAMDHDAYLGNLVQPSMVSEYDLGGEGDLFKAPEAIIEEPLLSLDPVAAAFSMMAGNGSAVMDQTIKDAGTGTIQNDPLLSEVLYECEKELMEKSTIEETISELMDVKIPMLQVEEIPSQAEQVLIQNQQLPAMEKEKQSVPECSLQKSVSSGCLNSADWMNGPARPNFLDFQGLDFEAAFGLRRAYSEGDIQNLGANTPRPAANVCVTISDLKTEERKQKLSRYRKKKIKRNFGRKIKYACRKALADSQPRVRGRFAKIEECDLLKPSK

SEQ ID NO: 18642 - protein, 271 aa, Zea mays subsp. mays
  peptide (1)..(271): Ceres Seq. ID no. 12383426
MPAMDHDAYLGNLVQPSMVSEYDLGGEGDLFKAPEAIIEEPLLSLDPVAAAFSMMAGNGSAVMDQTIKDAGTGTIQNDPLLSEVLYECEKELMEKSTIEETISELMDVKIPMLQVEEIPSQAEQVLIQNQQLPAMEKEKQSVPECSLQKSVSSGCLNSADWMNGPARPNFLDFQGLDFEAAFGLRRAYSEGDIQNLGANTPRPAANVCVTISDLKTEERKQKLSRYRKKKIKRNFGRKIKYACRKALADSQPRVRGRFAKIEECDLLKPSK

SEQ ID NO: 18643 - DNA, 1572 bp, Zea mays subsp. mays
  misc_feature (1)..(1572): Ceres Seq. ID no. 12368130
  misc_feature (1)..(1572): Ortholog of  Ceres SEQ ID NO 13502943 as cited in SEQ ID NO 65097
aaaaaccaagaaacagctgaggcggagaggtagctacctgagccaatcggtgtcgcaatggctgcagcgggtatcaccagggcgccgccgatcgggcagaatccgaggctcgcgtgctacgccccgaggaggggcggagggcgtggtgaggtgctcgttgcagggcgcggtcgtcggcggccgggcggagtggcagagcagctgcgccgtgctgtccagcaaggtggccgcgctcggtacgcactccgtcaacggccacgtcgcgccggcgccgactcagaacggggcggtgctggatttggtccccgtgagtagtagtagtatcaatggcgccatcaccaagaacctgccgcagccgcttcgcatcgcggacctgtccccggcaccgatgcacgggtcgcagctgcgcgtggcctaccagggcgtgcccggcgcgtacagcgagaaggcggccgggaaggcgtacccgggctgcgacgccatcccctgcgaccagttcgaggtggcgttccaggccgtggagctgtggatcgcggaccgcgccgtgctccccgtggagaactcgctgggcggcagcatccaccgcaactacgacctgctgctccggcaccggctccacatcgtcggggaggtgcagctccccgtgcaccactgcctgctggcgctgcccggggtgcgcaaggagtgcctgacccgcgtgatcagccacccgcaggcgctggcgcagtgcgagcacacgctcacggccatgggcctcaacgtcgtccgcgaggccttcgacgacacggccggcgccgccgagtacgtggccgccaacggcctccgcgacacggccgccatcgcgtcctcccgcgccgccgagctgtacgggatggaggtgctcgcggacggcatccaggacgactccggcaacgtcacccgcttcgtgatgctggcccgggagcccgtcgtgccgcgcaccgaccgccccttcaagaccagcatcgtgttcgcgcacgacagggagggcacctccgtgctcttcaaggtgctctccgccttcgccttccgcgacatctcgctcaccaagatcgagagcaggccgcaccgccaccgccccatccgcctcgtcgacgacgccaacgtcggcaccgccaagcacttcgagtacatgttctacgtcgacttccaggcgtccctcgcagagccccgcgcgcagaacgcgctggccgaggtccaggagtacacgtccttcctccgggtgctcgggagctaccccatggacatgacccccatgaccgccggctcctcctccaccgttgtttcctcgtccgatgatccctcgtcgtcttgattgccgttggaggctggagctagctccgaggagaagtcgtcgagtagggacgttggttttctgctcatgtcgtcctactcgatcgcccctcgctgcagccggagtagttaattttgagtttcctttaatctttcatggtaatagtattatgtacgtgtaattgttcaaaatcatccgcggtgaatatatctgtgaaacagtactacatgacattcataatttcatattaatcagttttc

SEQ ID NO: 18644 - protein, 443 aa, Zea mays subsp. mays
  peptide (1)..(443): Ceres Seq. ID no. 12368131
KTKKQLRRRGSYLSQSVSQWLQRVSPGRRRSGRIRGSRATPRGGAEGVVRCSLQGAVVGGRAEWQSSCAVLSSKVAALGTHSVNGHVAPAPTQNGAVLDLVPVSSSSINGAITKNLPQPLRIADLSPAPMHGSQLRVAYQGVPGAYSEKAAGKAYPGCDAIPCDQFEVAFQAVELWIADRAVLPVENSLGGSIHRNYDLLLRHRLHIVGEVQLPVHHCLLALPGVRKECLTRVISHPQALAQCEHTLTAMGLNVVREAFDDTAGAAEYVAANGLRDTAAIASSRAAELYGMEVLADGIQDDSGNVTRFVMLAREPVVPRTDRPFKTSIVFAHDREGTSVLFKVLSAFAFRDISLTKIESRPHRHRPIRLVDDANVGTAKHFEYMFYVDFQASLAEPRAQNALAEVQEYTSFLRVLGSYPMDMTPMTAGSSSTVVSSSDDPSSS

SEQ ID NO: 18645 - protein, 314 aa, Zea mays subsp. mays
  peptide (1)..(314): Ceres Seq. ID no. 12368132
MHGSQLRVAYQGVPGAYSEKAAGKAYPGCDAIPCDQFEVAFQAVELWIADRAVLPVENSLGGSIHRNYDLLLRHRLHIVGEVQLPVHHCLLALPGVRKECLTRVISHPQALAQCEHTLTAMGLNVVREAFDDTAGAAEYVAANGLRDTAAIASSRAAELYGMEVLADGIQDDSGNVTRFVMLAREPVVPRTDRPFKTSIVFAHDREGTSVLFKVLSAFAFRDISLTKIESRPHRHRPIRLVDDANVGTAKHFEYMFYVDFQASLAEPRAQNALAEVQEYTSFLRVLGSYPMDMTPMTAGSSSTVVSSSDDPSSS

SEQ ID NO: 18646 - DNA, 934 bp, Zea mays subsp. mays
  misc_feature (1)..(934): Ceres Seq. ID no. 14305241
  misc_feature (1)..(934): Ortholog of  Ceres SEQ ID NO 15177055 as cited in SEQ ID NO 57450
  misc_feature (1)..(934): Ortholog of  Ceres SEQ ID NO 12615854 as cited in SEQ ID NO 62880
agagaatacaggggagaagccgagagccgaacgaagagaccgagcccccgccgcccgcggcgtctgttcctttcgtgccgcttcgtggtggcgccgtggcgcccaccaccacctcacctctcagtctctcaccacctatagcaataccacgagtccacgatccatggaatagactagactacaccgctcggccggtgacgacgacggcgacagccgacagtctatccccaactacgctctgcaccagcgccttatccgccgcctggggtttgttctggcgcggtggcagttgataaaggcgggagggattagagcaaggagagggatcggcgatgagcttcgcggatctggaggcgggggctctcagggcgcccctcgggaggaaagcgagaggggggccaaacgacgcgagagcgctcgtcttccagataaccaccgcggtggcctcgtaccgccgcctcctcaactcgctcggcacgcccaaggacaccatcacgcttcgtgataacctgcataagactagtcagaacatccttcaattagcaaaggatgcgaaagataagctccaaaaggctgctgaagcagacaagagcactgatacaagtgcagacaagaggatagctgatatgaagcttgccaaagattttgctgccacaatggaggagttcaggaaacttcagagtcttgcgattcagagggagacggcatataagccagttgttccacagaatacgcagtcaaactattctacagatgagcgaagttccgaatctggtaatatgcctgagcagcgtgcattactcgctgaatcaatgagacaagaggtgctgcaattggacaatgaaattgtttacaatgaagctataattgaggaaagggagcaagccattcaagatatccaacagcagattggtgaagtacatgaagtgttcaa

SEQ ID NO: 18647 - protein, 200 aa, Zea mays subsp. mays
  peptide (1)..(200): Ceres Seq. ID no. 14305242
MSFADLEAGALRAPLGRKARGGPNDARALVFQITTAVASYRRLLNSLGTPKDTITLRDNLHKTSQNILQLAKDAKDKLQKAAEADKSTDTSADKRIADMKLAKDFAATMEEFRKLQSLAIQRETAYKPVVPQNTQSNYSTDERSSESGNMPEQRALLAESMRQEVLQLDNEIVYNEAIIEEREQAIQDIQQQIGEVHEVF

SEQ ID NO: 18648 - protein, 102 aa, Zea mays subsp. mays
  peptide (1)..(102): Ceres Seq. ID no. 14305243
MKLAKDFAATMEEFRKLQSLAIQRETAYKPVVPQNTQSNYSTDERSSESGNMPEQRALLAESMRQEVLQLDNEIVYNEAIIEEREQAIQDIQQQIGEVHEVF

SEQ ID NO: 18649 - DNA, 1978 bp, Zea mays subsp. mays
  misc_feature (1)..(1978): Ceres Seq. ID no. 12387736
  misc_feature (1)..(1978): Ortholog of  Ceres SEQ ID NO 13657677 as cited in SEQ ID NO 66119
gcacgagaccattacctagaacatcctaatcaaaaattccattccactttccaccatggcttccctctgcgtccaccatacctcgctaccactctccccgccccaccaggtcaccgtccccgaaccctctcgcgcgctgcccccatcctcgcgcctccccgccctgccgtcctcctccaaccatgtcagcgcgctccctcgacccgcggcggcttccttcgccttcgcgtgccactgcaaagcaccggtgcgggaccacgacgctgagctcctccgcgctctacggtccaacggcaacggcaccctccacggggacacagcactgccgcaagtgctcgactcgcgctccgacggaccgggcggcgacggcagcagcaagaggtcgcgtttctgcgcccgggattgcgcgaagcggatcatggagctgcccgtggaggagcgggtgaaggtgctcgacctcttgcagcgcgacgacgcggcgctcaccgtctccgattacaacgacatcctttcggcgctggctcgcgcgggagaccacgccacggccgtcgctctgttccgcgccatgcccgtcgcccccgacgcacactccttcgccaccgccgtgcagtgcctctgccgacagggcgcgcccgacgaggccaagctcgcgctcgacgagatggtggcgcgcgggttccgccccagcgttgccacgttctcagccgttgtggggtgcctctgcaagcgcggacgcgtcaccaaggccatggaggtgttggacgccatgctcggcctcgggtgcgagcctaccatccgcacgtacaacagcctcgtcggtgggctctgctacgtcggccggctggaggaggcgctcgaactcctcaagaagctcaaggactcgcccctgacgcctgacatctacaccttcaccatcgtgctcgacggattctgtaaggtcgggcggacggaggaggccacggccatcttccacgatgcgatcgggatgggcctctcgccgacgacattcacgtacaacgcgctcttgaacggccactgcaaggagggaaacccgctcaaagcgttcgcgctgctcatggagatgtgcggcaataacgacgccgcctgcctgccagacaagaccagcttcgggatcgtgctgacggcgctgctccgcgccggcgagacctcagcggcgtggcagacgtacaagcggatggagcgcgctgggttcgaggtggacgggcgcgcgctggacacgctggctcggggcctgtgccggcggtgcgcgacggacgcctcggccctcggcgacgcggaggaggtgttcggcaaggtagtggcttcgggccacgagccggtgtcctacacgtactgcctgatggcgcaggcgctggcgcgcggcggcgaggtggacgcggccgtggcgctcctggaggacatggtgcgcaagggatacgcgctgcggaagcgcgcctacacggacgtggtgcgcgcgctctgtgaccgtggcagggcccgcgacgcgctgcaggtgcttgtgcttgtgatgatcgtgagggacttcgtgccgggacggaacgcgttcgaagcgctcctgggagagctgagccggcaggggcggtgggctgacgccatgaccgtgtacgccgccgctgtgaagcgaggcgtggtggtctcgtggaagcacctcggcagagaggcgcactcaccggaggagcccattcggctgggcgtccctgtcccgcagtgaccgtttgtctggggctctgggcgcggccgggatcaccatctttctgagcccattcggcttgcgttctgtttccgatgctgtagacggaaaattctgccagtttggaccgcttgcagatggcactgaggaacaagcgtagctgatggttcaggtattcgcgttgtcgctaattttcgtgacactcaccgcaaatgtaccgaaattatgtaaatcatttctgcttctacgtaaatcatctctgcttct

SEQ ID NO: 18650 - protein, 558 aa, Zea mays subsp. mays
  peptide (1)..(558): Ceres Seq. ID no. 12387737
MASLCVHHTSLPLSPPHQVTVPEPSRALPPSSRLPALPSSSNHVSALPRPAAASFAFACHCKAPVRDHDAELLRALRSNGNGTLHGDTALPQVLDSRSDGPGGDGSSKRSRFCARDCAKRIMELPVEERVKVLDLLQRDDAALTVSDYNDILSALARAGDHATAVALFRAMPVAPDAHSFATAVQCLCRQGAPDEAKLALDEMVARGFRPSVATFSAVVGCLCKRGRVTKAMEVLDAMLGLGCEPTIRTYNSLVGGLCYVGRLEEALELLKKLKDSPLTPDIYTFTIVLDGFCKVGRTEEATAIFHDAIGMGLSPTTFTYNALLNGHCKEGNPLKAFALLMEMCGNNDAACLPDKTSFGIVLTALLRAGETSAAWQTYKRMERAGFEVDGRALDTLARGLCRRCATDASALGDAEEVFGKVVASGHEPVSYTYCLMAQALARGGEVDAAVALLEDMVRKGYALRKRAYTDVVRALCDRGRARDALQVLVLVMIVRDFVPGRNAFEALLGELSRQGRWADAMTVYAAAVKRGVVVSWKHLGREAHSPEEPIRLGVPVPQ

SEQ ID NO: 18651 - protein, 437 aa, Zea mays subsp. mays
  peptide (1)..(437): Ceres Seq. ID no. 12387738
MELPVEERVKVLDLLQRDDAALTVSDYNDILSALARAGDHATAVALFRAMPVAPDAHSFATAVQCLCRQGAPDEAKLALDEMVARGFRPSVATFSAVVGCLCKRGRVTKAMEVLDAMLGLGCEPTIRTYNSLVGGLCYVGRLEEALELLKKLKDSPLTPDIYTFTIVLDGFCKVGRTEEATAIFHDAIGMGLSPTTFTYNALLNGHCKEGNPLKAFALLMEMCGNNDAACLPDKTSFGIVLTALLRAGETSAAWQTYKRMERAGFEVDGRALDTLARGLCRRCATDASALGDAEEVFGKVVASGHEPVSYTYCLMAQALARGGEVDAAVALLEDMVRKGYALRKRAYTDVVRALCDRGRARDALQVLVLVMIVRDFVPGRNAFEALLGELSRQGRWADAMTVYAAAVKRGVVVSWKHLGREAHSPEEPIRLGVPVPQ

SEQ ID NO: 18652 - protein, 388 aa, Zea mays subsp. mays
  peptide (1)..(388): Ceres Seq. ID no. 12387739
MPVAPDAHSFATAVQCLCRQGAPDEAKLALDEMVARGFRPSVATFSAVVGCLCKRGRVTKAMEVLDAMLGLGCEPTIRTYNSLVGGLCYVGRLEEALELLKKLKDSPLTPDIYTFTIVLDGFCKVGRTEEATAIFHDAIGMGLSPTTFTYNALLNGHCKEGNPLKAFALLMEMCGNNDAACLPDKTSFGIVLTALLRAGETSAAWQTYKRMERAGFEVDGRALDTLARGLCRRCATDASALGDAEEVFGKVVASGHEPVSYTYCLMAQALARGGEVDAAVALLEDMVRKGYALRKRAYTDVVRALCDRGRARDALQVLVLVMIVRDFVPGRNAFEALLGELSRQGRWADAMTVYAAAVKRGVVVSWKHLGREAHSPEEPIRLGVPVPQ

SEQ ID NO: 18653 - DNA, 458 bp, Zea mays subsp. mays
  misc_feature (1)..(458): Ceres Seq. ID no. 5006268
  misc_feature (1)..(458): Ortholog of  Ceres SEQ ID NO 15179187 as cited in SEQ ID NO 0
ccattgacatcaccgagacctatcgccgcagaaccaccgaatccagggcatcggagagtgtagaggttagtacgaggcggaggtcaagatggtgtgcatccggcaggcgactatcgacgacctgctggcgatgcaggcgtgcaacttgatgtgcctgccggagaactaccagatgaagtactacctctaccacatgctgtcttggccgcagctcctcttcgtcgccgaggactacggcggccgcatcgtcggctacgtgctcgccaagatggaggaggacccctccgagccctgccacggccacatcacctccctcgcggtgctccgctcccaccgcaagctcgggctcgccaccaagctcatgtccgccgcggataacaggctgatgactcccaagagctcttatcgacggagtcgtttggcactcgatgtcgactcatcacatcctggggtngaag

SEQ ID NO: 18654 - protein, 123 aa, Zea mays subsp. mays
  peptide (1)..(123): Ceres Seq. ID no. 5006269
  misc_feature (122)..(122): Xaa is any aa, unknown or other
MVCIRQATIDDLLAMQACNLMCLPENYQMKYYLYHMLSWPQLLFVAEDYGGRIVGYVLAKMEEDPSEPCHGHITSLAVLRSHRKLGLATKLMSAADNRLMTPKSSYRRSRLALDVDSSHPGXE

SEQ ID NO: 18655 - protein, 109 aa, Zea mays subsp. mays
  peptide (1)..(109): Ceres Seq. ID no. 5006270
  misc_feature (108)..(108): Xaa is any aa, unknown or other
MQACNLMCLPENYQMKYYLYHMLSWPQLLFVAEDYGGRIVGYVLAKMEEDPSEPCHGHITSLAVLRSHRKLGLATKLMSAADNRLMTPKSSYRRSRLALDVDSSHPGXE

SEQ ID NO: 18656 - protein, 103 aa, Zea mays subsp. mays
  peptide (1)..(103): Ceres Seq. ID no. 5006271
  misc_feature (102)..(102): Xaa is any aa, unknown or other
MCLPENYQMKYYLYHMLSWPQLLFVAEDYGGRIVGYVLAKMEEDPSEPCHGHITSLAVLRSHRKLGLATKLMSAADNRLMTPKSSYRRSRLALDVDSSHPGXE

SEQ ID NO: 18657 - DNA, 1108 bp, Zea mays subsp. mays
  misc_feature (1)..(1108): Ceres Seq. ID no. 12363658
  misc_feature (1)..(1108): Ortholog of  Ceres SEQ ID NO 13656286 as cited in SEQ ID NO 69168
  misc_feature (1)..(1108): Ortholog of  Ceres SEQ ID NO 15174351 as cited in SEQ ID NO 0
gtgcctccatcttccgattcccatcgcttgtttgctgctgccttttcctttccgccgcggcaaaagtgaggagcgcgcgggcgagttgggggagacgaacccgtcataactccttcgcttaatcgcgtctcgtgctcctgcctcctgcgtatataaacgcggcaatcgcgacgcccggggaggcgttcgttctccttctccatcccacgcgcgcgcagtccaaggccggatcggcggcctctcagatctcgccggccgccgtgagacagagaccgaagggggggttgaccggtgctccggaggaagatgtttagcgggacgcagcagaagtgcaaggtgtgcaccaagacggtgtacccgatggaccagctctccaccgacggcgtcgtcttccaccgctcctgcttcaagtgccagcactgcaagtctaccctctcactgagcaactattcctcgttcgaaggagtgccgtactgcaagacccatttcgagcagctgttcaaggagaccgggagttacaacaagagcttccaatcacagtcacctgcaaagattactccggaaaagttggcccctgagctgaccagatcaccaagcaaagctgcaaggatgttttcaggaacacaagacaagtgtgcgacttgtggtaaaactgcgtatcctcttgagaaggtaacagtcgaagagaagtcctaccataagtcatgcttcaaatgctcccacgggggctgcgcgattacaccttccaactatgcagccttggagggcatcctctactgcaaacaccatttctcccaacttttcaaggagaagggaagctacaaccacttgatcaagtgcgcgtccgtcaagcgcgctgctgaagcacagccagaacaaccggcctctgattcctcctcctgaccacgccatttaaacagtgggggtttggaggcgagagagttgggaagcctcctgtttctacttaaaaccgcgtgatgtatgttattccatctatgccccgaggatactagactactactctattttggtatcctctgctgtgctagctggatcatatcagcgaaccatggaattgctgtcattttcaatgaaactgttgtgcatc

SEQ ID NO: 18658 - protein, 198 aa, Zea mays subsp. mays
  peptide (1)..(198): Ceres Seq. ID no. 12363659
MFSGTQQKCKVCTKTVYPMDQLSTDGVVFHRSCFKCQHCKSTLSLSNYSSFEGVPYCKTHFEQLFKETGSYNKSFQSQSPAKITPEKLAPELTRSPSKAARMFSGTQDKCATCGKTAYPLEKVTVEEKSYHKSCFKCSHGGCAITPSNYAALEGILYCKHHFSQLFKEKGSYNHLIKCASVKRAAEAQPEQPASDSSS

SEQ ID NO: 18659 - protein, 180 aa, Zea mays subsp. mays
  peptide (1)..(180): Ceres Seq. ID no. 12363660
MDQLSTDGVVFHRSCFKCQHCKSTLSLSNYSSFEGVPYCKTHFEQLFKETGSYNKSFQSQSPAKITPEKLAPELTRSPSKAARMFSGTQDKCATCGKTAYPLEKVTVEEKSYHKSCFKCSHGGCAITPSNYAALEGILYCKHHFSQLFKEKGSYNHLIKCASVKRAAEAQPEQPASDSSS

SEQ ID NO: 18660 - DNA, 1355 bp, Zea mays subsp. mays
  misc_feature (1)..(1355): Ceres Seq. ID no. 12419087
  misc_feature (1)..(1355): Ortholog of  Ceres SEQ ID NO 12609352 as cited in SEQ ID NO 52059
  misc_feature (1)..(1355): Ortholog of  Ceres SEQ ID NO 12615238 as cited in SEQ ID NO 62540
gcacgagaccattacctagaacatcctaatcgaaaaaccatccaagccatagcgagcgcccaccgccaacccaaacccaccggccaccaccactacgccacaccgatcgccatggccgccaccacgccggcgcccccctcccacggcggcgggcgcaacggcaccctccctactccgctgccttccaacgagtccttctccaagttcttcgagtcctggatctcggagcagtcccgcgacctcgaggagctgcgcgccgcggcgtccgcggacccgcccgcgcccgaganccgagctccggcgcctcgtgggccaggtgctcggccactacgcgcagtactaccgcgccaaggcggcggccgcggccgacgacgtgctctgcatgttcaccccgtcctggacctccaccaccgagaacctctacctctggtgcggcggctggcgccccaccgccgcgatccagctgctgtacaccaagtccgggatgcagctgcagcaccagctccccgccttcctcgacggcgggggcctcaaggacgacctcggcgacctcggcgccgcgcagctccaggccgccgaccagctgcagcgccgcaccatccggagggagcgcgagatcgaggacgccgccgcgagcgcacaggaagcgctgacgacggcgacgatggtggagctcgcgggcggcggcgggagggaggcgggggccatggaccgggagatgcaggcgaaggcggaggggatgaggcgggtgctggagatggcggacgcgctgcgcctcgagacgatgcgcgaggtggtggcgctgctccgccccgcgcaggccgtgcacttcctcctcgccgccgccgagctccacctcgccgtgcacgacttcgggcgccgcaaggacggccgcgccggcaacgtcgccgccgccgcgccgccggagtgacggacgctggcgcgcgtgaaacgataacgggcttgcctgcctgcctggctgctctgcttttgcttgtgtcgtgtagctggggggctccctgttccaagcggcgcatggctgcgcctgctcgcgcgcgcgcgttcgttgcccctgacgtcgcgctcgtcgcctagctacccatccataaaggctgcggctggtttggtcagcacgagctgtcgcgataagcttctgaccatttgttcctcttgctgtgcctgtgcactgtgcagtcgtgagtcgtgacacatgcctgtctttggagtaaagcgagatcttgtttgggagtagtagagatgttatgcttcagcagtgaaatgaaaataataatttggatttggtttcagcgcgacaatgaaatagatgttggactgacttttgggatcatgtttac

SEQ ID NO: 18661 - protein, 364 aa, Zea mays subsp. mays
  peptide (1)..(364): Ceres Seq. ID no. 12419088
  misc_feature (97)..(97): Xaa is any aa, unknown or other
ARDHYLEHPNRKTIQAIASAHRQPKPTGHHHYATPIAMAATTPAPPSHGGGRNGTLPTPLPSNESFSKFFESWISEQSRDLEELRAAASADPPAPEXRAPAPRGPGARPLRAVLPRQGGGRGRRRALHVHPVLDLHHREPLPLVRRLAPHRRDPAAVHQVRDAAAAPAPRLPRRRGPQGRPRRPRRRAAPGRRPAAAPHHPEGARDRGRRRERTGSADDGDDGGARGRRREGGGGHGPGDAGEGGGDEAGAGDGGRAAPRDDARGGGAAPPRAGRALPPRRRRAPPRRARLRAPQGRPRRQRRRRRAAGVTDAGARETITGLPACLAALLLLVSCSWGAPCSKRRMAAPARARAFVAPDVALVA

SEQ ID NO: 18662 - protein, 327 aa, Zea mays subsp. mays
  peptide (1)..(327): Ceres Seq. ID no. 12419089
  misc_feature (60)..(60): Xaa is any aa, unknown or other
MAATTPAPPSHGGGRNGTLPTPLPSNESFSKFFESWISEQSRDLEELRAAASADPPAPEXRAPAPRGPGARPLRAVLPRQGGGRGRRRALHVHPVLDLHHREPLPLVRRLAPHRRDPAAVHQVRDAAAAPAPRLPRRRGPQGRPRRPRRRAAPGRRPAAAPHHPEGARDRGRRRERTGSADDGDDGGARGRRREGGGGHGPGDAGEGGGDEAGAGDGGRAAPRDDARGGGAAPPRAGRALPPRRRRAPPRRARLRAPQGRPRRQRRRRRAAGVTDAGARETITGLPACLAALLLLVSCSWGAPCSKRRMAAPARARAFVAPDVALVA

SEQ ID NO: 18663 - protein, 182 aa, Zea mays subsp. mays
  peptide (1)..(182): Ceres Seq. ID no. 12419090
MFTPSWTSTTENLYLWCGGWRPTAAIQLLYTKSGMQLQHQLPAFLDGGGLKDDLGDLGAAQLQAADQLQRRTIRREREIEDAAASAQEALTTATMVELAGGGGREAGAMDREMQAKAEGMRRVLEMADALRLETMREVVALLRPAQAVHFLLAAAELHLAVHDFGRRKDGRAGNVAAAAPPE

SEQ ID NO: 18664 - DNA, 1651 bp, Zea mays subsp. mays
  misc_feature (1)..(1651): Ceres Seq. ID no. 12435629
  misc_feature (1)..(1651): Ortholog of  Ceres SEQ ID NO 15172174 as cited in SEQ ID NO 60481
  misc_feature (1)..(1651): Ortholog of  Ceres SEQ ID NO 15176081 as cited in SEQ ID NO 65838
  misc_feature (1)..(1651): Ortholog of  Ceres SEQ ID NO 14302875 as cited in SEQ ID NO 66242
  misc_feature (1)..(1651): Ortholog of  Ceres SEQ ID NO 13660287 as cited in SEQ ID NO 67316
  misc_feature (1)..(1651): Ortholog of  Ceres SEQ ID NO 14307892 as cited in SEQ ID NO 67490
gtcaactaaactctagccagtgagtcgatgatgggtcggacgggtgacggccgccgccgcgacgtcgacggccggctggaggcgctgctctctggcgccggcggcgaggagccgtggctccggcgcgtggcgctcgcgacggctctggagctgcggctgctggcgccctggccgcgccggccgtggtggtctacatgctcatcatcgtcatgtcgtcgaccacgcagatcgtgtgcggccagctcggcaacgtccagctcgccgccgcctccctcggcaacaacggcatccaggtcttcgcctacggcatcatgctggggatgggcagcgcggtggagacgctgtgcgggcaggcgtacggcgccgagaagtacgagatgctgggcgtgtacctgcagcgctcgacggtgctgctcacggccaccggcgtgccgctcgccgccgtgtacgcgctgtcggagccgctgctgctgctgctggggcagtcgcctgagatcgccggcgccgccgccgagttcgcctacggcctcgtcccgcagatcttcgcgtacgccgccaacttccccatccagaagttcctgcaggcgcagagcatcgtggcgcccagcgcctacatcctggcggccagcttcgcgctccacgtgccgctcagctggctcgccgtctacgggctgggcctcggcctgctcggggcctcgctcacgctcagcctcacgtggtgggtgctggtcctggcccagttcgcgtacatcgtgtggagcccgcgctgccgggccacctggaccgggtttacgtgggctgccttcgccgacctgcccgggttcgccggcctgtccgcggcgtcggctgtcatgctggcgctcgaggtctggtacttccaggtgctcatcctcctcgccggcgtgctgcctgacccgcagatcgctctggactcgctaacggtctgcacgtcgatccagtcatgggtgttcatgatctctgtgggcttcaatgcagctgccagcgtgagggttgggaatgagctgggcgccggcaaccccaggtccgccgcgttctctgcgtgggtggtcaccgccctgtcggcgttcgtctctgggatagctggcctcgtcactttcctgctcagggacaagctcagctacatcttcaccggtggcgaggccgtctcgcgcgccgtcgtcgacttgtgcccgctgctcgttgggaccattgtgctctgcgggatccagcccgtgctatcaggtgtggccgttggctgcgggtggcaagccatggttgcctacatcaacgtcggatgctactacttcatcggcgtacccctcgggcgtgctcctcggattcaagttcggtttcgggatcaagggactgtggggaggcatgattgggggtaccctcatccaaacacttgctttgatctggatcacgttaagaactgactggaacaaggaggtcgaggaagcgcggaaaagattggataagtgggacgacacaaggcagcctcttctcgcaagcaaggagtgatgtatgatggtacaggagtggatgaagaagattcagtaggcttctgctagctgatccagtctgaaatcatcttgtagtcgccaccgctaactgcaattcagggatgtactaatgcagagcttctctgggc

SEQ ID NO: 18665 - protein, 413 aa, Zea mays subsp. mays
  peptide (1)..(413): Ceres Seq. ID no. 12435630
MLIIVMSSTTQIVCGQLGNVQLAAASLGNNGIQVFAYGIMLGMGSAVETLCGQAYGAEKYEMLGVYLQRSTVLLTATGVPLAAVYALSEPLLLLLGQSPEIAGAAAEFAYGLVPQIFAYAANFPIQKFLQAQSIVAPSAYILAASFALHVPLSWLAVYGLGLGLLGASLTLSLTWWVLVLAQFAYIVWSPRCRATWTGFTWAAFADLPGFAGLSAASAVMLALEVWYFQVLILLAGVLPDPQIALDSLTVCTSIQSWVFMISVGFNAAASVRVGNELGAGNPRSAAFSAWVVTALSAFVSGIAGLVTFLLRDKLSYIFTGGEAVSRAVVDLCPLLVGTIVLCGIQPVLSGVAVGCGWQAMVAYINVGCYYFIGVPLGRAPRIQVRFRDQGTVGRHDWGYPHPNTCFDLDHVKN

SEQ ID NO: 18666 - protein, 408 aa, Zea mays subsp. mays
  peptide (1)..(408): Ceres Seq. ID no. 12435631
MSSTTQIVCGQLGNVQLAAASLGNNGIQVFAYGIMLGMGSAVETLCGQAYGAEKYEMLGVYLQRSTVLLTATGVPLAAVYALSEPLLLLLGQSPEIAGAAAEFAYGLVPQIFAYAANFPIQKFLQAQSIVAPSAYILAASFALHVPLSWLAVYGLGLGLLGASLTLSLTWWVLVLAQFAYIVWSPRCRATWTGFTWAAFADLPGFAGLSAASAVMLALEVWYFQVLILLAGVLPDPQIALDSLTVCTSIQSWVFMISVGFNAAASVRVGNELGAGNPRSAAFSAWVVTALSAFVSGIAGLVTFLLRDKLSYIFTGGEAVSRAVVDLCPLLVGTIVLCGIQPVLSGVAVGCGWQAMVAYINVGCYYFIGVPLGRAPRIQVRFRDQGTVGRHDWGYPHPNTCFDLDHVKN

SEQ ID NO: 18667 - protein, 374 aa, Zea mays subsp. mays
  peptide (1)..(374): Ceres Seq. ID no. 12435632
MLGMGSAVETLCGQAYGAEKYEMLGVYLQRSTVLLTATGVPLAAVYALSEPLLLLLGQSPEIAGAAAEFAYGLVPQIFAYAANFPIQKFLQAQSIVAPSAYILAASFALHVPLSWLAVYGLGLGLLGASLTLSLTWWVLVLAQFAYIVWSPRCRATWTGFTWAAFADLPGFAGLSAASAVMLALEVWYFQVLILLAGVLPDPQIALDSLTVCTSIQSWVFMISVGFNAAASVRVGNELGAGNPRSAAFSAWVVTALSAFVSGIAGLVTFLLRDKLSYIFTGGEAVSRAVVDLCPLLVGTIVLCGIQPVLSGVAVGCGWQAMVAYINVGCYYFIGVPLGRAPRIQVRFRDQGTVGRHDWGYPHPNTCFDLDHVKN

SEQ ID NO: 18668 - DNA, 1784 bp, Zea mays subsp. mays
  misc_feature (1)..(1784): Ceres Seq. ID no. 15180518
  misc_feature (1)..(1784): Ortholog of  Ceres SEQ ID NO 15169244 as cited in SEQ ID NO 58988
actttcccagggagcgtttaattgcctccgcctgcctcgctctcgcttccttcggatgccgctctgcctctgccgcgcccgccagctgcacgcagttcagcaacgcgcgcgccacggcccgcgacgcgatgagcgagaggaggaggcgggcgagcgctgcttccctcgggggtggaggtggcggcggcgttggtggtgttgcgcctgcgcgggccgaggaggacaaggtcgcggcgccgggtaaagcgcctccgccgacggtgtggttcgcgttcaagcggtcgctgcactgccgctccgagccgtcggaggtccacgtgccgcgtgccaaggccggtcccgtcgcgggcgggggcgccggcgcggctgtcggcggcggccacctgtcgtcgatcgtcaccaagcgcgccgcgcggtcggggtgctcgcgctccatcgccaacctccgggacgtcatccacgggagcaagcgccacccggggcagccgcccagctgcagcccgcggtccatcggcagcagcgagttcctcaaccccattgcacacgaggtcgtgctcagcaccaactcccgctgcgagctcaagatcaccggcttcggcggctgcggggggctggcggccgtcggggtggggaccggcgccgcgaacgacgccgacggcgggggcgacggcggcgtcgtgtcgtcgttcgtcggcacgctccgccctggcacgccgggcccagcgtgggccggacacggactgccgtacagcggctccgtgcggggcagcgtgcgctgcacgccgccgaggtcgccgaacgtgatgctcgagaggaatggctcagtggtgaacggccaccgcgcgtcatgcgacgaaaccgctaaaaacggcgccagcaagggctccggtgggctcagctgccacaagtgcggcgagcagttcagcaagtgggaggcgctggaggcgcaccacctctccaaacacgcagtgacggagctggtggaaggggactcgtcgcggaagatcgtggagatcatctgccggacgagcctgctcaagtcggagagcagctgcgtccggatcgagcgcgtgttcaaggtgcacaacacgcagcggacgctgtcccgcttcgaggagtaccgcgaggccgtgaagctcaaggcgagcaagctagccaagaagcacccgcgctgcctcgccgacggcaacgagctgctgcgcttccacggcgccacgctctcgtgcgcgctcggcggcggctccggctcttccagcctctgcgcctccgacaagtgcgccgtgtgccgcatcatccggcacggcttctccgccaggaaggagggcaagggcggcgtgggcgtgttcaccacgtccaccagcggccgcgcgttcgagtccatcgttgaggcgccccccgccatcggcgtcggcgacgacgacggagcgggccagctgggcctgggcaccgcgcgcagggcgctgctggtgtgcagggtcatcgccggccgcgtgcacaagccgctggacaacctcaaggagttcgtggggcagacgggcttcgattcgctcgccggcaaggtcggaccctactccaacatcgaggagctgtacctgctgaacccgagggcgctgctcccgtgcttcgtcgtcatctgtagaccgtagcctactactagctaaacacaccgtctcattcttctctcttcccacttttctctttcgattgctactctagtgtacgtagttaacacggacacggcatagctatcgcctatcggttggaaggtcggatggatttgtcct

SEQ ID NO: 18669 - protein, 547 aa, Zea mays subsp. mays
  peptide (1)..(547): Ceres Seq. ID no. 15180519
FPRERLIASACLALASFGCRSASAAPASCTQFSNARATARDAMSERRRRASAASLGGGGGGGVGGVAPARAEEDKVAAPGKAPPPTVWFAFKRSLHCRSEPSEVHVPRAKAGPVAGGGAGAAVGGGHLSSIVTKRAARSGCSRSIANLRDVIHGSKRHPGQPPSCSPRSIGSSEFLNPIAHEVVLSTNSRCELKITGFGGCGGLAAVGVGTGAANDADGGGDGGVVSSFVGTLRPGTPGPAWAGHGLPYSGSVRGSVRCTPPRSPNVMLERNGSVVNGHRASCDETAKNGASKGSGGLSCHKCGEQFSKWEALEAHHLSKHAVTELVEGDSSRKIVEIICRTSLLKSESSCVRIERVFKVHNTQRTLSRFEEYREAVKLKASKLAKKHPRCLADGNELLRFHGATLSCALGGGSGSSSLCASDKCAVCRIIRHGFSARKEGKGGVGVFTTSTSGRAFESIVEAPPAIGVGDDDGAGQLGLGTARRALLVCRVIAGRVHKPLDNLKEFVGQTGFDSLAGKVGPYSNIEELYLLNPRALLPCFVVICRP

SEQ ID NO: 18670 - protein, 505 aa, Zea mays subsp. mays
  peptide (1)..(505): Ceres Seq. ID no. 15180520
MSERRRRASAASLGGGGGGGVGGVAPARAEEDKVAAPGKAPPPTVWFAFKRSLHCRSEPSEVHVPRAKAGPVAGGGAGAAVGGGHLSSIVTKRAARSGCSRSIANLRDVIHGSKRHPGQPPSCSPRSIGSSEFLNPIAHEVVLSTNSRCELKITGFGGCGGLAAVGVGTGAANDADGGGDGGVVSSFVGTLRPGTPGPAWAGHGLPYSGSVRGSVRCTPPRSPNVMLERNGSVVNGHRASCDETAKNGASKGSGGLSCHKCGEQFSKWEALEAHHLSKHAVTELVEGDSSRKIVEIICRTSLLKSESSCVRIERVFKVHNTQRTLSRFEEYREAVKLKASKLAKKHPRCLADGNELLRFHGATLSCALGGGSGSSSLCASDKCAVCRIIRHGFSARKEGKGGVGVFTTSTSGRAFESIVEAPPAIGVGDDDGAGQLGLGTARRALLVCRVIAGRVHKPLDNLKEFVGQTGFDSLAGKVGPYSNIEELYLLNPRALLPCFVVICRP

SEQ ID NO: 18671 - protein, 280 aa, Zea mays subsp. mays
  peptide (1)..(280): Ceres Seq. ID no. 15180521
MLERNGSVVNGHRASCDETAKNGASKGSGGLSCHKCGEQFSKWEALEAHHLSKHAVTELVEGDSSRKIVEIICRTSLLKSESSCVRIERVFKVHNTQRTLSRFEEYREAVKLKASKLAKKHPRCLADGNELLRFHGATLSCALGGGSGSSSLCASDKCAVCRIIRHGFSARKEGKGGVGVFTTSTSGRAFESIVEAPPAIGVGDDDGAGQLGLGTARRALLVCRVIAGRVHKPLDNLKEFVGQTGFDSLAGKVGPYSNIEELYLLNPRALLPCFVVICRP

SEQ ID NO: 18672 - DNA, 1483 bp, Zea mays subsp. mays
  misc_feature (1)..(1483): Ceres Seq. ID no. 12391498
  misc_feature (1)..(1483): Ortholog of  Ceres SEQ ID NO 13596048 as cited in SEQ ID NO 68476
  misc_feature (1)..(1483): Ortholog of  Ceres SEQ ID NO 12589137 as cited in SEQ ID NO 0
atgttggccgccaatcgcagtatcggcaccgttcttccccgcttctccagtccagctcaccagccgccccccctccgctgctgacactgcgaagtgcgaatcaaagccaccaccgcgcagaaaccatggcaccggtggaagcggagcagcaccggcggagggcgctggcgctcgcggcgcacgacgcctccggcgccgtctcccccatccgcatctcgcgaagggacactggagatgacgatgttgccatacagatactgtactgcgggatatgccactctgacctgcacaccatcaagaacgagtggaagaacgccaactatcctgttgtccctgggcacgagatcgccgggctgatcaccgaggttggcaagaatgtgaagaggttcaacgtcggagacaaggttggcgtcgggtgcatggtcaacacatgccagtcctgcgagagctgcgagggagggcacgagaactactgctccaagatcatcttcacctacaactcccacgacagggacggcaccgtcacctacggtggctactctgacatggttgtcgtcgacgagcgcttcgtcatccggttccctgatggcatgcccctcgacagaggcgcgccgctgctctgcgctgggataaccgtgtacaaccccatgaagcaccacgggctgaacgaggcaggcaagcacatcggcgtggttggacttggggggcttgggcatgtcgccgtgaagttcgcgaaggcgttcgggatgagggtgaccgtgatcagcacgtccccggggaagagggaggaagctatggagacgcttggtgcggacgcctttgttgtcagcagtgatgctaaccagatgaaggcggcgaagggcacaatggatggcattatgaacacggcctccgcaagcatgtccatgtacgcttaccttgctctcctcaagccccagggcaagatgatcctgcttggcctgcctgagaagcctctgcagatctccgccttctctttggttactgggggcaagactctggccgggagctgcatggggagcatcagggacacgcaggagatgatggacttcgcagccaagcacgggttgacagcggacatcgaactgatcggcaccgaagaagttaatgaggccatggaacgcctcgccaagggcgaggtcaggtaccgcttcgtcatcgacatcggcaacaccatcagcgcggcatcactagggagctcgccggtcccagctctgtagctgcgacacttgttcctgcttggatatatcgtgcgataagcaagtatatttggaataaaaaggaactcaatttaaacgcaagtaatactgtttgtctttggtcctatttgggctttggtttattgggtactgcatagttttgccctcctcttgtagtctagtagtaacggatcaaacgttttttactgagagagacaaaaccagtccgtgctgctgaattaaggacacaaatttaaaaatccctt

SEQ ID NO: 18673 - protein, 411 aa, Zea mays subsp. mays
  peptide (1)..(411): Ceres Seq. ID no. 12391499
VGRQSQYRHRSSPLLQSSSPAAPPPLLTLRSANQSHHRAETMAPVEAEQHRRRALALAAHDASGAVSPIRISRRDTGDDDVAIQILYCGICHSDLHTIKNEWKNANYPVVPGHEIAGLITEVGKNVKRFNVGDKVGVGCMVNTCQSCESCEGGHENYCSKIIFTYNSHDRDGTVTYGGYSDMVVVDERFVIRFPDGMPLDRGAPLLCAGITVYNPMKHHGLNEAGKHIGVVGLGGLGHVAVKFAKAFGMRVTVISTSPGKREEAMETLGADAFVVSSDANQMKAAKGTMDGIMNTASASMSMYAYLALLKPQGKMILLGLPEKPLQISAFSLVTGGKTLAGSCMGSIRDTQEMMDFAAKHGLTADIELIGTEEVNEAMERLAKGEVRYRFVIDIGNTISAASLGSSPVPAL

SEQ ID NO: 18674 - protein, 370 aa, Zea mays subsp. mays
  peptide (1)..(370): Ceres Seq. ID no. 12391500
MAPVEAEQHRRRALALAAHDASGAVSPIRISRRDTGDDDVAIQILYCGICHSDLHTIKNEWKNANYPVVPGHEIAGLITEVGKNVKRFNVGDKVGVGCMVNTCQSCESCEGGHENYCSKIIFTYNSHDRDGTVTYGGYSDMVVVDERFVIRFPDGMPLDRGAPLLCAGITVYNPMKHHGLNEAGKHIGVVGLGGLGHVAVKFAKAFGMRVTVISTSPGKREEAMETLGADAFVVSSDANQMKAAKGTMDGIMNTASASMSMYAYLALLKPQGKMILLGLPEKPLQISAFSLVTGGKTLAGSCMGSIRDTQEMMDFAAKHGLTADIELIGTEEVNEAMERLAKGEVRYRFVIDIGNTISAASLGSSPVPAL

SEQ ID NO: 18675 - protein, 272 aa, Zea mays subsp. mays
  peptide (1)..(272): Ceres Seq. ID no. 12391501
MVNTCQSCESCEGGHENYCSKIIFTYNSHDRDGTVTYGGYSDMVVVDERFVIRFPDGMPLDRGAPLLCAGITVYNPMKHHGLNEAGKHIGVVGLGGLGHVAVKFAKAFGMRVTVISTSPGKREEAMETLGADAFVVSSDANQMKAAKGTMDGIMNTASASMSMYAYLALLKPQGKMILLGLPEKPLQISAFSLVTGGKTLAGSCMGSIRDTQEMMDFAAKHGLTADIELIGTEEVNEAMERLAKGEVRYRFVIDIGNTISAASLGSSPVPAL

SEQ ID NO: 18676 - DNA, 599 bp, Zea mays subsp. mays; identical to SEQ ID NO: 8827
  misc_feature (1)..(599): Ceres Seq. ID no. 12381635
  misc_feature (1)..(599): Ortholog of  Ceres SEQ ID NO 13596509 as cited in SEQ ID NO 62004

SEQ ID NO: 18677 - protein, 199 aa, Zea mays subsp. mays; identical to SEQ ID NO: 8828
  peptide (1)..(199): Ceres Seq. ID no. 12381636

SEQ ID NO: 18678 - protein, 166 aa, Zea mays subsp. mays; identical to SEQ ID NO: 8829
  peptide (1)..(166): Ceres Seq. ID no. 12381637

SEQ ID NO: 18679 - DNA, 1675 bp, Zea mays subsp. mays
  misc_feature (1)..(1675): Ceres Seq. ID no. 12369580
  misc_feature (1)..(1675): Ortholog of  Ceres SEQ ID NO 14315241 as cited in SEQ ID NO 52516
  misc_feature (1)..(1675): Ortholog of  Ceres SEQ ID NO 13594349 as cited in SEQ ID NO 58161
  misc_feature (1)..(1675): Ortholog of  Ceres SEQ ID NO 13663419 as cited in SEQ ID NO 66561
  misc_feature (1)..(1675): Ortholog of  Ceres SEQ ID NO 15177892 as cited in SEQ ID NO 0
cttggtcaatgggagtggctgaggctggcgtgcggacctaaaatccccactgatatatctgcccatgcccaggcattggatctcgtccccaatggcaatgcgtcaccagttcggggcttcggtgctgctgcatctactggtgttagcgggggcgggggccatggtcactgctgaccaggagagcgaccggatccgcgagctcccgggccagccgccgaacgtggggttctcgcagtactccggctacgtcaccgtcaacccggcgcgggggcgcgcgctcttctactggctcgtggaggcggtgccggcggccgggcccatcgcgccgctcgtcctctggctcaacggcggccctggatgctcgtcagtcggctacggcgcgtccgaggaggtcggcccgttccgcatcaggccggacggccagactctctacctcaaccccaattcttggaacaaggcggccaatttgctcttcctggagtcgccggccggcgtggggttctcgtactcgaactcgtcgctggatctgtacaccgcaggagatgcaaagacagcactggatgcctacgcttttcttgtgaactggttggagagattcccacagtacaagtacagggagttctatattgctggggaaagttacgcgggtcactacgttccacagttagcccagctcatatatgaaaagaacaagggcattcagaatccaacaattaatttcaaaggattcatggtgggcaatgcagtcactgatgactaccatgattaccttggtacctttgagttttggtggactcatggtctgatctctgacaagacttatcacaacttgaaggcgacatgtttgcttgaatcctcacagcacccttcacctgactgtgtcaagaacttgaatctagccagtgctgaagaaggcaatattgatccttatagtctgaatacaaagccatgcaatgacaccgcctctctcaagcttggcttgggtggacgctacccttggttgtccagagcctatgatccttgtactgaaagatatgcaagtatttactacaacaggccagaagtgcagatggcattgcatgcaaatacaactggaattcattacccttggcaaacatgcagcgatattgttggatcctactgggctgattccccaagatctatgcttccaatctaccaagaactgatagcagctggtatcaagatctgggttttcagtggggacacggatgctgtagttcctgtaactgcgacaaggtactcaatagatgctctcaagcttccaacactggtaaattggtacccttggtatgaccatgggaaggttggaggttggagccaagtttacaaaggactaacccttataaccatagcaggtgcaggacatgaagtgccactgcaccggcctcgacaagctttgatcatgttcagacacttcttgcagaacaaaccgatgccagcacaatagccagtcgaagcagaaatatagtgtaaactaccacagtcatgtttaatattttttaaattcttttttacttgatttgattgttattgttacaacatattgttcaattatctcgattgaatgtatgtacgcccagtagcaaatagggatacctgaaatttgtactgctggagctaaagagctccgctgtatatgataatgatgatcttt

SEQ ID NO: 18680 - protein, 467 aa, Zea mays subsp. mays
  peptide (1)..(467): Ceres Seq. ID no. 12369581
MPRHWISSPMAMRHQFGASVLLHLLVLAGAGAMVTADQESDRIRELPGQPPNVGFSQYSGYVTVNPARGRALFYWLVEAVPAAGPIAPLVLWLNGGPGCSSVGYGASEEVGPFRIRPDGQTLYLNPNSWNKAANLLFLESPAGVGFSYSNSSLDLYTAGDAKTALDAYAFLVNWLERFPQYKYREFYIAGESYAGHYVPQLAQLIYEKNKGIQNPTINFKGFMVGNAVTDDYHDYLGTFEFWWTHGLISDKTYHNLKATCLLESSQHPSPDCVKNLNLASAEEGNIDPYSLNTKPCNDTASLKLGLGGRYPWLSRAYDPCTERYASIYYNRPEVQMALHANTTGIHYPWQTCSDIVGSYWADSPRSMLPIYQELIAAGIKIWVFSGDTDAVVPVTATRYSIDALKLPTLVNWYPWYDHGKVGGWSQVYKGLTLITIAGAGHEVPLHRPRQALIMFRHFLQNKPMPAQ

SEQ ID NO: 18681 - protein, 458 aa, Zea mays subsp. mays
  peptide (1)..(458): Ceres Seq. ID no. 12369582
MAMRHQFGASVLLHLLVLAGAGAMVTADQESDRIRELPGQPPNVGFSQYSGYVTVNPARGRALFYWLVEAVPAAGPIAPLVLWLNGGPGCSSVGYGASEEVGPFRIRPDGQTLYLNPNSWNKAANLLFLESPAGVGFSYSNSSLDLYTAGDAKTALDAYAFLVNWLERFPQYKYREFYIAGESYAGHYVPQLAQLIYEKNKGIQNPTINFKGFMVGNAVTDDYHDYLGTFEFWWTHGLISDKTYHNLKATCLLESSQHPSPDCVKNLNLASAEEGNIDPYSLNTKPCNDTASLKLGLGGRYPWLSRAYDPCTERYASIYYNRPEVQMALHANTTGIHYPWQTCSDIVGSYWADSPRSMLPIYQELIAAGIKIWVFSGDTDAVVPVTATRYSIDALKLPTLVNWYPWYDHGKVGGWSQVYKGLTLITIAGAGHEVPLHRPRQALIMFRHFLQNKPMPAQ

SEQ ID NO: 18682 - protein, 456 aa, Zea mays subsp. mays
  peptide (1)..(456): Ceres Seq. ID no. 12369583
MRHQFGASVLLHLLVLAGAGAMVTADQESDRIRELPGQPPNVGFSQYSGYVTVNPARGRALFYWLVEAVPAAGPIAPLVLWLNGGPGCSSVGYGASEEVGPFRIRPDGQTLYLNPNSWNKAANLLFLESPAGVGFSYSNSSLDLYTAGDAKTALDAYAFLVNWLERFPQYKYREFYIAGESYAGHYVPQLAQLIYEKNKGIQNPTINFKGFMVGNAVTDDYHDYLGTFEFWWTHGLISDKTYHNLKATCLLESSQHPSPDCVKNLNLASAEEGNIDPYSLNTKPCNDTASLKLGLGGRYPWLSRAYDPCTERYASIYYNRPEVQMALHANTTGIHYPWQTCSDIVGSYWADSPRSMLPIYQELIAAGIKIWVFSGDTDAVVPVTATRYSIDALKLPTLVNWYPWYDHGKVGGWSQVYKGLTLITIAGAGHEVPLHRPRQALIMFRHFLQNKPMPAQ

SEQ ID NO: 18683 - DNA, 1542 bp, Zea mays subsp. mays
  misc_feature (1)..(1542): Ceres Seq. ID no. 12418920
  misc_feature (1)..(1542): Ortholog of  Ceres SEQ ID NO 13594345 as cited in SEQ ID NO 58043
  misc_feature (1)..(1542): Ortholog of  Ceres SEQ ID NO 12614112 as cited in SEQ ID NO 60891
  misc_feature (1)..(1542): Ortholog of  Ceres SEQ ID NO 14302832 as cited in SEQ ID NO 64926
  misc_feature (1)..(1542): Ortholog of  Ceres SEQ ID NO 13662880 as cited in SEQ ID NO 65422
  misc_feature (1)..(1542): Ortholog of  Ceres SEQ ID NO 12779098 as cited in SEQ ID NO 67698
  misc_feature (1)..(1542): Ortholog of  Ceres SEQ ID NO 13596180 as cited in SEQ ID NO 67941
  misc_feature (1)..(1542): Ortholog of  Ceres SEQ ID NO 13596089 as cited in SEQ ID NO 68373
gcacgagaccattacctagaacatcctaatcgaaaaacctaactagttgctacctagcctcgaccaggtggagcaatgggctccacggcggcggcgccctgccacatcgtggccgtgccgtacccgggccgtggtcacgtcaacgcgatgctgaacctatgccgcctcctggcagctcgagacggcgtcaccatcaccatcatcgtgaccgaggagtggctcagcctcctcggcgccccggcggcgctgccggacctcggcctgcgcgttcgctttgaggccattccaaacgtgatcccctccgagcacggccgcgccaacgacatggtcggcttcatggaggccgtgtacaccaagatggcgtcgccgttcgagcagcttctcgacaggctcgcgccgccggcgcccgcggctattgtggccgacatgttcgtgccgtggaccgtaggcgtcggcgagcggaggggcgtgcctgtgtgcatcatgtgcccgattagcgccaccatgttcgcggtgcagtacaacttccacctgctaccacccgcggcggccggcggcggcgcgtctccggatatcactggttcttgttttgttgaaaactacattcctggcacgaaatcaatcaggttcgccgatcttgcgcctacacacaccgatgcgttacttctagacaaaatccttgaagcccactcctctgtaaagaaagcacaatgtatcgtcttcaccaccttccaagagctcgagagcgacgccatcggcgctatgaggcaaaactgcccagtgtacgcagttgggccctgcgtccccttcatggcactgcaagagcacaaggccagcccagacggtgacgactacatggcgtggctggacgcacagcccgcgggctcggtgatctacgtctcgctcggcagcttcctctcggtgtccgccgcccagttcgacgagatcgccgctggcctggccgagagcaaggccaggtttctgtgggtgctccgcgacgccgacgcatgctcccgcgtgcgaggcctgatccgcgatcccgacgccggcctcatcgtgccatggacgaaccagctgagggtgctgtgccacccttcggtcggggggttcttcacccactgcggcatgaactcgacgctcgaggcggtgtacgccggcgtgcccatgctcaccctgcccatcgcgttcgaccagccgaccaatagccggctcgtcaccgaggtgtggaagaatggcattggcctcagggacatggcccgcgccgacggcgtcatcgggagaggtgagatagcctcggccgtggacaggctgatgctccctgacgcggcggagttccaggacatgaggaagcgagtgacactgtggaaggacgcggctcggactgcgtctgaagagggtggatcctcgtggaaagatgttacgtctttcatcaacttcgtttcacgttgagatctccgaatgtttacggagtcagctgtagtgaattgtgatcgattctcacggagttagtgtgatatctgaatgttagcagaatctttcggc

SEQ ID NO: 18684 - protein, 457 aa, Zea mays subsp. mays
  peptide (1)..(457): Ceres Seq. ID no. 12418921
MGSTAAAPCHIVAVPYPGRGHVNAMLNLCRLLAARDGVTITIIVTEEWLSLLGAPAALPDLGLRVRFEAIPNVIPSEHGRANDMVGFMEAVYTKMASPFEQLLDRLAPPAPAAIVADMFVPWTVGVGERRGVPVCIMCPISATMFAVQYNFHLLPPAAAGGGASPDITGSCFVENYIPGTKSIRFADLAPTHTDALLLDKILEAHSSVKKAQCIVFTTFQELESDAIGAMRQNCPVYAVGPCVPFMALQEHKASPDGDDYMAWLDAQPAGSVIYVSLGSFLSVSAAQFDEIAAGLAESKARFLWVLRDADACSRVRGLIRDPDAGLIVPWTNQLRVLCHPSVGGFFTHCGMNSTLEAVYAGVPMLTLPIAFDQPTNSRLVTEVWKNGIGLRDMARADGVIGRGEIASAVDRLMLPDAAEFQDMRKRVTLWKDAARTASEEGGSSWKDVTSFINFVSR

SEQ ID NO: 18685 - protein, 433 aa, Zea mays subsp. mays
  peptide (1)..(433): Ceres Seq. ID no. 12418922
MLNLCRLLAARDGVTITIIVTEEWLSLLGAPAALPDLGLRVRFEAIPNVIPSEHGRANDMVGFMEAVYTKMASPFEQLLDRLAPPAPAAIVADMFVPWTVGVGERRGVPVCIMCPISATMFAVQYNFHLLPPAAAGGGASPDITGSCFVENYIPGTKSIRFADLAPTHTDALLLDKILEAHSSVKKAQCIVFTTFQELESDAIGAMRQNCPVYAVGPCVPFMALQEHKASPDGDDYMAWLDAQPAGSVIYVSLGSFLSVSAAQFDEIAAGLAESKARFLWVLRDADACSRVRGLIRDPDAGLIVPWTNQLRVLCHPSVGGFFTHCGMNSTLEAVYAGVPMLTLPIAFDQPTNSRLVTEVWKNGIGLRDMARADGVIGRGEIASAVDRLMLPDAAEFQDMRKRVTLWKDAARTASEEGGSSWKDVTSFINFVSR

SEQ ID NO: 18686 - protein, 374 aa, Zea mays subsp. mays
  peptide (1)..(374): Ceres Seq. ID no. 12418923
MVGFMEAVYTKMASPFEQLLDRLAPPAPAAIVADMFVPWTVGVGERRGVPVCIMCPISATMFAVQYNFHLLPPAAAGGGASPDITGSCFVENYIPGTKSIRFADLAPTHTDALLLDKILEAHSSVKKAQCIVFTTFQELESDAIGAMRQNCPVYAVGPCVPFMALQEHKASPDGDDYMAWLDAQPAGSVIYVSLGSFLSVSAAQFDEIAAGLAESKARFLWVLRDADACSRVRGLIRDPDAGLIVPWTNQLRVLCHPSVGGFFTHCGMNSTLEAVYAGVPMLTLPIAFDQPTNSRLVTEVWKNGIGLRDMARADGVIGRGEIASAVDRLMLPDAAEFQDMRKRVTLWKDAARTASEEGGSSWKDVTSFINFVSR

SEQ ID NO: 18687 - DNA, 1606 bp, Zea mays subsp. mays
  misc_feature (1)..(1606): Ceres Seq. ID no. 12361067
  misc_feature (1)..(1606): Ortholog of  Ceres SEQ ID NO 14316017 as cited in SEQ ID NO 67028
  misc_feature (1)..(1606): Ortholog of  Ceres SEQ ID NO 12634921 as cited in SEQ ID NO 0
  misc_feature (1)..(1606): Ortholog of  Ceres SEQ ID NO 15177500 as cited in SEQ ID NO 0
gcacgagaccattacctagaacatcctaatcgaaaaaagcaagccttcatctatcgagtcgcccgtcaccacagctgatattgaggcgacgcgccggccgtccagatcaaccaaaaaagagaaaaaaaaacagtagccatgtcgcggctcctcctcctcggggccgccgtgctgctgctcgcgtcggccgccacggcgcaggactgcctgtccgcgacgttcagcggcgggcggaccttcgggcggtgcaacaacctgccgtcgctgatcgccagcctgcactggacgtaccacccggagaacggcaccgcggacgtggcgttccgcgcgccgtcggacgccagcggctgggtcgcctggggcatcaaccccgaccgcggcggcagcatgggcggcagcagcgtcttcgtggcctcgccctcgcaggacggcagcggcgcggtgtccatcctcatgacccacctggagagcacgtcgcccagcctaaccaacaacaccctcaagttcaaggtgcccgtcggccccgccgccgagtactccaacggcgcctacaccatcttcgccatggtggagcttcccggcaactccacgcagcagttcacggtgtggcaggccggcgcgaccagcaacggtgccatctcccctcacccgacggcgccggccaacttggccagcacccagaggctggacttcctctccgggtccagcaccgccgcctcaaactccaggcttcaccgccgtaacatccacggcatgctgaacgcgatcgcctggggcgtcctgatccccgtcggcgccatcatcgcgcggtacctgcgcgtgttcgagtccgcggacccggcgtggttctacctgcacatcgcgtgccagtgctccggctacatcctgggcgtggccggctggggcctggggctgaagctcggcagcgagtcggccggcgtcacctaccagccgcaccgcagcatcggcatcgccatcttctgcctggccacgctgcaggtgttcgcgctgctgctccggcccgacaagaagaacaggtacaggctgtactggaacatctaccaccactccgtcggctactccgtcatcgtcctcggcgccgtcaacatcttcaaggggctcgacatcctcaagccggccagcggctacaagaccgcctacattgtcgtcctggccacgctcggcggcgtcgcgctntgcctcgaggccatcacgtggcccatcgccatccggaagcgcaggcgtaacgccgccgacaaggcgtccaacggcaacggcaacggctggcagcagggtgcgtaggggcctgatcgctgggcttgtgcgcgtgcgtgtgtttgtgctatagttttgatgcgagagagaggtctgatatcgatgtgctgatgccgttgttcagagagacatcgttgctgatgtgtttctttcctgttactactgcctctgtagtctgtactcctacctagaagagtagctcctttgattttttttcttctgttttgttgttgaattttattagggttctatagtgccatttgtacacattttttcccttcttattgatgtacgtacgactgctttgattactgtatggtttcagtcagtc

SEQ ID NO: 18688 - protein, 387 aa, Zea mays subsp. mays
  peptide (1)..(387): Ceres Seq. ID no. 12361068
  misc_feature (353)..(353): Xaa is any aa, unknown or other
MSRLLLLGAAVLLLASAATAQDCLSATFSGGRTFGRCNNLPSLIASLHWTYHPENGTADVAFRAPSDASGWVAWGINPDRGGSMGGSSVFVASPSQDGSGAVSILMTHLESTSPSLTNNTLKFKVPVGPAAEYSNGAYTIFAMVELPGNSTQQFTVWQAGATSNGAISPHPTAPANLASTQRLDFLSGSSTAASNSRLHRRNIHGMLNAIAWGVLIPVGAIIARYLRVFESADPAWFYLHIACQCSGYILGVAGWGLGLKLGSESAGVTYQPHRSIGIAIFCLATLQVFALLLRPDKKNRYRLYWNIYHHSVGYSVIVLGAVNIFKGLDILKPASGYKTAYIVVLATLGGVAXCLEAITWPIAIRKRRRNAADKASNGNGNGWQQGA

SEQ ID NO: 18689 - protein, 304 aa, Zea mays subsp. mays
  peptide (1)..(304): Ceres Seq. ID no. 12361069
  misc_feature (270)..(270): Xaa is any aa, unknown or other
MGGSSVFVASPSQDGSGAVSILMTHLESTSPSLTNNTLKFKVPVGPAAEYSNGAYTIFAMVELPGNSTQQFTVWQAGATSNGAISPHPTAPANLASTQRLDFLSGSSTAASNSRLHRRNIHGMLNAIAWGVLIPVGAIIARYLRVFESADPAWFYLHIACQCSGYILGVAGWGLGLKLGSESAGVTYQPHRSIGIAIFCLATLQVFALLLRPDKKNRYRLYWNIYHHSVGYSVIVLGAVNIFKGLDILKPASGYKTAYIVVLATLGGVAXCLEAITWPIAIRKRRRNAADKASNGNGNGWQQGA

SEQ ID NO: 18690 - protein, 282 aa, Zea mays subsp. mays
  peptide (1)..(282): Ceres Seq. ID no. 12361070
  misc_feature (248)..(248): Xaa is any aa, unknown or other
MTHLESTSPSLTNNTLKFKVPVGPAAEYSNGAYTIFAMVELPGNSTQQFTVWQAGATSNGAISPHPTAPANLASTQRLDFLSGSSTAASNSRLHRRNIHGMLNAIAWGVLIPVGAIIARYLRVFESADPAWFYLHIACQCSGYILGVAGWGLGLKLGSESAGVTYQPHRSIGIAIFCLATLQVFALLLRPDKKNRYRLYWNIYHHSVGYSVIVLGAVNIFKGLDILKPASGYKTAYIVVLATLGGVAXCLEAITWPIAIRKRRRNAADKASNGNGNGWQQGA

SEQ ID NO: 18691 - DNA, 1676 bp, Zea mays subsp. mays
  misc_feature (1)..(1676): Ceres Seq. ID no. 12375592
  misc_feature (1)..(1676): Ortholog of  Ceres SEQ ID NO 14312817 as cited in SEQ ID NO 57207
  misc_feature (1)..(1676): Ortholog of  Ceres SEQ ID NO 14309678 as cited in SEQ ID NO 59014
gcacgagaccattacctagaacatcctaatcgaaaacacgcccacttcgccactcggacagtgctcggctcggatcggtcgcacggacacgccccgcgcgtcgcgggctctctctcacctctctcctcctcctttgcctgattggcgtgcccccatgcggatgcggtggctccgacccagctagccccaggctggggctgcgcccgcggcggcgatgaagcggccgctgcggcgctccttcgcggtgctcatcttcgtcgggctcgtcggcgcggcctccttctccaccgcgctccgtcgcgccgtggcgcccccgcccgcgcaggagcccccgccgctcgacccggcgcgcctcaacgctacgctgctccgcctggccgcagccgatccgtcggaagcgtcgctgcgccgggacgtggacggactcctcgagggccgcctcccggcctccgcggcgcgggcccgcgcgtggcgccgcgaccgcctcctccacccgctccacctccaccgccaccgcagcttcccgctcccgcgccgcggccgctacccggacgacgaccacgacatcctgctccacccgctcccgcgccacgagcagctccgcatcgaccccgccctgcgccgcgacctccgctcctggcaccgcctccgccgctacgaccctgccgtcctcgccgccctcccctccctgctctccatccccgggcgcatcccctcctgcgccgtcgtcggcaacagcggcatcctcctgcgcgcgaaccatggagccctcatcgattcccacgcagccgtgttccgcctcaacaacgcccgcgtctcaggctacgccgcgcacgttggcagcaagaccaacttctccttcatcaacagcaacgttcttcacctctgcgcgcgccggcccggctgcttctgccacccttacggccacggcgtccccatcctgctctacatctgccaggccgcccatttcgtcgacgtcgccgcctgcaacgccacctcgtcctcccgccacggctcccccatctccgtcaccgacgcccgcctcgacgtcctctgcgcgcgcatcgtcaagtactactccctccgccgattcgtcgccgagaccggccgcgcgcccgaggagtgggaccgcgcgcacgacgccgccatgttccattactcgtccgggatgcaagccatcatggtcgccgtgggagtgtgcgacagagtcagcgtgtttggcttcagcaagtcttccgacgccaagcatcattaccacagcaaccaaaaggcggagctagacctccacgactacgatgcggagtacgccttctaccacgacctctccgagcgaccgcaggtagtcccgttcctcaaggattccgggttcgccgtcccgcccgtcgtcttctaccattaggccagcttcgtagagcgcgcgccatgtgctcgacgttatgtggaacggctgttttcctcgcttatttttccggttttgattagtgggtacgacatagtaaaattttcgtgtgctgttggagttggaaggtgtatattagggtttagcctactccactggtatagaagaagggatcgtttgcccttttggtttcagcacgacagtaggcagtgcctggaattgtaacttcagactgatattttaatttattaagaaacagaatgtatatcttaccagc

SEQ ID NO: 18692 - protein, 394 aa, Zea mays subsp. mays
  peptide (1)..(394): Ceres Seq. ID no. 12375593
MKRPLRRSFAVLIFVGLVGAASFSTALRRAVAPPPAQEPPPLDPARLNATLLRLAAADPSEASLRRDVDGLLEGRLPASAARARAWRRDRLLHPLHLHRHRSFPLPRRGRYPDDDHDILLHPLPRHEQLRIDPALRRDLRSWHRLRRYDPAVLAALPSLLSIPGRIPSCAVVGNSGILLRANHGALIDSHAAVFRLNNARVSGYAAHVGSKTNFSFINSNVLHLCARRPGCFCHPYGHGVPILLYICQAAHFVDVAACNATSSSRHGSPISVTDARLDVLCARIVKYYSLRRFVAETGRAPEEWDRAHDAAMFHYSSGMQAIMVAVGVCDRVSVFGFSKSSDAKHHYHSNQKAELDLHDYDAEYAFYHDLSERPQVVPFLKDSGFAVPPVVFYH

SEQ ID NO: 18693 - DNA, 1370 bp, Zea mays subsp. mays
  misc_feature (1)..(1370): Ceres Seq. ID no. 12376881
  misc_feature (1)..(1370): Ortholog of  Ceres SEQ ID NO 15176294 as cited in SEQ ID NO 60388
gcacgagaccattacctagaacatcctaatcgaaaaattttccaagctttctccagatcaaatcagaaaggggaagggaagaacggcccagcaatgccgctctgcagcttctacgcctccacctccgttcccgtcgtcaagccccagcagtccgtcgcctcgtccaagccccccaccacggcggtggcctccgtggcgacaactgtgccgatgcgcagtgcagcgacggtgacgccagccgtggccacaacaacgagcctagcgctgtctctgcacctgccggagctgccgtcgcaggtgaaggacaagatcctgagcctggagctgatgggcgtggactatgggcgcgcgctggagcagaacccggcgctccgcgacgcggcgccggagtccatccacgcggtggtgtcgttcctccagtcccgcgggctccagttcaaggacctgggccgcgtcttcggcatgtgcccgtccgtgctgaccgccagcgtccgcgccgacctccgccccgtgttcgccttcctctccgcggacctgggcgtgccggagtcggcgcaccgggcgcgtggtgatcaagtgcccgcgcgtgctggcctgcagcgtccgcgaccagctccgccccgcgctcatctacctccgccgcctgggcttccgggacagccgcgcgctggcgctgcaggacccgatcctcctcgtctccagcgtggagcgcaccctggcgccgaagctggagtacctggccgggctcggcatgtcccgcgacgacgcggtcgccatggtgctgcgctgcccggcgctcttcaccttcagcatcgagcggaactaccggcccaagttcgagtacctggtggacgccatgggcggcggcgtcgaggacgtcaaggccttcccgcagtacttcgccttcagcctcgagaagcggatcgcgccgcgccaccgcgccgcggaggacgccggcgtcgcgctgccgcttccggacatgctcaaggccaccgacgaggagttcagggagatgctcgacaaggagcgggagctgcacgagcaggcagcgacgacggactgatcgatcggggggctagtacagcggtttgcacctgatccgactatccgaagcatccaaccgccgtcttcgtggcgatcgagtgtcctggccatgacggtagccagcacatgtagtcatttgatttgagtaattagtagcctgtacatatatgcattgacattatttgctatagtcacgattcgtagctcatgagagaatatgtctgttctttctccattattccaagtgaataagcaccgagctggaagtcgtgtctttatgtacacacgtgtaccaagtttacaggaatgaatgtaccaagttcatt

SEQ ID NO: 18694 - protein, 365 aa, Zea mays subsp. mays
  peptide (1)..(365): Ceres Seq. ID no. 12376882
ARDHYLEHPNRKIFQAFSRSNQKGEGKNGPAMPLCSFYASTSVPVVKPQQSVASSKPPTTAVASVATTVPMRSAATVTPAVATTTSLALSLHLPELPSQVKDKILSLELMGVDYGRALEQNPALRDAAPESIHAVVSFLQSRGLQFKDLGRVFGMCPSVLTASVRADLRPVFAFLSADLGVPESAHRARGDQVPARAGLQRPRPAPPRAHLPPPPGLPGQPRAGAAGPDPPRLQRGAHPGAEAGVPGRARHVPRRRGRHGAALPGALHLQHRAELPAQVRVPGGRHGRRRRGRQGLPAVLRLQPREADRAAPPRRGGRRRRAAASGHAQGHRRGVQGDARQGAGAARAGSDDGLIDRGASTAVCT

SEQ ID NO: 18695 - protein, 334 aa, Zea mays subsp. mays
  peptide (1)..(334): Ceres Seq. ID no. 12376883
MPLCSFYASTSVPVVKPQQSVASSKPPTTAVASVATTVPMRSAATVTPAVATTTSLALSLHLPELPSQVKDKILSLELMGVDYGRALEQNPALRDAAPESIHAVVSFLQSRGLQFKDLGRVFGMCPSVLTASVRADLRPVFAFLSADLGVPESAHRARGDQVPARAGLQRPRPAPPRAHLPPPPGLPGQPRAGAAGPDPPRLQRGAHPGAEAGVPGRARHVPRRRGRHGAALPGALHLQHRAELPAQVRVPGGRHGRRRRGRQGLPAVLRLQPREADRAAPPRRGGRRRRAAASGHAQGHRRGVQGDARQGAGAARAGSDDGLIDRGASTAVCT

SEQ ID NO: 18696 - protein, 295 aa, Zea mays subsp. mays
  peptide (1)..(295): Ceres Seq. ID no. 12376884
MRSAATVTPAVATTTSLALSLHLPELPSQVKDKILSLELMGVDYGRALEQNPALRDAAPESIHAVVSFLQSRGLQFKDLGRVFGMCPSVLTASVRADLRPVFAFLSADLGVPESAHRARGDQVPARAGLQRPRPAPPRAHLPPPPGLPGQPRAGAAGPDPPRLQRGAHPGAEAGVPGRARHVPRRRGRHGAALPGALHLQHRAELPAQVRVPGGRHGRRRRGRQGLPAVLRLQPREADRAAPPRRGGRRRRAAASGHAQGHRRGVQGDARQGAGAARAGSDDGLIDRGASTAVCT

SEQ ID NO: 18697 - DNA, 1375 bp, Zea mays subsp. mays
  misc_feature (1)..(1375): Ceres Seq. ID no. 12368133
  misc_feature (1)..(1375): Ortholog of  Ceres SEQ ID NO 13654553 as cited in SEQ ID NO 68417
gcacgagaccattacctagaacatcctaatcgaaaaggatctgcatgctgctccctgcggcgcttaacgtttgtgtgagaagatgaggtttctgtctagctctcttctgcctgcctgcctttctttgtatcccccttgtcagcttcgaaacttctctgctcatgagctatggccagtcctgctgccactgtagatttttttaagtgcggaggaaatctcttccccccccccctccctccctggttattgtgcatacatagctatcctgctgaacgaagcacaaataaatacaaaccaagaaacgccagtgctttctcgatcacgtactggcacgagctagcgagcagactcactcgaacacacactgaccaaccgctcctctctccttccgttccgtcattccgtgtgcagcagacgcggcgttctgcgtgtgcaagacgggcgtgcccgaccaggcgatgcaggcggcgatcgactacgcctgcgccaagggggccgactgcgcctccgcctccaagggcgcgccctgctacggcaacggcaacaaggtggccgtctgctcctacatctgcaacagctactaccagagccgcagcgccacgggcgccacctgcgacttcaacggcgtcgccacgctcaccggcaccgaccccagctccggcacctgcaagttcgcctccggccccagcgcaggcaccggcggtggcatgggcgctggcgcgggtaccggcggtggcatgggcgctggcgctggcaccggcgccgggacaggcgttggcaccggagcaggcacgggcatgggcaccgggacggggaccagcaccggcaccggcgccggcgcaggggtcgcgacccccgggagcgccctgagcccaccgttcggcggcactggcgcgtacggcccgtcaggggcaggcagcacggactacaacgacgccgtcgccccgcgcgccgccgggctgcacgtggtggctgccctcgctctcgccgtcgccgtcgccgcacctctccaccgctaggggcggtgccatggcaactgggagctggcgggcacgacactcgcagacgggatcccgcctcggcggcccgccagcgcgggctctggtcgatgtccggcgttagtgcgtgcgcgtacctgatgaagtgatgatgggttttgatcgaccagccgtcagcgtagtgcggtcacggggtttacagtgttattcgaactgacctctctgcttcctcgtgctagtagtggtggctgccatgtgtgtgtgctgctggtagagaactagggattctttttttttcttctgtcgcttccttgcttatatgtcccgtcgtgttaggctgtgtttactatgcagtgtttttggtggtggccgctttc

SEQ ID NO: 18698 - protein, 233 aa, Zea mays subsp. mays
  peptide (1)..(233): Ceres Seq. ID no. 12368134
MASPAATVDFFKCGGNLFPPPLPPWLLCIHSYPAERSTNKYKPRNASAFSITYWHELASRLTRTHTDQPLLSPSVPSFRVQQTRRSACARRACPTRRCRRRSTTPAPRGPTAPPPPRARPATATATRWPSAPTSATATTRAAAPRAPPATSTASPRSPAPTPAPAPASSPPAPAQAPAVAWALARVPAVAWALALAPAPGQALAPEQARAWAPGRGPAPAPAPAQGSRPPGAP

SEQ ID NO: 18699 - protein, 186 aa, Zea mays subsp. mays
  peptide (1)..(186): Ceres Seq. ID no. 12368135
MQAAIDYACAKGADCASASKGAPCYGNGNKVAVCSYICNSYYQSRSATGATCDFNGVATLTGTDPSSGTCKFASGPSAGTGGGMGAGAGTGGGMGAGAGTGAGTGVGTGAGTGMGTGTGTSTGTGAGAGVATPGSALSPPFGGTGAYGPSGAGSTDYNDAVAPRAAGLHVVAALALAVAVAAPLHR

SEQ ID NO: 18700 - DNA, 644 bp, Zea mays subsp. mays
  misc_feature (1)..(644): Ceres Seq. ID no. 12418062
  misc_feature (1)..(644): Ortholog of  Ceres SEQ ID NO 13623497 as cited in SEQ ID NO 0
cattggagactctttggacttggtacctattgctgccttctacggtagaggaaaacgaacaggtgtctttggatcattcctcctcgcatgctatgatgagcagaacgaagaatatcaaacaatatgcaacataggtactggattttctgagcaacagcttgaagaacgttctgcgagccttcgaagtaaagtgatagaaaaaccaaaggcatactatagatttggcgacacaatgaaccccgatgtgtggtttgagccatcagaggtctgggaggtcaaagctgccgatctgagcataagccctgtacatcgtgctgccaatggtatagtcgatccaaataagggtatctctctaagattccctcgcctattgagattacgtgacgataaaagcccagaacaagccaccacgtctgaccaagtcgctgacatgtaccgggtctcaaaagatcaaccacggntataaccaggaggatgaggacgatgactgatgttgacttaattctttgttgctggatgggatggttcactgtgtaaacactagtcttcgcagtttccagcttgttctcaaccgtaacctgttgatttaccggttcctgtttctatgatcaaatgaacaggtattgaccggagattgcattttc

SEQ ID NO: 18701 - protein, 154 aa, Zea mays subsp. mays
  peptide (1)..(154): Ceres Seq. ID no. 12418063
  misc_feature (154)..(154): Xaa is any aa, unknown or other
IGDSLDLVPIAAFYGRGKRTGVFGSFLLACYDEQNEEYQTICNIGTGFSEQQLEERSASLRSKVIEKPKAYYRFGDTMNPDVWFEPSEVWEVKAADLSISPVHRAANGIVDPNKGISLRFPRLLRLRDDKSPEQATTSDQVADMYRVSKDQPRX

SEQ ID NO: 18702 - protein, 77 aa, Zea mays subsp. mays
  peptide (1)..(77): Ceres Seq. ID no. 12418064
  misc_feature (77)..(77): Xaa is any aa, unknown or other
MNPDVWFEPSEVWEVKAADLSISPVHRAANGIVDPNKGISLRFPRLLRLRDDKSPEQATTSDQVADMYRVSKDQPRX

SEQ ID NO: 18703 - DNA, 1475 bp, Zea mays subsp. mays
  misc_feature (1)..(1475): Ceres Seq. ID no. 12375615
  misc_feature (1)..(1475): Ortholog of  Ceres SEQ ID NO 13594298 as cited in SEQ ID NO 57803
  misc_feature (1)..(1475): Ortholog of  Ceres SEQ ID NO 13503476 as cited in SEQ ID NO 61978
  misc_feature (1)..(1475): Ortholog of  Ceres SEQ ID NO 12578438 as cited in SEQ ID NO 62201
gcacgagaccattacctagaacatcctaatcgaaaaaggagcttcatccaacagcccaagtgtccctgctacccccactggatcagcaagctagctacccagtggagagccacagccgaagccgaagccgaagctagagctagcaagcaatggctgcggcggctcctcctgcgcgtcctactagcagcatcagcagctgctgctgctgcatctcgcggcgcgccgccgccgtcgtgccggcgctgctgctgctggcggcgatggccgcctcctccggcgacgcgcagccttccccggggtactacccgagctccaggttcaggccggtgccgttcaaccgggcgtacaccaacaagtggggcccgcagcaccagacgctctccggcgaccattccgccctcaccatctggctcgacaagacctgcgggagtggtttcaagtcgaagcacgcgtacaggaacggctacttctccactcgcatcaagctccccgcccggatacaccgcgggcaccaacaccgccttctatctctccaacaacgaggcgcaccctggtttctacgacgagatcgacatggagttcctgggcaccatcccgggggagccctacacgctgcagacgaacgtgtacgtgcgcggcagcggcgacgggcgcatcgtggggcgggagatgcggttccacctgtggttcgaccccacggcggcctaccacacctacgccatcctgtggaaccccgacgccatcaccttcttcgtggacgacgtgcccgtccgccgctacgagcgccgcaccgagctcaccttcccggaccgccccatgtgggtctacggctccatctgggacgcctccgactgggccaccgacgacggccgccaccgcgccgactaccgctaccagcccttcgtcgcgcgcctcgaccgcttcgtcgtcgccggctgctccgccagcgccccgcccgcgtgcaggcccgtgccggcgtcccccgcgggggccgggctcacgccgcggcagtacgcggccatgcgctgggcgcagcagggccacatggtctactactactgcaacgacttccgcagggaccactcgctcacgcccgagtgctagcgagcgtgcctgtctgctgtgttgcgtcgtcgtcgtcgtccttgttgctttgtgctttgtttcgttgttgatgaaaaggtcgctaggcgtggctgccctactaccgcccgcgcccgccgctgctctctctgcttgcggtgactgaggcgcccgcgcgagccggtggttgaggcgttggtcgttggcttatcgccagcaaactcgtgtcgtcgctcgtctacgtacgcgtacggcgtacccattgcatttcttccggttgttgctttccatttggtctcgcatgcatcacacgaggcgccccaaaggggcaagcttccatgattcatacggatacactatgtataccatatatacatattatatatatattt

SEQ ID NO: 18704 - protein, 367 aa, Zea mays subsp. mays
  peptide (1)..(367): Ceres Seq. ID no. 12375616
ARDHYLEHPNRKRSFIQQPKCPCYPHWISKLATQWRATAEAEAEARASKQWLRRLLLRVLLAASAAAAAASRGAPPPSCRRCCCWRRWPPPPATRSLPRGTTRAPGSGRCRSTGRTPTSGARSTRRSPATIPPSPSGSTRPAGVVSSRSTRTGTATSPLASSSPPGYTAGTNTAFYLSNNEAHPGFYDEIDMEFLGTIPGEPYTLQTNVYVRGSGDGRIVGREMRFHLWFDPTAAYHTYAILWNPDAITFFVDDVPVRRYERRTELTFPDRPMWVYGSIWDASDWATDDGRHRADYRYQPFVARLDRFVVAGCSASAPPACRPVPASPAGAGLTPRQYAAMRWAQQGHMVYYYCNDFRRDHSLTPEC

SEQ ID NO: 18705 - protein, 341 aa, Zea mays subsp. mays
  peptide (1)..(341): Ceres Seq. ID no. 12375617
MAAAAPPARPTSSISSCCCCISRRAAAVVPALLLLAAMAASSGDAQPSPGYYPSSRFRPVPFNRAYTNKWGPQHQTLSGDHSALTIWLDKTCGSGFKSKHAYRNGYFSTRIKLPARIHRGHQHRLLSLQQRGAPWFLRRDRHGVPGHHPGGALHAADERVRARQRRRAHRGAGDAVPPVVRPHGGLPHLRHPVEPRRHHLLRGRRARPPLRAPHRAHLPGPPHVGLRLHLGRLRLGHRRRPPPRRLPLPALRRAPRPLRRRRLLRQRPARVQARAGVPRGGRAHAAAVRGHALGAAGPHGLLLLQRLPQGPLAHARVLASVPVCCVASSSSSLLLCALFRC

SEQ ID NO: 18706 - protein, 304 aa, Zea mays subsp. mays
  peptide (1)..(304): Ceres Seq. ID no. 12375618
MAASSGDAQPSPGYYPSSRFRPVPFNRAYTNKWGPQHQTLSGDHSALTIWLDKTCGSGFKSKHAYRNGYFSTRIKLPARIHRGHQHRLLSLQQRGAPWFLRRDRHGVPGHHPGGALHAADERVRARQRRRAHRGAGDAVPPVVRPHGGLPHLRHPVEPRRHHLLRGRRARPPLRAPHRAHLPGPPHVGLRLHLGRLRLGHRRRPPPRRLPLPALRRAPRPLRRRRLLRQRPARVQARAGVPRGGRAHAAAVRGHALGAAGPHGLLLLQRLPQGPLAHARVLASVPVCCVASSSSSLLLCALFRC

SEQ ID NO: 18707 - DNA, 626 bp, Zea mays subsp. mays
  misc_feature (1)..(626): Ceres Seq. ID no. 12360531
  misc_feature (1)..(626): Ortholog of  Ceres SEQ ID NO 14307210 as cited in SEQ ID NO 54833
gaactacgctcgtgttaacatagtttacaggaatgcagaggatatgaattaccactcggtctgtttgcatgtgttggcagattcaatacggagtgcaggcttgatactagcttcttggtttctttcattggggattgagaatgctgaggttctgtgcctgggaatcgtctcagtggcagtgtttatgcttgttttgccgttatttaaagctactggtaatatcctactgcaaatcgcacctagcaatgtgccaccttcagcctttacaaagtgctcgagacagattgctgcttgtgaagatgtctccgaagtatggcaaggtcgattctgggagcttgttcctggtcaggcagttggatctctctccattagggtgaagagcggcgctgacgaccgggcagtccttgaatacacgcatggtttatatcaggatttgggcatacaggatctgacggtccaaactgatgagtttgtagggcctgttagttagacggtaggggttctatcccagcttcacgaaagtgttgttttcagtttttttttcctaccaagtagtttctttcgcaaccgtgtctatntaaacactgtttttttattaagttcatctcncnacnaaaagttttttc

SEQ ID NO: 18708 - protein, 162 aa, Zea mays subsp. mays
  peptide (1)..(162): Ceres Seq. ID no. 12360532
NYARVNIVYRNAEDMNYHSVCLHVLADSIRSAGLILASWFLSLGIENAEVLCLGIVSVAVFMLVLPLFKATGNILLQIAPSNVPPSAFTKCSRQIAACEDVSEVWQGRFWELVPGQAVGSLSIRVKSGADDRAVLEYTHGLYQDLGIQDLTVQTDEFVGPVS

SEQ ID NO: 18709 - protein, 148 aa, Zea mays subsp. mays
  peptide (1)..(148): Ceres Seq. ID no. 12360533
MNYHSVCLHVLADSIRSAGLILASWFLSLGIENAEVLCLGIVSVAVFMLVLPLFKATGNILLQIAPSNVPPSAFTKCSRQIAACEDVSEVWQGRFWELVPGQAVGSLSIRVKSGADDRAVLEYTHGLYQDLGIQDLTVQTDEFVGPVS

SEQ ID NO: 18710 - protein, 101 aa, Zea mays subsp. mays
  peptide (1)..(101): Ceres Seq. ID no. 12360534
MLVLPLFKATGNILLQIAPSNVPPSAFTKCSRQIAACEDVSEVWQGRFWELVPGQAVGSLSIRVKSGADDRAVLEYTHGLYQDLGIQDLTVQTDEFVGPVS

SEQ ID NO: 18711 - DNA, 1597 bp, Zea mays subsp. mays
  misc_feature (1)..(1597): Ceres Seq. ID no. 12375425
  misc_feature (1)..(1597): Ortholog of  Ceres SEQ ID NO 14309148 as cited in SEQ ID NO 0
gcacgagaccattacctagaacatcctaatcgaaaaaagtcaaaccaggcccggagccaccagcaaccaaccgagcgcatggaggccgcggcggcgaccgcgctcccgttcgcggcggccgtccccactgcctggagggtgcgcgcgagcccgcggacgcggcggcgctccgtggcggcgaagctggagcgcgggctcggcaagggggttcccaccaccaactacgtggtgccgctcgacaaggccaccgggatgacgcgcccgctcgtcgagatcctgcgggacctcaacaagcgcgtccccgacaagatcatcgaccccgacactaacaccgtcaactggtaccatgccaacagaatgcttagtttttacgcaccaggttggtgtggagaagttcgtgatgttatctattccgagaatggaactgtaaccgtggtatatcgagtgatacttaaaggaactgatggagaggcatacagagatgccacgggcacagcacagttacatgaggggcgcagggaagatgctgttgcagccgcagaggaagctgcattctgcaaagcctgcgcacggttcggttttggcctgtacctgtaccaccaggatgattctcattacgacgaccacttccattgaggctcagtctgcaaaagagttgatcataagctacaacatgcgttggatatgcccctggaaaaacttcgcatccagaatcaatttttgctctttgtgtagtatcatactcataacacagagaagtgaacctatgtagatactattcgaaaccttctttttattaatattagaattcgtgtatgggactatattcttggtgatctgcaatccccaagtagagaaattgtgcacagtcatgatttcaatcgtcacctgactcccttcaaagctgagtgggatccaaaggattacaccgaaacagttgcagtgattggccgttacataagtgagaactacaatggtgttgctctgcatccaattgattttatagatactagttctgggaagcttctggctgaggtgatggaccctgacataataacaatcagcccagtgaacaagctacatccgcaagatgacatcctagctacaggaagctcaaggtctattttcatatggaagccaaaaattgaagatgaacttactgaagaaagagccaagcatgacaatagtagtgatgacgactcaggtggtgattctggcggaaagaacaagaaagcaaagaagactcgcttcactcatgcagtaaagggaaagggcaaatccaaagtctgatgcttggtgtacatagtcggcagcattttgacaagaaagcgtccattaaccagctcctgatgcatctccttttgtaccatcttgccaactccctcaccccccccagctaaggtgctgaagacccgtatgaaacgcatgctgatagaccccatagttgtctcctgcatcaatgctcctaaggagttagccagttaggtttcggactcttttgaatcctgacatgcttatgatcacttgtcatttgtcaacgaggccttttaacggtttaatcctgtatcaacatataaatctcctgtacagttgcctg

SEQ ID NO: 18712 - protein, 211 aa, Zea mays subsp. mays
  peptide (1)..(211): Ceres Seq. ID no. 12375426
ARDHYLEHPNRKKSNQARSHQQPTERMEAAAATALPFAAAVPTAWRVRASPRTRRRSVAAKLERGLGKGVPTTNYVVPLDKATGMTRPLVEILRDLNKRVPDKIIDPDTNTVNWYHANRMLSFYAPGWCGEVRDVIYSENGTVTVVYRVILKGTDGEAYRDATGTAQLHEGRREDAVAAAEEAAFCKACARFGFGLYLYHQDDSHYDDHFH

SEQ ID NO: 18713 - protein, 185 aa, Zea mays subsp. mays
  peptide (1)..(185): Ceres Seq. ID no. 12375427
MEAAAATALPFAAAVPTAWRVRASPRTRRRSVAAKLERGLGKGVPTTNYVVPLDKATGMTRPLVEILRDLNKRVPDKIIDPDTNTVNWYHANRMLSFYAPGWCGEVRDVIYSENGTVTVVYRVILKGTDGEAYRDATGTAQLHEGRREDAVAAAEEAAFCKACARFGFGLYLYHQDDSHYDDHFH

SEQ ID NO: 18714 - protein, 127 aa, Zea mays subsp. mays
  peptide (1)..(127): Ceres Seq. ID no. 12375428
MTRPLVEILRDLNKRVPDKIIDPDTNTVNWYHANRMLSFYAPGWCGEVRDVIYSENGTVTVVYRVILKGTDGEAYRDATGTAQLHEGRREDAVAAAEEAAFCKACARFGFGLYLYHQDDSHYDDHFH

SEQ ID NO: 18715 - DNA, 1128 bp, Zea mays subsp. mays
  misc_feature (1)..(1128): Ceres Seq. ID no. 12588914
  misc_feature (1)..(1128): Ortholog of  Ceres SEQ ID NO 13638567 as cited in SEQ ID NO 51303
  misc_feature (1)..(1128): Ortholog of  Ceres SEQ ID NO 12610031 as cited in SEQ ID NO 55811
  misc_feature (1)..(1128): Ortholog of  Ceres SEQ ID NO 12610896 as cited in SEQ ID NO 55861
  misc_feature (1)..(1128): Ortholog of  Ceres SEQ ID NO 12635952 as cited in SEQ ID NO 0
ctctccaagactccaatcccccaaccaccagaaccagcgccagctctaacgtcacctctgatttctctctcctctctattgctagctgctttattataagtagcagctgcagcaggcaggagctgcacacacccatccaattccagctgctgatcttgatcctgcaccccgagccgtacacaagagctagtcggtagaacttgcaggagcggagcagaactaagtgcagagaacaggacatatggctacgccggcggtgaaggtttacgggtgggctatctcgccgttcgtatcgcgggctctgctggccctggaggaggccggcgtcgactacgagctcgtccccatgagccgccaggacggcgaccaccgccgcccggagcacctcgccaggaaccctttcgggaaggtgccggtgctcgaggatggcgacctcacgctcttcgaatcacgtgcgatcgcgaggcatgttctccggaagcacaagccggagctgctgggcggcggcaggctggagcagacggcgatggtggacgtgtggctggaggtggaggcccaccagctgagcccgccggcgatcgccatcgtggtggagtgcgtgttcgcgccgttcctgggccgcgagcgcaaccaggcggtggtggacgagaacgtggagaagctcaagaaggtgctggaggtgtacgaggcgcggctggccacgtgcacgtacctcgccggcgacttcctcagcctcgccgacctcagccccttcaccatcatgcactgcctcatggccaccgagtacgccgctctcgtccatgcgctcccgcacgtcagcgcctggtggcagggcctcgccgcgcgcccggcggccaacaaggtggcgcagttcatgccggtcggcgccggagcgcccaaggaacaggagtgacgatgaagcgatcgaagcgacttgtgttgttgtgcttgattagttaattggaaaccttctcactcatctagtccatcatggtgcctgcttttctttatactatttgtcttaattttgctgctttctccacggaataatagtagagatttggaaatgtaatgtattttatccaaatatattggattttcaagcaatatagtatggttttcgctgcc

SEQ ID NO: 18716 - protein, 223 aa, Zea mays subsp. mays
  peptide (1)..(223): Ceres Seq. ID no. 12588915
MATPAVKVYGWAISPFVSRALLALEEAGVDYELVPMSRQDGDHRRPEHLARNPFGKVPVLEDGDLTLFESRAIARHVLRKHKPELLGGGRLEQTAMVDVWLEVEAHQLSPPAIAIVVECVFAPFLGRERNQAVVDENVEKLKKVLEVYEARLATCTYLAGDFLSLADLSPFTIMHCLMATEYAALVHALPHVSAWWQGLAARPAANKVAQFMPVGAGAPKEQE

SEQ ID NO: 18717 - protein, 188 aa, Zea mays subsp. mays
  peptide (1)..(188): Ceres Seq. ID no. 12588916
MSRQDGDHRRPEHLARNPFGKVPVLEDGDLTLFESRAIARHVLRKHKPELLGGGRLEQTAMVDVWLEVEAHQLSPPAIAIVVECVFAPFLGRERNQAVVDENVEKLKKVLEVYEARLATCTYLAGDFLSLADLSPFTIMHCLMATEYAALVHALPHVSAWWQGLAARPAANKVAQFMPVGAGAPKEQE

SEQ ID NO: 18718 - protein, 128 aa, Zea mays subsp. mays
  peptide (1)..(128): Ceres Seq. ID no. 12588917
MVDVWLEVEAHQLSPPAIAIVVECVFAPFLGRERNQAVVDENVEKLKKVLEVYEARLATCTYLAGDFLSLADLSPFTIMHCLMATEYAALVHALPHVSAWWQGLAARPAANKVAQFMPVGAGAPKEQE

SEQ ID NO: 18719 - DNA, 1229 bp, Zea mays subsp. mays
  misc_feature (1)..(1229): Ceres Seq. ID no. 12368710
  misc_feature (1)..(1229): Ortholog of  Ceres SEQ ID NO 15171402 as cited in SEQ ID NO 51174
  misc_feature (1)..(1229): Ortholog of  Ceres SEQ ID NO 14310498 as cited in SEQ ID NO 55066
  misc_feature (1)..(1229): Ortholog of  Ceres SEQ ID NO 15176759 as cited in SEQ ID NO 59678
  misc_feature (1)..(1229): Ortholog of  Ceres SEQ ID NO 15172875 as cited in SEQ ID NO 60423
  misc_feature (1)..(1229): Ortholog of  Ceres SEQ ID NO 13659971 as cited in SEQ ID NO 67565
  misc_feature (1)..(1229): Ortholog of  Ceres SEQ ID NO 13500385 as cited in SEQ ID NO 67583
gcacgagaccattacctagaacatcctaatcaaaaaatcaagctgcccattccctcgtgacagcagctgcctgcctgctccgaggcgccacccagctcttcctcgccccagcagccgcttcccgagatccttttcactttcaccaccagggtacatagaccgcatctgcggtgctctgcgctcctcggactcgatttgttggttcatccatccagctgccgccggacgtcgatcagctacctatcttgaaaccacaggaccgagcgtggaaactcccggaccggacattccattttccattccgaagggggggtgagaaggcggggaatgagtacaaccaaggtgaagagacgtgtgggcaagtatgagctcggccggaccataggcgagggcaccttcgcgaaggtcaggttcgcgagggacacggtcaccggcgaggccgtggccattaagatcctggacaaggagaaggtcctcaggcacaagatggttgagcagatcaagcgggagatctcgacgatgaagctgatcaagcaccctaacgtcgtccgcatatacgaggtgatgggaagtaaaacaaagatctacattgtgttagaattcgctaccggtggcgagctctttgatacaattgttaaccatggtcgaatgagggaagacgaggcaaggaggtacttccaacagttaatcaatgcagttgattattgtcatagcaggggtgtgtaccaccgggatttaaaacctgaaaatttgctgcttgattcatatggtaacctgaaggtctctgactttgggctcagcgcgctatctcagcaaatcaaggatgatggactgctgcacacaacttgtgggactccaaactatgttgcaccagaggtccttgaagatcaaggctacgatggagcaatggctgatctgtggtcatgtggagttatcctgtttgttctgctagcagggtatttgccgtttgaggattctaatctcatgactttgtataagaaaatatcaaatgcagaatttacatttccaccatggacatcttttcctgccaagaggttgttaacaagaatccttgatccaaatccaatgacgagaataacaatcccagaaatattagaggatgagtggttcaaaaagggctacaagcgcccagaatttgatgaacaatatgacaccacattggatgatgtggatgccgtcttcaatgattcagaagagcaccatgtggc

SEQ ID NO: 18720 - protein, 300 aa, Zea mays subsp. mays
  peptide (1)..(300): Ceres Seq. ID no. 12368711
MSTTKVKRRVGKYELGRTIGEGTFAKVRFARDTVTGEAVAIKILDKEKVLRHKMVEQIKREISTMKLIKHPNVVRIYEVMGSKTKIYIVLEFATGGELFDTIVNHGRMREDEARRYFQQLINAVDYCHSRGVYHRDLKPENLLLDSYGNLKVSDFGLSALSQQIKDDGLLHTTCGTPNYVAPEVLEDQGYDGAMADLWSCGVILFVLLAGYLPFEDSNLMTLYKKISNAEFTFPPWTSFPAKRLLTRILDPNPMTRITIPEILEDEWFKKGYKRPEFDEQYDTTLDDVDAVFNDSEEHHV

SEQ ID NO: 18721 - protein, 247 aa, Zea mays subsp. mays
  peptide (1)..(247): Ceres Seq. ID no. 12368712
MVEQIKREISTMKLIKHPNVVRIYEVMGSKTKIYIVLEFATGGELFDTIVNHGRMREDEARRYFQQLINAVDYCHSRGVYHRDLKPENLLLDSYGNLKVSDFGLSALSQQIKDDGLLHTTCGTPNYVAPEVLEDQGYDGAMADLWSCGVILFVLLAGYLPFEDSNLMTLYKKISNAEFTFPPWTSFPAKRLLTRILDPNPMTRITIPEILEDEWFKKGYKRPEFDEQYDTTLDDVDAVFNDSEEHHV

SEQ ID NO: 18722 - protein, 236 aa, Zea mays subsp. mays
  peptide (1)..(236): Ceres Seq. ID no. 12368713
MKLIKHPNVVRIYEVMGSKTKIYIVLEFATGGELFDTIVNHGRMREDEARRYFQQLINAVDYCHSRGVYHRDLKPENLLLDSYGNLKVSDFGLSALSQQIKDDGLLHTTCGTPNYVAPEVLEDQGYDGAMADLWSCGVILFVLLAGYLPFEDSNLMTLYKKISNAEFTFPPWTSFPAKRLLTRILDPNPMTRITIPEILEDEWFKKGYKRPEFDEQYDTTLDDVDAVFNDSEEHHV

SEQ ID NO: 18723 - DNA, 1457 bp, Zea mays subsp. mays
  misc_feature (1)..(1457): Ceres Seq. ID no. 12360057
  misc_feature (1)..(1457): Ortholog of  Ceres SEQ ID NO 13597865 as cited in SEQ ID NO 64954
atttattaaactttcgcaagcgcaggtatctccccacagggcagcgcgtgcggaaaccctagtcgccgccgatgtcggaccctttctacccgtactaccgcggagccttcccgggcggcgacggtgcgcagccgccgccacgttactcggattttgaggtcgacctcatcgcggcccgttacgccggcaccctattgccttatccatcctctgccgacgtcggcgccttcgactcgtatgtcggcgcgagacgatccgcggaaggccccgaatgttgaagattcttatcctgagcgaccaggggaaccagattgtccttatttattgaataatagatgtaagtttaaatctaaatgcaagttcaaccatccgaaggatatggtgaatgcattaggaacaggaacaaacaatgaatctctaattgctgatagcgctgtcttaccagtgaggccttctgaacccatttgtgtgttctatgcaaaaacaggcaaatgcaaatttggtgccatttgcaagttcaatcatccaaaagatattaagacatcacctttgattgcaaaggaaaccatatatacagcaacaactgatgcagcagatgccccgaccgaggcgtgtaacgcaaaggggcttcctataagacaaggtgaagtggattgctcgttttatatgaagacagctgcaaatatggttctatttgtcgcttcaaccatcctgatcggccagggccagctgcggatatagcttttatggttccactggttcaagctactcttccttcatcagcacccattgtccctgcagtggttgaacctttttcaatgatctatcctcaaaggccaggagaaactgtttgtgatttttacatgaagacaggatcttgcaagtattctcagaaatgcaagtttcaccaccccatcagtcgttttgccccgcattccaaagaaaacggggatcctcaacagcctgcgacacttgctagcctgccaaggagagaggacgctgaggcttgtgccttctacatgaggtctggcatgtgcaggttcggtgcgcactgcaagttcgaccaccctcctcgcgaggaggctatttccgagctgcaggcagccggaaaggaaggaatagaagggccgagcctcgtccagcgcgaccatgatgtctaatactgtatcctgcttcagtatgtaataccatgtgaatcgcactgttagttaatgcttggtgctgtcagtcttgttgggagtctgactcgtaaagctcattatcatcggaagtgtttgtcggaggagtgctggcnctaactatttatcttcagttggttgtcgtgttgccaacttgcgatgtcaaggtgcatatttcagttttttagagtaaaaatgcnctttacatcctgccgccaaacttaactatgggcctgtttatggcnntgnttggtttagcttttttttaccagcttttcc

SEQ ID NO: 18724 - protein, 167 aa, Zea mays subsp. mays
  peptide (1)..(167): Ceres Seq. ID no. 12360058
MSARDDPRKAPNVEDSYPERPGEPDCPYLLNNRCKFKSKCKFNHPKDMVNALGTGTNNESLIADSAVLPVRPSEPICVFYAKTGKCKFGAICKFNHPKDIKTSPLIAKETIYTATTDAADAPTEACNAKGLPIRQGEVDCSFYMKTAANMVLFVASTILIGQGQLRI

SEQ ID NO: 18725 - protein, 137 aa, Zea mays subsp. mays
  peptide (1)..(137): Ceres Seq. ID no. 12360059
MVPLVQATLPSSAPIVPAVVEPFSMIYPQRPGETVCDFYMKTGSCKYSQKCKFHHPISRFAPHSKENGDPQQPATLASLPRREDAEACAFYMRSGMCRFGAHCKFDHPPREEAISELQAAGKEGIEGPSLVQRDHDV

SEQ ID NO: 18726 - protein, 120 aa, Zea mays subsp. mays
  peptide (1)..(120): Ceres Seq. ID no. 12360060
MVNALGTGTNNESLIADSAVLPVRPSEPICVFYAKTGKCKFGAICKFNHPKDIKTSPLIAKETIYTATTDAADAPTEACNAKGLPIRQGEVDCSFYMKTAANMVLFVASTILIGQGQLRI

SEQ ID NO: 18727 - DNA, 1404 bp, Zea mays subsp. mays
  misc_feature (1)..(1404): Ceres Seq. ID no. 12418197
  misc_feature (1)..(1404): Ortholog of  Ceres SEQ ID NO 14307296 as cited in SEQ ID NO 53966
  misc_feature (1)..(1404): Ortholog of  Ceres SEQ ID NO 15175368 as cited in SEQ ID NO 60071
  misc_feature (1)..(1404): Ortholog of  Ceres SEQ ID NO 15225423 as cited in SEQ ID NO 64689
gcacgagaccattacctagaacatcctaatcgaaaaagagcacactagcttagctacacacaggccacaggggcacaagaaacacctgccgatcgacggcgatggacttcgacgaccacgacgacggcgacgaggaggagatggcgccgatgccggtgagctccagctacgacgccccgcctctggcagccggcgggtttggtgcaccggcgccgcccaagccgcccggcgagcgcgccaaggccccgggcgggcggtaccgcgagtgcctcaagaaccacgcggtcggcatcgggggccacgccgtggacgggtgcggcgagttcatgccggccggcgaggagggcacgctcgacgcgctccgctgcgccgcgtgcggctgccaccgcaacttccaccgcaaggagtccccggagggctcccccgccgcgctggtcgcctacggaggcggcgccgccacgccgcaccaccaccacttctccccgtactaccgcaccccgggccgggtcgtacttccaccaccatcaccagcagcagcagccgatccacatggccgccgcgggccaccacacgccgcggccgctggcgctgccgtccacgtcccacagctggcgcgacgacggcgacgactacctctccggggggatggcggccgccgggccggtgtcggcgctgggcccgctgggcctgggcggcggcgccgggccctctggctccggcgggtccggcaagaagcggttccgcaccaagttcacccaggagcagaaggacaggatgctggcgttcgcggagcgcgtggggtggcgcatccagaagcacgacgaggccgccgtgcagcagttctgcgacgaggtctgcgtcaagcgccacgtgctcaaggtgtggatgcacaacaacaagcacaccctcggcaagaagccgtaggcgtagctaagcagcaggcagcgtcacaccatgacacccccaccccaacgcgtgtactgtacacacgcaagagccacgcccacgcgcgcatgcatcacacacacacacacagcggttgatcgcagtcgcagatcgatcgacggtggccgtggccagcctctcctccgggtacgggtaggtacacctgcatcctctttgttagcattcggctccggcgccttcgtgccgtggcggccggagtaggttagttgcagtaagtaactcgtagcgaggtgctcgatcgatctttcttgctcggctttattaggccgttcttttttacttctcatttaaccgtacttgctggtgttgtttattaattaattcctgcggcatgggccatttgccggtttgcttggttgttcttggcgttaataattcttcaatggcaaatgtacttggtgttgcgatgccaacaagtgtatctggggattggggctg

SEQ ID NO: 18728 - protein, 313 aa, Zea mays subsp. mays
  peptide (1)..(313): Ceres Seq. ID no. 12418198
MDFDDHDDGDEEEMAPMPVSSSYDAPPLAAGGFGAPAPPKPPGERAKAPGGRYRECLKNHAVGIGGHAVDGCGEFMPAGEEGTLDALRCAACGCHRNFHRKESPEGSPAALVAYGGGAATPHHHHFSPYYRTPGRVVLPPPSPAAAADPHGRRGPPHAAAAGAAVHVPQLARRRRRLPLRGDGGRRAGVGAGPAGPGRRRRALWLRRVRQEAVPHQVHPGAEGQDAGVRGARGVAHPEARRGRRAAVLRRGLRQAPRAQGVDAQQQAHPRQEAVGVAKQQAASHHDTPTPTRVLYTRKSHAHARMHHTHTHSG

SEQ ID NO: 18729 - protein, 300 aa, Zea mays subsp. mays
  peptide (1)..(300): Ceres Seq. ID no. 12418199
MAPMPVSSSYDAPPLAAGGFGAPAPPKPPGERAKAPGGRYRECLKNHAVGIGGHAVDGCGEFMPAGEEGTLDALRCAACGCHRNFHRKESPEGSPAALVAYGGGAATPHHHHFSPYYRTPGRVVLPPPSPAAAADPHGRRGPPHAAAAGAAVHVPQLARRRRRLPLRGDGGRRAGVGAGPAGPGRRRRALWLRRVRQEAVPHQVHPGAEGQDAGVRGARGVAHPEARRGRRAAVLRRGLRQAPRAQGVDAQQQAHPRQEAVGVAKQQAASHHDTPTPTRVLYTRKSHAHARMHHTHTHSG

SEQ ID NO: 18730 - protein, 297 aa, Zea mays subsp. mays
  peptide (1)..(297): Ceres Seq. ID no. 12418200
MPVSSSYDAPPLAAGGFGAPAPPKPPGERAKAPGGRYRECLKNHAVGIGGHAVDGCGEFMPAGEEGTLDALRCAACGCHRNFHRKESPEGSPAALVAYGGGAATPHHHHFSPYYRTPGRVVLPPPSPAAAADPHGRRGPPHAAAAGAAVHVPQLARRRRRLPLRGDGGRRAGVGAGPAGPGRRRRALWLRRVRQEAVPHQVHPGAEGQDAGVRGARGVAHPEARRGRRAAVLRRGLRQAPRAQGVDAQQQAHPRQEAVGVAKQQAASHHDTPTPTRVLYTRKSHAHARMHHTHTHSG

SEQ ID NO: 18731 - DNA, 1621 bp, Zea mays subsp. mays
  misc_feature (1)..(1621): Ceres Seq. ID no. 12418615
  misc_feature (1)..(1621): Ortholog of  Ceres SEQ ID NO 15176959 as cited in SEQ ID NO 52610
  misc_feature (1)..(1621): Ortholog of  Ceres SEQ ID NO 15176571 as cited in SEQ ID NO 54430
gcacgagaccattacctagaacatcctaatcgaaaaaaccatttgtcggcgatcgccgtgctattgcttgggccttggactgagtaggtttggaggtagcgatacgagacactcgcccccgattcccctcccgttgccgaagcctgtgttgcagggatcgttcgcggaagcggtttttgatcggagagagagaaagagagagcgagggagggaggtggggatggacgcggcggcagcggcggcggcgcagatggagaggcactcgtcggcggcggcgcagatggagaggcactcgtcggcggcggccttcgtggagggcggcgttcaggacggctgcgatgacacctgcagcatctgcctcgagaccttctccgacagtgacccctccgcggtgaccagctgcaagcacgagttccacctccagtgcatcctcgagtggtgccagaggagctcccagtgccccatgtgttggcaggcaatcagcatgaaggaccctacgagccaagagctccttgaggccgtcgaggaaaagagcggaacgacgtgcaggaaaaaccacgcgcgcacaacccaccgtttttccgtcacccgctgctcggagatttcgaggtaccggtggatgcagacgacgccgagatcgaggagcggatcatgcagcacctggccgccgccgcagccattcgccggtcgcaccgccacgccagaagagaaggccgccgcagcagcagggcggcggcagctcatggccatggccacccacaaccacaagtcctgttctttccgtctgctggcgaggccactcctggtggttctggttccccgtctccgcatccgccgcggcaagaacatgctgcttcttctgtggtttctcctccgccattgcctgccgtggcctccgcagaaggaacggatgttgacagtactgcctcggctgatggcgctgtcgggccagatgacagtgtttccaggaggcagtcttcgcctgtcaaccacgatgaagctggaccatctgctgacgcgcagtcattctcagacacgatcaaatctaggctgcagtcaggtctctacaaagtacaaggactcccataacgaagagcacgcgcgggtggaaggagaggtggttcgcgcagagcagcgccatgtcgaatcttggctcggagatgaggagggaggtcggtgctgggatcgccgccgtttcccgcatgatcgagaagcagctggagacacgggatgggagtgggacagcaccgtcgtctgctaccgcttcgtctccagctcacgcccaccctggtccggatgcaagtagtagtcagggagctgctgttcccgctacaccacctgcagccgctctgaacaacgctacgcctgcagcagcgtgcgtgctctgaatgacgcctcgtcgtcttcgacagcttgaacgcgcgccaggatcatgttcagtgagtttacactaggtgtggttttcaagtgctttagatatgatgcttgcaatacaatgtgtgtcgcgtgtatagtcagtttgccaattagcctcattgttagccagtgaaacagatagtggatgccaagctactgttcgatcagtgaatgtttcagaataaagttggatacttggatgcgc

SEQ ID NO: 18732 - protein, 361 aa, Zea mays subsp. mays
  peptide (1)..(361): Ceres Seq. ID no. 12418616
MDAAAAAAAQMERHSSAAAQMERHSSAAAFVEGGVQDGCDDTCSICLETFSDSDPSAVTSCKHEFHLQCILEWCQRSSQCPMCWQAISMKDPTSQELLEAVEEKSGTTCRKNHARTTHRFSVTRCSEISRYRWMQTTPRSRSGSCSTWPPPQPFAGRTATPEEKAAAAAGRRQLMAMATHNHKSCSFRLLARPLLVVLVPRLRIRRGKNMLLLLWFLLRHCLPWPPQKERMLTVLPRLMALSGQMTVFPGGSLRLSTTMKLDHLLTRSHSQTRSNLGCSQVSTKYKDSHNEEHARVEGEVVRAEQRHVESWLGDEEGGRCWDRRRFPHDREAAGDTGWEWDSTVVCYRFVSSSRPPWSGCK

SEQ ID NO: 18733 - protein, 351 aa, Zea mays subsp. mays
  peptide (1)..(351): Ceres Seq. ID no. 12418617
MERHSSAAAQMERHSSAAAFVEGGVQDGCDDTCSICLETFSDSDPSAVTSCKHEFHLQCILEWCQRSSQCPMCWQAISMKDPTSQELLEAVEEKSGTTCRKNHARTTHRFSVTRCSEISRYRWMQTTPRSRSGSCSTWPPPQPFAGRTATPEEKAAAAAGRRQLMAMATHNHKSCSFRLLARPLLVVLVPRLRIRRGKNMLLLLWFLLRHCLPWPPQKERMLTVLPRLMALSGQMTVFPGGSLRLSTTMKLDHLLTRSHSQTRSNLGCSQVSTKYKDSHNEEHARVEGEVVRAEQRHVESWLGDEEGGRCWDRRRFPHDREAAGDTGWEWDSTVVCYRFVSSSRPPWSGCK

SEQ ID NO: 18734 - protein, 341 aa, Zea mays subsp. mays
  peptide (1)..(341): Ceres Seq. ID no. 12418618
MERHSSAAAFVEGGVQDGCDDTCSICLETFSDSDPSAVTSCKHEFHLQCILEWCQRSSQCPMCWQAISMKDPTSQELLEAVEEKSGTTCRKNHARTTHRFSVTRCSEISRYRWMQTTPRSRSGSCSTWPPPQPFAGRTATPEEKAAAAAGRRQLMAMATHNHKSCSFRLLARPLLVVLVPRLRIRRGKNMLLLLWFLLRHCLPWPPQKERMLTVLPRLMALSGQMTVFPGGSLRLSTTMKLDHLLTRSHSQTRSNLGCSQVSTKYKDSHNEEHARVEGEVVRAEQRHVESWLGDEEGGRCWDRRRFPHDREAAGDTGWEWDSTVVCYRFVSSSRPPWSGCK

SEQ ID NO: 18735 - DNA, 1288 bp, Zea mays subsp. mays
  misc_feature (1)..(1288): Ceres Seq. ID no. 12418262
  misc_feature (1)..(1288): Ortholog of  Ceres SEQ ID NO 15171366 as cited in SEQ ID NO 51578
  misc_feature (1)..(1288): Ortholog of  Ceres SEQ ID NO 14308536 as cited in SEQ ID NO 55469
  misc_feature (1)..(1288): Ortholog of  Ceres SEQ ID NO 15175723 as cited in SEQ ID NO 57875
  misc_feature (1)..(1288): Ortholog of  Ceres SEQ ID NO 14314909 as cited in SEQ ID NO 58002
  misc_feature (1)..(1288): Ortholog of  Ceres SEQ ID NO 15179772 as cited in SEQ ID NO 64248
gcacgagaccattacctagaacatcctaatcgaaaaacaatcccacaacccaagaagccacaagaaagcagcagcagcaccgcacggacctgacctccaactacaagcgacgatccaggctccagagccccacgcaaggccggaaggagacaggcagcagcccggcagagcagctaagccatggcggtggacctcatgtcctgcggcggcggggcgtacgagcaactggcgttccaggaggcagccgcggcggggctccgcagcctggagttgctcgcttcctcgctctccccgtgcggcgcggggcgggcggagtcgccgccgctcgggcagatcgccgaccaggcggtgtcccggttccggcgcgtcatcaacctgctggaccgcacggggcacgcccgcttccgccgcgcgcccgccgtcgccgcggtggagcccatagagacggagacgccagcgtcacagcaggcggcggcggagccgcctcatcaggctcagaacaaagccctgacgctggacttcgccaagtctgtcccgccggcagcgaacaagaaggccccgcgggcgccggccgtgtccgcgacttcgacctcgttcctgtcgtccgtgaccgcgggcggcgaagggagcgtgtccaaggggtgcagcctcgccgccgtgtcctcgggcaagccgcctctcccgaagcgcacgtcgccgtgccccgccgctgctccgccgggggcgcaccacgccgagtccggcgctggaggttgccactgctcgaagaagaagcgcagccggcagggcctgtcccggcgcacggtgcgcctacccgcggccgcggcaacgccggggtcgcagccgcccggccacgtgccggcgtcgtcggacgtaccccacgacgagtactcgtggcgcaagtacgggcagaagcccatcaaggggtccccttacccgcgcggctactaccggtgcagcagcgccaagggttgccccgcgcggaagcacgtggagcgcgccgccgacgacccggccgtgctcgtcgtcacctacgagggcgaccaccgccacgacggcgacggcgacggcgacggcggcgttggcgctggcgctgcccgctcccgcgcggcgtgaagatcgtttgcttcccgccgtagcagtcagtgtagcagcggtagtcaagtcaatcgatactagtagtagacctcttgtttcatttgttcttcggattagtggtagatcgagctttgctcctgtaaaaggaattaaagagcatttaaacttaatctcgccatgaactttctcc

SEQ ID NO: 18736 - protein, 311 aa, Zea mays subsp. mays
  peptide (1)..(311): Ceres Seq. ID no. 12418263
MAVDLMSCGGGAYEQLAFQEAAAAGLRSLELLASSLSPCGAGRAESPPLGQIADQAVSRFRRVINLLDRTGHARFRRAPAVAAVEPIETETPASQQAAAEPPHQAQNKALTLDFAKSVPPAANKKAPRAPAVSATSTSFLSSVTAGGEGSVSKGCSLAAVSSGKPPLPKRTSPCPAAAPPGAHHAESGAGGCHCSKKKRSRQGLSRRTVRLPAAAATPGSQPPGHVPASSDVPHDEYSWRKYGQKPIKGSPYPRGYYRCSSAKGCPARKHVERAADDPAVLVVTYEGDHRHDGDGDGDGGVGAGAARSRAA

SEQ ID NO: 18737 - protein, 306 aa, Zea mays subsp. mays
  peptide (1)..(306): Ceres Seq. ID no. 12418264
MSCGGGAYEQLAFQEAAAAGLRSLELLASSLSPCGAGRAESPPLGQIADQAVSRFRRVINLLDRTGHARFRRAPAVAAVEPIETETPASQQAAAEPPHQAQNKALTLDFAKSVPPAANKKAPRAPAVSATSTSFLSSVTAGGEGSVSKGCSLAAVSSGKPPLPKRTSPCPAAAPPGAHHAESGAGGCHCSKKKRSRQGLSRRTVRLPAAAATPGSQPPGHVPASSDVPHDEYSWRKYGQKPIKGSPYPRGYYRCSSAKGCPARKHVERAADDPAVLVVTYEGDHRHDGDGDGDGGVGAGAARSRAA

SEQ ID NO: 18738 - DNA, 1211 bp, Zea mays subsp. mays
  misc_feature (1)..(1211): Ceres Seq. ID no. 12381600
  misc_feature (1)..(1211): Ortholog of  Ceres SEQ ID NO 15170627 as cited in SEQ ID NO 52703
  misc_feature (1)..(1211): Ortholog of  Ceres SEQ ID NO 13655124 as cited in SEQ ID NO 62896
  misc_feature (1)..(1211): Ortholog of  Ceres SEQ ID NO 13597493 as cited in SEQ ID NO 64613
  misc_feature (1)..(1211): Ortholog of  Ceres SEQ ID NO 14313540 as cited in SEQ ID NO 68110
  misc_feature (1)..(1211): Ortholog of  Ceres SEQ ID NO 13596175 as cited in SEQ ID NO 68297
aaaactgtcgtccccatccccttgctccagcgcgcggtgtgcacaggcagctaggctcatggcggccgctacccctagtccccacagcgcaagggtcgccgttgtcaccggcgggaacaaagggatcgggctggaggtgtgcaggcagctggccagcaacggcatcaccgtcgtcctaacagccagagacgagaagcggggcgccgcagccgtagaggagctcgcggacgcgggcctctccggcgtcgttttccatcagctggaggtcaccgacgcccagagcattgctagattggccggtttcctgaaggcgtggtttgggaagctagacatcctggtaaacaatgccgctatcggtggggttcagtcacttcccgttgaaaatgttggcgaaaagatcaagggcatggacgcgtcccagatggcggagctgatgtggaagagctgccgagagacaaacgacgccgcgaaggcaggcgtccagacgaactactacggggtgaagaacgtgaccgaggcgctgctgcccctgctcctgcaggcctcctcctccggcggaggaagggtcgtcaacgtctcctccgacttcgggctgctacgctatctcaggaacgaggaggtgaagcgtgagctggacgacattgagggcctgacggaggagaggctggacgagctgctgagcacgttcctccgggacttcgaggccggcgcgctggagtcccgcgggtggccgacggagttcgccgcgtacaaggtggccaaggccgccctgaactcctactcgagggtcctggcgaggcggcaccccgagctgcgcgtcaactgcgcgcacccgggctacgtcaagaccgacatgaccaggcagacgggcctgctgacgcccgcgcagggcgcggccaacgtcgtcaaggtggcgctgctcccggaaggcggccccaccggcgctttcttcgcgctaggcaaggaggcgccgttcgtgtgacgctgccgtactgggctggcggtggtgggttcacggtccggcgctaatgcgccgactctccgacttgcctgacgcctgctatctactacctctctctctgtgctgcgcagcgtagtttgctggtttgggacggcgaataaagaaaggatcgctgctgcctcttagttagttgggttctgttagtactaagcttcggtaataaaataaaatccccccagatagatatggc

SEQ ID NO: 18739 - protein, 326 aa, Zea mays subsp. mays
  peptide (1)..(326): Ceres Seq. ID no. 12381601
KLSSPSPCSSARCAQAARLMAAATPSPHSARVAVVTGGNKGIGLEVCRQLASNGITVVLTARDEKRGAAAVEELADAGLSGVVFHQLEVTDAQSIARLAGFLKAWFGKLDILVNNAAIGGVQSLPVENVGEKIKGMDASQMAELMWKSCRETNDAAKAGVQTNYYGVKNVTEALLPLLLQASSSGGGRVVNVSSDFGLLRYLRNEEVKRELDDIEGLTEERLDELLSTFLRDFEAGALESRGWPTEFAAYKVAKAALNSYSRVLARRHPELRVNCAHPGYVKTDMTRQTGLLTPAQGAANVVKVALLPEGGPTGAFFALGKEAPFV

SEQ ID NO: 18740 - protein, 307 aa, Zea mays subsp. mays
  peptide (1)..(307): Ceres Seq. ID no. 12381602
MAAATPSPHSARVAVVTGGNKGIGLEVCRQLASNGITVVLTARDEKRGAAAVEELADAGLSGVVFHQLEVTDAQSIARLAGFLKAWFGKLDILVNNAAIGGVQSLPVENVGEKIKGMDASQMAELMWKSCRETNDAAKAGVQTNYYGVKNVTEALLPLLLQASSSGGGRVVNVSSDFGLLRYLRNEEVKRELDDIEGLTEERLDELLSTFLRDFEAGALESRGWPTEFAAYKVAKAALNSYSRVLARRHPELRVNCAHPGYVKTDMTRQTGLLTPAQGAANVVKVALLPEGGPTGAFFALGKEAPFV

SEQ ID NO: 18741 - protein, 191 aa, Zea mays subsp. mays
  peptide (1)..(191): Ceres Seq. ID no. 12381603
MDASQMAELMWKSCRETNDAAKAGVQTNYYGVKNVTEALLPLLLQASSSGGGRVVNVSSDFGLLRYLRNEEVKRELDDIEGLTEERLDELLSTFLRDFEAGALESRGWPTEFAAYKVAKAALNSYSRVLARRHPELRVNCAHPGYVKTDMTRQTGLLTPAQGAANVVKVALLPEGGPTGAFFALGKEAPFV

SEQ ID NO: 18742 - DNA, 918 bp, Zea mays subsp. mays; identical to SEQ ID NO: 17863
  misc_feature (1)..(918): Ceres Seq. ID no. 12415286
  misc_feature (1)..(918): Ortholog of  Ceres SEQ ID NO 13594363 as cited in SEQ ID NO 60250
  misc_feature (1)..(918): Ortholog of  Ceres SEQ ID NO 15225478 as cited in SEQ ID NO 63805
  misc_feature (1)..(918): Ortholog of  Ceres SEQ ID NO 13596420 as cited in SEQ ID NO 68738
  misc_feature (1)..(918): Ortholog of  Ceres SEQ ID NO 14309260 as cited in SEQ ID NO 0

SEQ ID NO: 18743 - protein, 196 aa, Zea mays subsp. mays; identical to SEQ ID NO: 17864
  peptide (1)..(196): Ceres Seq. ID no. 12415287

SEQ ID NO: 18744 - protein, 160 aa, Zea mays subsp. mays; identical to SEQ ID NO: 17865
  peptide (1)..(160): Ceres Seq. ID no. 12415288

SEQ ID NO: 18745 - protein, 134 aa, Zea mays subsp. mays; identical to SEQ ID NO: 17866
  peptide (1)..(134): Ceres Seq. ID no. 12415289

SEQ ID NO: 18746 - DNA, 1498 bp, Zea mays subsp. mays
  misc_feature (1)..(1498): Ceres Seq. ID no. 12361178
  misc_feature (1)..(1498): Ortholog of  Ceres SEQ ID NO 15177291 as cited in SEQ ID NO 52286
  misc_feature (1)..(1498): Ortholog of  Ceres SEQ ID NO 13595164 as cited in SEQ ID NO 56222
  misc_feature (1)..(1498): Ortholog of  Ceres SEQ ID NO 14315021 as cited in SEQ ID NO 57018
  misc_feature (1)..(1498): Ortholog of  Ceres SEQ ID NO 15177783 as cited in SEQ ID NO 58894
  misc_feature (1)..(1498): Ortholog of  Ceres SEQ ID NO 13591068 as cited in SEQ ID NO 69043
  misc_feature (1)..(1498): Ortholog of  Ceres SEQ ID NO 13623041 as cited in SEQ ID NO 0
gcacgagaccattacctagaacatcctaatcaaaaaaacccccgggcagcggacaaacaagcacacagcacgagcgaagagacgcagccatggcgatggctccaccgcctgcctgctcgctcttcccccgggtcgccgctgctgcgcccagttccgtcacctccaactccgttttgacctcgcgtggccccggtatccttccttccccgcgtctcgctttcgcccgccgccacctctccgcggcatggtcatcgaaggcagcagcctccgcttctgtcgaaatccaggatgactacacggatgaggtggacgcggtgaacattgcgcaggatgtcacccagctcattggaaaaacaccaatggtgtatctcaatagagttgctgacggatgtgtggctaatatcgctgcaaagctcgagtacatgggaccttgccgaagtgtcaaagataggattggattaagcatgattaatgatgctgaagagaagggattaatttctccagacaagaccattttggtagaaccaacaactggaaatactggtgtagccattgcttctgtggctgcagcaagaggatacaagttgatagcaacaatgccttcatcattagatgtcgagagacgcattcttctgcgtgcattcggagcagagattgtgttaactgatcctaccaaaggactaaaaggagcttttgataaagctgaggaaatagtcctgagaacaccaaatgcgtatatgtttcagcagttcaacaatgaggcaaatagtgaggttattggggtagaacctgctgaaactagtgtgatttctggtgatagccctggttacattccaagtatattagatgtgcagttgattgatgaggttgtgaaggttagcacagcagaagccgttgattctgcaagggaacttgctctaaaagagggcttgctggttggtatttcctctggtgctgcagcggttgctgctatcaatgttggcaaaagacctgaaaatgccggaaagctgattgcggtcattttccccagctttggagagagatacatctccaccattctgttccgtccgatatatgactctgttcgaagaatgaggaagagatagcgagccttgaaccacttcaagcgcgtggccagtcccttctctagacctgacaggcttccatgacatgattgataaacgtgaagcagtgaagaccctgtttgattgcaacttcagggtccgaagttttgaagctgcacagagtttctatcaggtgagctgcaggcctgcagcttggttctagcaagactggaggagtgcctcatgtttagaccagctcatacaatcctggtgcaacacgcagaattgcgtgccgcagttagcttgggactttcgtttagtagtctaggaccgggtacaaaccgcttgttacctggtacgcacttgagctgattttagcgaccaactatctgcaaattctttttgccttccgaattttgattgtttcatctttt

SEQ ID NO: 18747 - protein, 338 aa, Zea mays subsp. mays
  peptide (1)..(338): Ceres Seq. ID no. 12361179
MAMAPPPACSLFPRVAAAAPSSVTSNSVLTSRGPGILPSPRLAFARRHLSAAWSSKAAASASVEIQDDYTDEVDAVNIAQDVTQLIGKTPMVYLNRVADGCVANIAAKLEYMGPCRSVKDRIGLSMINDAEEKGLISPDKTILVEPTTGNTGVAIASVAAARGYKLIATMPSSLDVERRILLRAFGAEIVLTDPTKGLKGAFDKAEEIVLRTPNAYMFQQFNNEANSEVIGVEPAETSVISGDSPGYIPSILDVQLIDEVVKVSTAEAVDSARELALKEGLLVGISSGAAAVAAINVGKRPENAGKLIAVIFPSFGERYISTILFRPIYDSVRRMRKR

SEQ ID NO: 18748 - protein, 336 aa, Zea mays subsp. mays
  peptide (1)..(336): Ceres Seq. ID no. 12361180
MAPPPACSLFPRVAAAAPSSVTSNSVLTSRGPGILPSPRLAFARRHLSAAWSSKAAASASVEIQDDYTDEVDAVNIAQDVTQLIGKTPMVYLNRVADGCVANIAAKLEYMGPCRSVKDRIGLSMINDAEEKGLISPDKTILVEPTTGNTGVAIASVAAARGYKLIATMPSSLDVERRILLRAFGAEIVLTDPTKGLKGAFDKAEEIVLRTPNAYMFQQFNNEANSEVIGVEPAETSVISGDSPGYIPSILDVQLIDEVVKVSTAEAVDSARELALKEGLLVGISSGAAAVAAINVGKRPENAGKLIAVIFPSFGERYISTILFRPIYDSVRRMRKR

SEQ ID NO: 18749 - protein, 248 aa, Zea mays subsp. mays
  peptide (1)..(248): Ceres Seq. ID no. 12361181
MVYLNRVADGCVANIAAKLEYMGPCRSVKDRIGLSMINDAEEKGLISPDKTILVEPTTGNTGVAIASVAAARGYKLIATMPSSLDVERRILLRAFGAEIVLTDPTKGLKGAFDKAEEIVLRTPNAYMFQQFNNEANSEVIGVEPAETSVISGDSPGYIPSILDVQLIDEVVKVSTAEAVDSARELALKEGLLVGISSGAAAVAAINVGKRPENAGKLIAVIFPSFGERYISTILFRPIYDSVRRMRKR

SEQ ID NO: 18750 - DNA, 2088 bp, Zea mays subsp. mays
  misc_feature (1)..(2088): Ceres Seq. ID no. 12418833
  misc_feature (1)..(2088): Ortholog of  Ceres SEQ ID NO 13638331 as cited in SEQ ID NO 58047
  misc_feature (1)..(2088): Ortholog of  Ceres SEQ ID NO 15225845 as cited in SEQ ID NO 65125
gcacgagaccattacctagaacatcctaatcgaaaaacccacgagcccaacaaaccactcccacccggtggctcgtcctcggacgccaagccactccgcgccccaatccggaagcgccgccgccgccgatcgaccggccgtcgacccatgctccgctcggcgctcttccgctcagcccccgggctccgccggtctccggcgacggcccacttatccaccgccgccgccgccgccgcagcgtggctctccaacggccctgcctccgccccgtctagggtgcgcctcctcatcggcggggagttcgtcgagtcgcgcgccgacgagcacgtcgacgtcaccaaccccgcgacgcaggaggtggtgtcccggatcccgctcaccacggccgatgagttcaaagctgccgtcgatgccgccaggacggccttccccggctggcggaacacgcccgtcacgacgcggcagcgcgtcatgttcaagttccaggagctcatccgggctaacatggacaagcttgcagagaacatcactacggagcaggggaagacgctaaaagatgcttggggcgacgtgttccgcggcctagaggtggtggagcatgcttgtggaatgggaacactgcaaatgggcgaatatgtatcaaatgtttctaatgggattgacaccttcagcattcgggagccacttggtgtttgcgctgggatatgcccatttaattttcctgctatgattcccctatggatgtttcccatagcagttacgtgtggcaatacttttgttcttaagccatcggaaaaggacccaggggctgctatgatgcttgcggagctagcaatggaagctggtttgcctaagggtgttttgaacatcgttcatggcaccaatgatgttgtcaataatatttgtgacgatgaggatattaaggctgtatcttttgttggttccaatacagctggtatgcatatttattctagagcatctgctgcaggcaagcgtgttcagtgcaatatgggagcaaagaatcatgcaattatccttcccgatgctgatagagatgctacattgaatgcccttattgctgctggatttggtgcagcagggcaaaggtgcatggcattgagcactgctgtttttgttggcggttcagaatcatgggaggatgaattagtcaaacgtgcaagtggccttgttgttagttcaggaatggttaatgatgtagaccttggtccagtgatcagccgacaggcaaaggatcgtatctgtaaattagttcaaagtggtgttgacagtggtgctcgtatattgcttgatggaagaaagatagtggttcctcgctatgaagatggaaattttgttggcccaaccattctggctgatgttaaaagtgacatggagtgttacaaggaggaaatatttggtccagtgcttctcttaatgaaggcggagagcctagaagatgccatccaaatcataaacagaaacaagtatggcaatggtgcttccatatttacaacatctggcgtctctgccaggaaatttcaaacagacattgaagctggccaggtgggcatcaacgtgccgattccagtccccctgccgttcttctccttcacgggcagcaaagcttcattcgcaggagatttgaatttctacggcaaggctggcgtgcagttcttcacccagatcaagacgatcacgcagcagtggaaggagtcgccggtgcagcgggtctcgctctccatgcccacctcgcagaagtgagacgtcaaaggacgctcacgccactctccaaagctccactcctctggacatagacccacgcatggccacaagagaaggataattggtaggcatggcgacactccatgcacggccatgatactagtgtgtgctcgctttgctcttttgtctggacatcttgcatgcgcattcagaacatccaatgacgaaggtttagatatatgtgagcgctgcccattatgctgttaggattactgtaaaagccccaggtcctttgatcgagtgtcatgtgtaaacccacaataagaggagaaataaaaatgtcgccgtgctggtttgtggcatctc

SEQ ID NO: 18751 - protein, 586 aa, Zea mays subsp. mays
  peptide (1)..(586): Ceres Seq. ID no. 12418834
ARDHYLEHPNRKTHEPNKPLPPGGSSSDAKPLRAPIRKRRRRRSTGRRPMLRSALFRSAPGLRRSPATAHLSTAAAAAAAWLSNGPASAPSRVRLLIGGEFVESRADEHVDVTNPATQEVVSRIPLTTADEFKAAVDAARTAFPGWRNTPVTTRQRVMFKFQELIRANMDKLAENITTEQGKTLKDAWGDVFRGLEVVEHACGMGTLQMGEYVSNVSNGIDTFSIREPLGVCAGICPFNFPAMIPLWMFPIAVTCGNTFVLKPSEKDPGAAMMLAELAMEAGLPKGVLNIVHGTNDVVNNICDDEDIKAVSFVGSNTAGMHIYSRASAAGKRVQCNMGAKNHAIILPDADRDATLNALIAAGFGAAGQRCMALSTAVFVGGSESWEDELVKRASGLVVSSGMVNDVDLGPVISRQAKDRICKLVQSGVDSGARILLDGRKIVVPRYEDGNFVGPTILADVKSDMECYKEEIFGPVLLLMKAESLEDAIQIINRNKYGNGASIFTTSGVSARKFQTDIEAGQVGINVPIPVPLPFFSFTGSKASFAGDLNFYGKAGVQFFTQIKTITQQWKESPVQRVSLSMPTSQK

SEQ ID NO: 18752 - protein, 537 aa, Zea mays subsp. mays
  peptide (1)..(537): Ceres Seq. ID no. 12418835
MLRSALFRSAPGLRRSPATAHLSTAAAAAAAWLSNGPASAPSRVRLLIGGEFVESRADEHVDVTNPATQEVVSRIPLTTADEFKAAVDAARTAFPGWRNTPVTTRQRVMFKFQELIRANMDKLAENITTEQGKTLKDAWGDVFRGLEVVEHACGMGTLQMGEYVSNVSNGIDTFSIREPLGVCAGICPFNFPAMIPLWMFPIAVTCGNTFVLKPSEKDPGAAMMLAELAMEAGLPKGVLNIVHGTNDVVNNICDDEDIKAVSFVGSNTAGMHIYSRASAAGKRVQCNMGAKNHAIILPDADRDATLNALIAAGFGAAGQRCMALSTAVFVGGSESWEDELVKRASGLVVSSGMVNDVDLGPVISRQAKDRICKLVQSGVDSGARILLDGRKIVVPRYEDGNFVGPTILADVKSDMECYKEEIFGPVLLLMKAESLEDAIQIINRNKYGNGASIFTTSGVSARKFQTDIEAGQVGINVPIPVPLPFFSFTGSKASFAGDLNFYGKAGVQFFTQIKTITQQWKESPVQRVSLSMPTSQK

SEQ ID NO: 18753 - protein, 429 aa, Zea mays subsp. mays
  peptide (1)..(429): Ceres Seq. ID no. 12418836
MFKFQELIRANMDKLAENITTEQGKTLKDAWGDVFRGLEVVEHACGMGTLQMGEYVSNVSNGIDTFSIREPLGVCAGICPFNFPAMIPLWMFPIAVTCGNTFVLKPSEKDPGAAMMLAELAMEAGLPKGVLNIVHGTNDVVNNICDDEDIKAVSFVGSNTAGMHIYSRASAAGKRVQCNMGAKNHAIILPDADRDATLNALIAAGFGAAGQRCMALSTAVFVGGSESWEDELVKRASGLVVSSGMVNDVDLGPVISRQAKDRICKLVQSGVDSGARILLDGRKIVVPRYEDGNFVGPTILADVKSDMECYKEEIFGPVLLLMKAESLEDAIQIINRNKYGNGASIFTTSGVSARKFQTDIEAGQVGINVPIPVPLPFFSFTGSKASFAGDLNFYGKAGVQFFTQIKTITQQWKESPVQRVSLSMPTSQK

SEQ ID NO: 18754 - DNA, 1349 bp, Zea mays subsp. mays
  misc_feature (1)..(1349): Ceres Seq. ID no. 12418584
  misc_feature (1)..(1349): Ortholog of  Ceres SEQ ID NO 14307233 as cited in SEQ ID NO 54395
  misc_feature (1)..(1349): Ortholog of  Ceres SEQ ID NO 14306986 as cited in SEQ ID NO 54853
gcacgagaccattacctagaacatcctaatcgaaaaataggcgccggctgagcgaggtcttcatctgcgcttcaccagcgacgattatccactagtttgggttgcctcctgctgattgctaggtaggggagcatccgatcatgtcgagcgcggcggtgaacgggctgtccggcgccggcggcggcatcatcgcgcagatcatcacctaccctctccaaaccgtgaacacccggcagcagacggagaggtcagcgaagaagaggaaggccaggagcggctccagcgccaccccagcctccaccatgtaccagatgctccagctgattcaaaccgaaggatggagtgggttgtacagcggcctcaagccctctctcatcggcactgccgcgtcgcagggaatctattactacttctaccagatcctcaagaacaaggtggaagatatagcggttgctcgtagcaagaagggccttggggatggtactgtcgggatgctttcttggcttggtattgcagctgttgctgggtcaatcaatgttcttctaaccaatccaatatgggttcttgtgacacgtatgcagacacatactcaagcgaaaagaaaaatattggagtctaagagggagcttttactgaaagaaatgtctagggcgaattcgttggaggttgcaattctgaaggataggctggttaaattggagtcagaaaaacctcgtccatatggtactcttcaagcgatccaggaggtttaccatgagtctggtataagaggattttggaaagggcttattccaacattaatcatggtatgtaatccatcgattcagttcatgatctatgaaacattggcaaagcgtctgcagtcaaagcgttctggaaagcagctaccaaaaaggcacctcacagctatggaggtttttttattgggtgcattagcaaaacttggagctactttagtcacctatccattgctagtcgtgaagtcaaggttgcaggcaaaacaagaaattggcagcaatgtgatgtccagatacacgggtacaatagatgcgataataaagatggtttcgctacgaaggactacacgggttttacaaaggaatgggcacaaagattgtacaaagtgtctttgctgcctcggttctctttatggttaaagaggaattggtcaagttagcagtgcttttagttgggagtagtaggactattcttattactacatccaagaaacaataggtggtcgtgtatttgggagaaaagttctttttttttttttgcctcaacttgtaatgtatagggtcccattatacatatcctgttcaagatcaatatgaaattntttactggtt

SEQ ID NO: 18755 - protein, 338 aa, Zea mays subsp. mays
  peptide (1)..(338): Ceres Seq. ID no. 12418585
MSSAAVNGLSGAGGGIIAQIITYPLQTVNTRQQTERSAKKRKARSGSSATPASTMYQMLQLIQTEGWSGLYSGLKPSLIGTAASQGIYYYFYQILKNKVEDIAVARSKKGLGDGTVGMLSWLGIAAVAGSINVLLTNPIWVLVTRMQTHTQAKRKILESKRELLLKEMSRANSLEVAILKDRLVKLESEKPRPYGTLQAIQEVYHESGIRGFWKGLIPTLIMVCNPSIQFMIYETLAKRLQSKRSGKQLPKRHLTAMEVFLLGALAKLGATLVTYPLLVVKSRLQAKQEIGSNVMSRYTGTIDAIIKMVSLRRTTRVLQRNGHKDCTKCLCCLGSLYG

SEQ ID NO: 18756 - protein, 284 aa, Zea mays subsp. mays
  peptide (1)..(284): Ceres Seq. ID no. 12418586
MYQMLQLIQTEGWSGLYSGLKPSLIGTAASQGIYYYFYQILKNKVEDIAVARSKKGLGDGTVGMLSWLGIAAVAGSINVLLTNPIWVLVTRMQTHTQAKRKILESKRELLLKEMSRANSLEVAILKDRLVKLESEKPRPYGTLQAIQEVYHESGIRGFWKGLIPTLIMVCNPSIQFMIYETLAKRLQSKRSGKQLPKRHLTAMEVFLLGALAKLGATLVTYPLLVVKSRLQAKQEIGSNVMSRYTGTIDAIIKMVSLRRTTRVLQRNGHKDCTKCLCCLGSLYG

SEQ ID NO: 18757 - protein, 281 aa, Zea mays subsp. mays
  peptide (1)..(281): Ceres Seq. ID no. 12418587
MLQLIQTEGWSGLYSGLKPSLIGTAASQGIYYYFYQILKNKVEDIAVARSKKGLGDGTVGMLSWLGIAAVAGSINVLLTNPIWVLVTRMQTHTQAKRKILESKRELLLKEMSRANSLEVAILKDRLVKLESEKPRPYGTLQAIQEVYHESGIRGFWKGLIPTLIMVCNPSIQFMIYETLAKRLQSKRSGKQLPKRHLTAMEVFLLGALAKLGATLVTYPLLVVKSRLQAKQEIGSNVMSRYTGTIDAIIKMVSLRRTTRVLQRNGHKDCTKCLCCLGSLYG

SEQ ID NO: 18758 - DNA, 1333 bp, Zea mays subsp. mays
  misc_feature (1)..(1333): Ceres Seq. ID no. 12425320
  misc_feature (1)..(1333): Ortholog of  Ceres SEQ ID NO 13639177 as cited in SEQ ID NO 55952
  misc_feature (1)..(1333): Ortholog of  Ceres SEQ ID NO 13590991 as cited in SEQ ID NO 60658
gccgcacgccggggctcaatctgctccgattccctccagcctttgtttcctccatcccccgcgtcaatcctgcagcctcctgctcgcgcgcttactgtagccgcagctttctccacccttggcaatggaggccgcgatcgctcacgctccatctgctccggtcctgcgccgctcgcgtagcctcaaccccacgcccgccgtccggccgcacccaaaaccctggcagggggtgctttcggcgaggcacccgtcgaacgccgtcaggtgcgagccgtcccagcgcccagaggcgcgcccgcgcctgcgcgcggcgcagccggctggtgctgacgcggcggccgggaggaagcggctggcagtgttcgtgtccggagggggatcaaacttccgggcgatccatgaggccgcgctgggcggtgccgtgcacggagatgtcgtcgcgcttgtcaccgacaagccaggtgaaggaaactgcatcccgcgacgctacccacattgttagcggaggctaaaactgcaataactacattgcaggttgtggtggcgcggaatatgctaggagcaatgacatccctgtgctcgtatttcccaagtccaagtntgcgcccgaggggatttcggttgctcaactgctggatactctgaggggaaacaatgtagattttgttcttcttgccggttacctgaagcttatacccactgaattgatccaggaatacccaaaatccatattaaatatccacccttctctccttccagcattcggagggaaaggtttctatggttcaaaggtgcataaagctgttattgcctctggagcaagatactcgggtccaaccgtacattttgtggatgagcactatgataccggtaaaacgttagcccagagggttgtgcctgtgttcgcagatgacacgccagagttattggctgcaagagtcctccatgaggaacatatggtctatgttgaagcagttgctgctttgtgcgaggaccgcgtcgtatggagggaagatggtgtcccacttatcaaaagtcggacaaatccagctgtgtacatctaattgacaatacggcaatagtagcactattttggagtaataatggaatttgtagagcccttgccacttttcccggtaaaaggggtacttagcagttgacgtagggttgatatacagggcacaacttatttgccaccgaaacatttccatgcgttggaagtgagaaacattgcccccaataggccgcagtatccattactgcatggaacaaggttgaaattttaccttgatttgagataactatcaaatactgcgaatgcattattcttccg

SEQ ID NO: 18759 - protein, 169 aa, Zea mays subsp. mays
  peptide (1)..(169): Ceres Seq. ID no. 12425321
RTPGLNLLRFPPAFVSSIPRVNPAASCSRAYCSRSFLHPWQWRPRSLTLHLLRSCAARVASTPRPPSGRTQNPGRGCFRRGTRRTPSGASRPSAQRRARACARRSRLVLTRRPGGSGWQCSCPEGDQTSGRSMRPRWAVPCTEMSSRLSPTSQVKETASRDATHIVSGG

SEQ ID NO: 18760 - protein, 125 aa, Zea mays subsp. mays
  peptide (1)..(125): Ceres Seq. ID no. 12425322
MEAAIAHAPSAPVLRRSRSLNPTPAVRPHPKPWQGVLSARHPSNAVRCEPSQRPEARPRLRAAQPAGADAAAGRKRLAVFVSGGGSNFRAIHEAALGGAVHGDVVALVTDKPGEGNCIPRRYPHC

SEQ ID NO: 18761 - DNA, 1231 bp, Zea mays subsp. mays
  misc_feature (1)..(1231): Ceres Seq. ID no. 12388992
  misc_feature (1)..(1231): Ortholog of  Ceres SEQ ID NO 12558659 as cited in SEQ ID NO 20727
  misc_feature (1)..(1231): Ortholog of  Ceres SEQ ID NO 14314534 as cited in SEQ ID NO 52434
  misc_feature (1)..(1231): Ortholog of  Ceres SEQ ID NO 14308640 as cited in SEQ ID NO 60489
  misc_feature (1)..(1231): Ortholog of  Ceres SEQ ID NO 15175034 as cited in SEQ ID NO 62432
  misc_feature (1)..(1231): Ortholog of  Ceres SEQ ID NO 12619999 as cited in SEQ ID NO 66123
  misc_feature (1)..(1231): Ortholog of  Ceres SEQ ID NO 13656436 as cited in SEQ ID NO 69154
aggctctagttccaacctccacctgcgccgcccgatagcaaaacgcagcgacctcgccccccctgccccgctcctccccttttcccggtagcagagacggagcaccgcagcccgccagaaaggaagacgaaacgcgccgcggcgcaacgcaccgcgtgctagtgaaagggcgcagcggaaggccgccgccgcgctgctatttagacaggaagcggggcgatcgaatcgcgtctctcaaccaatcgataaatctgccggtaggtcgatcaaggagagcgcggtccacgtctccgttccgttccgttgcggggaaggaaggaaggagagagaggagcgatggcgtccgggtaccgcgcggaggaggagtacgactacctgttcaaggtggtgctgatcggggacagcggcgtggggaagtcgaacctgctgtcgcggttcgccagggacgagttcagcctcgagaccaggtccaccatcggcgtcgagttcgccaccaagaccgtccaggtcgacgacaagctcgtcaaggcacagatctgggacaccgccgggcaggagaggtaccgcgccatcacgagcgcatactaccgcggcgcggtgggcgcgctggtggtgtacgacgtgagccgccgcaccaccttcgacaacgcggagcgctggctgcgggagccgcgggaccacacggacgccaacatcgtggtcatgctggtgggcaacaaggccgacctgcgccacctccgcgccgtctcgcccgaggacgcggcggccttcgccgagcggcacggcaccttctccatggagacgtcggcgctggacgccaccaacgtggagcgcgccttcgccgaggtgctccgccagatctaccacgtcgtcagccggaacgcgctcgacatcggggacgaccccgccgcgccgcccaggggcaagaccatcgacgtcagcgccgccaaggacgaggtctcccctgtgaacgcgggcgggtgctgctcgtcggcttagccctggtcaaacatacgctttgctgattaaggaagacataacgtgatgacaatctttgttgacttcgtcaagcggttgggggtggttggcgctcgtgatgtgtttgcagactagcaatcgctgtcctcgattgtatttttcgggctattttttgattgatgcacttgggtgacgcacacatttacaagtggcaggttatggaccatatggggagcgatttacactgatttgg

SEQ ID NO: 18762 - protein, 220 aa, Zea mays subsp. mays
  peptide (1)..(220): Ceres Seq. ID no. 12388993
MASGYRAEEEYDYLFKVVLIGDSGVGKSNLLSRFARDEFSLETRSTIGVEFATKTVQVDDKLVKAQIWDTAGQERYRAITSAYYRGAVGALVVYDVSRRTTFDNAERWLREPRDHTDANIVVMLVGNKADLRHLRAVSPEDAAAFAERHGTFSMETSALDATNVERAFAEVLRQIYHVVSRNALDIGDDPAAPPRGKTIDVSAAKDEVSPVNAGGCCSSA

SEQ ID NO: 18763 - DNA, 1471 bp, Zea mays subsp. mays
  misc_feature (1)..(1471): Ceres Seq. ID no. 13585990
  misc_feature (1)..(1471): Ortholog of  Ceres SEQ ID NO 14305697 as cited in SEQ ID NO 52505
  misc_feature (1)..(1471): Ortholog of  Ceres SEQ ID NO 13624427 as cited in SEQ ID NO 0
  misc_feature (1)..(1471): Ortholog of  Ceres SEQ ID NO 14305939 as cited in SEQ ID NO 0
gattactacgatccaacagttctagagcaagagagaggaagacacaccgcagagttagcaggctaataacttgcaggagcagcaggaatggcggcgacgcgtcgcctctcttgctttctcctcgccgtgcttctggcaggagtggccgctgccaccgccttcgacgaagcggctgctgccggcttcgggcttggccacggcgcgcgtttcgcgcgcaagcatggacgtgctgccgctgagatgccccagccggagccacaacctaaaactaagccggagccccatatgcagccactgccccagccagaacctaaaccgaaacctatgccacatccagagccaaagcctgaacctcaaccaaagcccaaccctgaacctcaaccaatgcccaagcctcaaccaaaatccaaaccagagccattgcctacaccgaagcctgaacctaagcccgaacctaagccagagcctaagcccgaacctaaaataaaaccaaagccaaaacctgaaccaaaaccagagcctaagccagagcataaacctgagccaaagccagagcctaaacccaaaccgaaaccagagccaaagccagagccacaaccaaaaccagagcctaagccagagcctaaacccgaaccgaaaccggagccaaagccagagccccaacctaagccagagcctaagcctgagccgaaaccagaaccaaagccagagccacaaccaaagcctgagcctaaaccagaaccaaaaccagagccaaagccagagcctaagcccgaaccaaaaccagagccaaagcctgagcctaaacccgaaccaaggccagaacctaagccagagccaaagcctgagccgaaaccgaaaccagatccaaagccagagccacaaccaaagccagagcctaagccagaaccaaaaccagagccaaagccagagcctaagcccgaaccaaaaccagagccaaagcctgagcctaaacccgaaccaagaccagaaccagaaccaaagccagagcctaaacctgaaccaaaaccgaaaccagaaccggagccacaaccaaagccagagcctaagcctgatccaaaaccagagcctaaacccgaaccaaaaccagagccccaaccaaaaccagaacctaagcccgaaccaaaaccacagccagaacctaagcccgagcccaaaccaaagcctgaccctccacacatcccaccagcagctatcaactgaggaagtggctattaacaattattgtagtgtttaaataaaatgccatgttgcagcgtgcttttgtaggtgctgctacttgttgtatctatcctatcttttctttgtcattttttgtatgttatgctattatatgatcttagtgcagtttagcttgttccgtgtatacacgcatttatgcactcagtgggtttttgttatatgttggttgttatgtatatatgttcgctgtttcgagcagctaactaac

SEQ ID NO: 18764 - protein, 378 aa, Zea mays subsp. mays
  peptide (1)..(378): Ceres Seq. ID no. 13585991
MAATRRLSCFLLAVLLAGVAAATAFDEAAAAGFGLGHGARFARKHGRAAAEMPQPEPQPKTKPEPHMQPLPQPEPKPKPMPHPEPKPEPQPKPNPEPQPMPKPQPKSKPEPLPTPKPEPKPEPKPEPKPEPKIKPKPKPEPKPEPKPEHKPEPKPEPKPKPKPEPKPEPQPKPEPKPEPKPEPKPEPKPEPQPKPEPKPEPKPEPKPEPQPKPEPKPEPKPEPKPEPKPEPKPEPKPEPKPEPRPEPKPEPKPEPKPKPDPKPEPQPKPEPKPEPKPEPKPEPKPEPKPEPKPEPKPEPRPEPEPKPEPKPEPKPKPEPEPQPKPEPKPDPKPEPKPEPKPEPQPKPEPKPEPKPQPEPKPEPKPKPDPPHIPPAAIN

SEQ ID NO: 18765 - protein, 327 aa, Zea mays subsp. mays
  peptide (1)..(327): Ceres Seq. ID no. 13585992
MPQPEPQPKTKPEPHMQPLPQPEPKPKPMPHPEPKPEPQPKPNPEPQPMPKPQPKSKPEPLPTPKPEPKPEPKPEPKPEPKIKPKPKPEPKPEPKPEHKPEPKPEPKPKPKPEPKPEPQPKPEPKPEPKPEPKPEPKPEPQPKPEPKPEPKPEPKPEPQPKPEPKPEPKPEPKPEPKPEPKPEPKPEPKPEPRPEPKPEPKPEPKPKPDPKPEPQPKPEPKPEPKPEPKPEPKPEPKPEPKPEPKPEPRPEPEPKPEPKPEPKPKPEPEPQPKPEPKPDPKPEPKPEPKPEPQPKPEPKPEPKPQPEPKPEPKPKPDPPHIPPAAIN

SEQ ID NO: 18766 - protein, 312 aa, Zea mays subsp. mays
  peptide (1)..(312): Ceres Seq. ID no. 13585993
MQPLPQPEPKPKPMPHPEPKPEPQPKPNPEPQPMPKPQPKSKPEPLPTPKPEPKPEPKPEPKPEPKIKPKPKPEPKPEPKPEHKPEPKPEPKPKPKPEPKPEPQPKPEPKPEPKPEPKPEPKPEPQPKPEPKPEPKPEPKPEPQPKPEPKPEPKPEPKPEPKPEPKPEPKPEPKPEPRPEPKPEPKPEPKPKPDPKPEPQPKPEPKPEPKPEPKPEPKPEPKPEPKPEPKPEPRPEPEPKPEPKPEPKPKPEPEPQPKPEPKPDPKPEPKPEPKPEPQPKPEPKPEPKPQPEPKPEPKPKPDPPHIPPAAIN

SEQ ID NO: 18767 - DNA, 1491 bp, Zea mays subsp. mays
  misc_feature (1)..(1491): Ceres Seq. ID no. 15180137
  misc_feature (1)..(1491): Ortholog of  Ceres SEQ ID NO 14315257 as cited in SEQ ID NO 52552
  misc_feature (1)..(1491): Ortholog of  Ceres SEQ ID NO 14314636 as cited in SEQ ID NO 56924
  misc_feature (1)..(1491): Ortholog of  Ceres SEQ ID NO 15168421 as cited in SEQ ID NO 60131
  misc_feature (1)..(1491): Ortholog of  Ceres SEQ ID NO 13597574 as cited in SEQ ID NO 64677
  misc_feature (1)..(1491): Ortholog of  Ceres SEQ ID NO 13597843 as cited in SEQ ID NO 64850
  misc_feature (1)..(1491): Ortholog of  Ceres SEQ ID NO 13597678 as cited in SEQ ID NO 65375
  misc_feature (1)..(1491): Ortholog of  Ceres SEQ ID NO 15176787 as cited in SEQ ID NO 66468
  misc_feature (1)..(1491): Ortholog of  Ceres SEQ ID NO 13596180 as cited in SEQ ID NO 67941
  misc_feature (1)..(1491): Ortholog of  Ceres SEQ ID NO 13591190 as cited in SEQ ID NO 68044
  misc_feature (1)..(1491): Ortholog of  Ceres SEQ ID NO 13595961 as cited in SEQ ID NO 68223
gcacgttgtcctgctccctagcgccggcatgggccacctggtcccgttcgcccgcctggcggtggcgctgtcggagggacacggctgcaacgtgtccgtggccgcggtgcagcccaccgtgtcgtcggcggagtccaggctcctcgacgcgctcttcgtcgccgcggccccggccgtccgccggctcgacttccgcctggcgccgttcgacgagtccgagttcccgggcgccgaccctttcttcctccgcttcgaggccacgcgccggtccgcgccgctgctcggcccgctcctcgacgccgccgaggcgtccgcgctcgtcacggacatcgttctggcgtccgtcgccctgcccgtcgccagggagcggggcgtcccgtgctacgtcctcttcacgtcctctgccgcgatgctctccctatgcgcctatttccccgcctacctcgacgcccacgccgccgccggcagcgtgggcgtgggcgtcggcaatgtcgacatccccggcgtgttccggatcccaaagtcatccgtcccgcaggcgctgcacgaccccgaccatctcttcacccaacagttcgtcgccaacggtcgctgcctcgtggcctgtgacggcatccttgtcaacacgttcgacgcctttgagccggacgccgttacggccctgcgccaaggctccattactgtctccggcggcttcccgcctgtgttctccgtggggcccatgcttccggtgagatttcaggcggaggagacggcggattacatgagatggctcagcgcgcagccgccacggtctgtggtgtacgtcagcttcggcagccgtaaggccataccgagggaccagctccgggagctcgcagccgggctcgaggccagcggcaaacggttcctgtgggtggtgaagagcaccatcgtggaccgggacgacaccgccgacctcggcggcctgcttggtgacgggttcctcgagcgagtgcaggggcgcgcgttcgttaccatggggtgggtggagcaagaggagatcctgcagcacggttccgtcggcctattcatcagtcactgcgggtggaactcgttgacggaggcagcggcgttcggtgtgccggtgctagcgtggccgaggttcggcgaccagcgcgtcaacgccgcactggtggcgcgcagcgggctgggcgcgtgggaggaggggtggacctgggatggagaggaagggctgacgactcgaaaggaggtggctaagaagataaaaggcatgatggggtatgatgcggtggcggaaaaggcagcgaaggtcggcgacgccgccgccgcggcaatagccaagtgcggcacgagctaccagagcttagaggaattcgttcagcggtgtcgggacgcggagcgtaagtaggctcgactgatttctgcgagcctgtaacagatacttggttcctgtgacgctgactgtagatcattttcggttgctagagttattttcgccggcctcttcct

SEQ ID NO: 18768 - protein, 462 aa, Zea mays subsp. mays
  peptide (1)..(462): Ceres Seq. ID no. 15180138
HVVLLPSAGMGHLVPFARLAVALSEGHGCNVSVAAVQPTVSSAESRLLDALFVAAAPAVRRLDFRLAPFDESEFPGADPFFLRFEATRRSAPLLGPLLDAAEASALVTDIVLASVALPVARERGVPCYVLFTSSAAMLSLCAYFPAYLDAHAAAGSVGVGVGNVDIPGVFRIPKSSVPQALHDPDHLFTQQFVANGRCLVACDGILVNTFDAFEPDAVTALRQGSITVSGGFPPVFSVGPMLPVRFQAEETADYMRWLSAQPPRSVVYVSFGSRKAIPRDQLRELAAGLEASGKRFLWVVKSTIVDRDDTADLGGLLGDGFLERVQGRAFVTMGWVEQEEILQHGSVGLFISHCGWNSLTEAAAFGVPVLAWPRFGDQRVNAALVARSGLGAWEEGWTWDGEEGLTTRKEVAKKIKGMMGYDAVAEKAAKVGDAAAAAIAKCGTSYQSLEEFVQRCRDAERK

SEQ ID NO: 18769 - protein, 453 aa, Zea mays subsp. mays
  peptide (1)..(453): Ceres Seq. ID no. 15180139
MGHLVPFARLAVALSEGHGCNVSVAAVQPTVSSAESRLLDALFVAAAPAVRRLDFRLAPFDESEFPGADPFFLRFEATRRSAPLLGPLLDAAEASALVTDIVLASVALPVARERGVPCYVLFTSSAAMLSLCAYFPAYLDAHAAAGSVGVGVGNVDIPGVFRIPKSSVPQALHDPDHLFTQQFVANGRCLVACDGILVNTFDAFEPDAVTALRQGSITVSGGFPPVFSVGPMLPVRFQAEETADYMRWLSAQPPRSVVYVSFGSRKAIPRDQLRELAAGLEASGKRFLWVVKSTIVDRDDTADLGGLLGDGFLERVQGRAFVTMGWVEQEEILQHGSVGLFISHCGWNSLTEAAAFGVPVLAWPRFGDQRVNAALVARSGLGAWEEGWTWDGEEGLTTRKEVAKKIKGMMGYDAVAEKAAKVGDAAAAAIAKCGTSYQSLEEFVQRCRDAERK

SEQ ID NO: 18770 - protein, 326 aa, Zea mays subsp. mays
  peptide (1)..(326): Ceres Seq. ID no. 15180140
MLSLCAYFPAYLDAHAAAGSVGVGVGNVDIPGVFRIPKSSVPQALHDPDHLFTQQFVANGRCLVACDGILVNTFDAFEPDAVTALRQGSITVSGGFPPVFSVGPMLPVRFQAEETADYMRWLSAQPPRSVVYVSFGSRKAIPRDQLRELAAGLEASGKRFLWVVKSTIVDRDDTADLGGLLGDGFLERVQGRAFVTMGWVEQEEILQHGSVGLFISHCGWNSLTEAAAFGVPVLAWPRFGDQRVNAALVARSGLGAWEEGWTWDGEEGLTTRKEVAKKIKGMMGYDAVAEKAAKVGDAAAAAIAKCGTSYQSLEEFVQRCRDAERK

SEQ ID NO: 18771 - DNA, 1441 bp, Zea mays subsp. mays
  misc_feature (1)..(1441): Ceres Seq. ID no. 12434855
  misc_feature (1)..(1441): Ortholog of  Ceres SEQ ID NO 14314468 as cited in SEQ ID NO 52388
  misc_feature (1)..(1441): Ortholog of  Ceres SEQ ID NO 14307446 as cited in SEQ ID NO 59409
agcgcttctcccagccacgtcttcatcacacacggtcgcggcgcgaagcaatggcgaccacggcgccgctgctctcgccccagcgcgcttgccctacccatctccggcgccgcctctcgcccctacatctcgtattccccctcgacgcgtcagcgaggcggctgcgccttcgccgggcgccgccaccttgttcggccaagttcggcaagttcgacgcctccgacgccccggcggaggccgaggaggcggggggcgcgacggatggtgggctggcgcagcccgtggaggaggacgacagttgcttgccatcggatttggagggcgcgattcggcagtcagggaaggcgagcgcagatttcgtaaactccggaggcatgcgagctatcgcagaactgctgatccctcagttggaattcctcaacgaggaaggagcacaggctgaactctgggcgttgtcaaagattttcctggacacacttgtacaagagacaggacagaaagttactgccattttccctgacgctggagcagctgcccttctcaagcatcaatggaaagatgcacaattcaagtgtgccagtttaggtgaccggaagccagttggtcctgaagatgaggtcgcagttatgattatccctgatcatcagatgctggaagctgttgaacgcatcacatctcaactctctgatgatcctataaaacctcttgtcatgtggaacccacggcttgttagtggagatgttggagtaggctttaatgtacggaatctgcggagaaatttcttaagcacttttaccactgtttactcgatgaggccattgccaactggtgcagtctttagatgctttccagggcagtggaaagtgttttatgatgatccaaataggccaaatcggtatttgcttgcccgagaactcacaagtaggcccgatgcaactgatattgagagaatatttggtggtgccgatgagcaatctgaagaggcaccatcgttgatgaacaatgtcatgggcgtgttcagttccgtgagtcggtttatgagggtcatctccaagtgagagtcgaagcaaacattggtcacacttgaagccatcaacaatcatcatgatgcttgagttatacaagaagattattttagtgcatccatgttgttttcagtctgtaattactccatggtactgctattcggaacagtatagtttggcgttccggcacatgccaccaaatgtgtgcacataccataccgtggattcctggagtcatctgctgatcctacaccgtgaggtcatttatgtaacttaggaaaaaaaagtagatagatcctcattctggaaaaggccgggtatctgattgtaattcaatactgtgcttgatatatcacaatcagctcgcattttgtaattcaatactggacgaatataaattcaatcctttgttttgc

SEQ ID NO: 18772 - protein, 351 aa, Zea mays subsp. mays
  peptide (1)..(351): Ceres Seq. ID no. 12434856
RFSQPRLHHTRSRREAMATTAPLLSPQRACPTHLRRRLSPLHLVFPLDASARRLRLRRAPPPCSAKFGKFDASDAPAEAEEAGGATDGGLAQPVEEDDSCLPSDLEGAIRQSGKASADFVNSGGMRAIAELLIPQLEFLNEEGAQAELWALSKIFLDTLVQETGQKVTAIFPDAGAAALLKHQWKDAQFKCASLGDRKPVGPEDEVAVMIIPDHQMLEAVERITSQLSDDPIKPLVMWNPRLVSGDVGVGFNVRNLRRNFLSTFTTVYSMRPLPTGAVFRCFPGQWKVFYDDPNRPNRYLLARELTSRPDATDIERIFGGADEQSEEAPSLMNNVMGVFSSVSRFMRVISK

SEQ ID NO: 18773 - protein, 335 aa, Zea mays subsp. mays
  peptide (1)..(335): Ceres Seq. ID no. 12434857
MATTAPLLSPQRACPTHLRRRLSPLHLVFPLDASARRLRLRRAPPPCSAKFGKFDASDAPAEAEEAGGATDGGLAQPVEEDDSCLPSDLEGAIRQSGKASADFVNSGGMRAIAELLIPQLEFLNEEGAQAELWALSKIFLDTLVQETGQKVTAIFPDAGAAALLKHQWKDAQFKCASLGDRKPVGPEDEVAVMIIPDHQMLEAVERITSQLSDDPIKPLVMWNPRLVSGDVGVGFNVRNLRRNFLSTFTTVYSMRPLPTGAVFRCFPGQWKVFYDDPNRPNRYLLARELTSRPDATDIERIFGGADEQSEEAPSLMNNVMGVFSSVSRFMRVISK

SEQ ID NO: 18774 - protein, 227 aa, Zea mays subsp. mays
  peptide (1)..(227): Ceres Seq. ID no. 12434858
MRAIAELLIPQLEFLNEEGAQAELWALSKIFLDTLVQETGQKVTAIFPDAGAAALLKHQWKDAQFKCASLGDRKPVGPEDEVAVMIIPDHQMLEAVERITSQLSDDPIKPLVMWNPRLVSGDVGVGFNVRNLRRNFLSTFTTVYSMRPLPTGAVFRCFPGQWKVFYDDPNRPNRYLLARELTSRPDATDIERIFGGADEQSEEAPSLMNNVMGVFSSVSRFMRVISK

SEQ ID NO: 18775 - DNA, 1848 bp, Zea mays subsp. mays
  misc_feature (1)..(1848): Ceres Seq. ID no. 12566909
  misc_feature (1)..(1848): Ortholog of  Ceres SEQ ID NO 15174599 as cited in SEQ ID NO 53646
  misc_feature (1)..(1848): Ortholog of  Ceres SEQ ID NO 15174646 as cited in SEQ ID NO 54499
gcacgagaccattacctagaacatcctaatcgaaaaatacacaaacacacggagctagcagcacggatcgagagaacaatggaggaaacaagcaggatccctgggtacttcaagaacaagggcatcctgatcacgggcgcaacaggcttccttggaaagagtaagcattcctcgtggagaagatactgagggtccagccggacgtaaagaggatctacctccccgtgcgtgcgccggatgctgcatcagccaagaaacgggtggagactgaggtgatcgggaaggagctgtttgggcttctccgagagacgcacggcaagaggttccactccttcatcgaggagaaggtggtcccgttggccggcgacatcatccacgagaacctgggcgtggaggggccccagctgaggcggatgactcgggagctcaacgtcatcgtcaatggagctgccacaacaaacttctacgagaggtacgacgtggccctggacgtgaacgtgatgggagtgaagcatatctgccagttggccaagcagtgccccaatctggaggtcgtcctccatgtgtccacggcctatgtggtgggggagaagcaggggatgatcctggagcgggcgttcaagcagggcgagaccctgcggatggagacggagctggacatggacgccgagctgcgggtggccagggactaccagcagcaggtcgccggggacgacgccgagcagaagaacgagaggaaggccatgaaggagctgggcctcgccagggcccgggagttgggctggcccaacacgtacgtcttcaccaaggcgctaggggagatgatgctggcgcgggagctgggcggcgtcgtccccgccgtgatcgtgcggcccagcatcatcacaagcatccataaggagccgctgccggggtggatggaagggaccaggaccatcgacgccatcctcattggctacgccaagcagagcctctcctgcttcctagccgacctccagctcaccatggacgtgatccccggggacatggtggtgaacgcgatgatggccgcgacggtggcgcacgcgtccgcccccggcggccacaaggaggagtcgccgacggtgtaccacgcgacgtcttccctccgcaaccctgcgccgtacgcggtgctgtaccggacgggaatccgctacttctgcgaccacccgcgcgtgggcaaggacggccgccccgtgcgtacccgcaaggtgcacttcttcggcaccgtcgcagccttcaccgcctacatgctgctccgctacaggctgccgctggagcttctgcgcctgctcagcctcctctccggcggcctcctcttctcgcgcctctacgccgacctggaccgcaagtacaggttcgtcatgcatctcgtcgacctctacgggcccttcgcgctcttcaagggcatcttcgacgacgccaacatggagagactcaggatggccatgcctgttgccgaccggctggagttcaacttcgacccaaacaccatcgactgggacgactacttctacaagatccacattccaggggtcatgaagtacgtcctcaagtagcagctacatgcactgatcgccgtcgttcgtactacctacatgtacatcatgatccatccagattagtactattaattaattaaatccaccaattggcgcgcgtttgtatacacattgctatatattgttgctacgctcgacgtggatcccacccatcctctctattcctcatcaaaatgtatccagttattagcagctctgctttagctaccactacgtacttctgctctggcttgtttatttagtgttaatttagcaggacctgatgatg

SEQ ID NO: 18776 - protein, 387 aa, Zea mays subsp. mays
  peptide (1)..(387): Ceres Seq. ID no. 12566910
MTRELNVIVNGAATTNFYERYDVALDVNVMGVKHICQLAKQCPNLEVVLHVSTAYVVGEKQGMILERAFKQGETLRMETELDMDAELRVARDYQQQVAGDDAEQKNERKAMKELGLARARELGWPNTYVFTKALGEMMLARELGGVVPAVIVRPSIITSIHKEPLPGWMEGTRTIDAILIGYAKQSLSCFLADLQLTMDVIPGDMVVNAMMAATVAHASAPGGHKEESPTVYHATSSLRNPAPYAVLYRTGIRYFCDHPRVGKDGRPVRTRKVHFFGTVAAFTAYMLLRYRLPLELLRLLSLLSGGLLFSRLYADLDRKYRFVMHLVDLYGPFALFKGIFDDANMERLRMAMPVADRLEFNFDPNTIDWDDYFYKIHIPGVMKYVLK

SEQ ID NO: 18777 - protein, 358 aa, Zea mays subsp. mays
  peptide (1)..(358): Ceres Seq. ID no. 12566911
MGVKHICQLAKQCPNLEVVLHVSTAYVVGEKQGMILERAFKQGETLRMETELDMDAELRVARDYQQQVAGDDAEQKNERKAMKELGLARARELGWPNTYVFTKALGEMMLARELGGVVPAVIVRPSIITSIHKEPLPGWMEGTRTIDAILIGYAKQSLSCFLADLQLTMDVIPGDMVVNAMMAATVAHASAPGGHKEESPTVYHATSSLRNPAPYAVLYRTGIRYFCDHPRVGKDGRPVRTRKVHFFGTVAAFTAYMLLRYRLPLELLRLLSLLSGGLLFSRLYADLDRKYRFVMHLVDLYGPFALFKGIFDDANMERLRMAMPVADRLEFNFDPNTIDWDDYFYKIHIPGVMKYVLK

SEQ ID NO: 18778 - protein, 325 aa, Zea mays subsp. mays
  peptide (1)..(325): Ceres Seq. ID no. 12566912
MILERAFKQGETLRMETELDMDAELRVARDYQQQVAGDDAEQKNERKAMKELGLARARELGWPNTYVFTKALGEMMLARELGGVVPAVIVRPSIITSIHKEPLPGWMEGTRTIDAILIGYAKQSLSCFLADLQLTMDVIPGDMVVNAMMAATVAHASAPGGHKEESPTVYHATSSLRNPAPYAVLYRTGIRYFCDHPRVGKDGRPVRTRKVHFFGTVAAFTAYMLLRYRLPLELLRLLSLLSGGLLFSRLYADLDRKYRFVMHLVDLYGPFALFKGIFDDANMERLRMAMPVADRLEFNFDPNTIDWDDYFYKIHIPGVMKYVLK

SEQ ID NO: 18779 - DNA, 1364 bp, Zea mays subsp. mays
  misc_feature (1)..(1364): Ceres Seq. ID no. 12435531
  misc_feature (1)..(1364): Ortholog of  Ceres SEQ ID NO 13597732 as cited in SEQ ID NO 64810
  misc_feature (1)..(1364): Ortholog of  Ceres SEQ ID NO 14301912 as cited in SEQ ID NO 67786
gcacgagaccattacctagaacatcctaatcgaaaacccccgtcacctcctctgctccgtagcgccgccatccgtggcggcggcaatctaccgaacaccgtgcgtgcgtgtgttgccgcaatggcctcgcaccacctcgccagccccgccgcggccgcaacctccgccgccaccgtctccagggctctcttcaagcatgcctacactaaaccctcttactcccttctccacgccccgctcctccgcgccgtcgccgcccggcccgcgctcctctccgccgccaccgcggtctccactacggcggcgcccgcggccgcagctatggacaacgtggaggagtgggggctgaggccgctggccgaggtcgacccggaggtgtacgacctaatcgagcgcgagaagcggcggcagcgagcgggtatcgagctcatcgcctcggagaacttcacctcgctcgctgtcatggaggcgctgggctccccgctcaccaacaagtactcggagggcatgccgggggcgcgctactacggcggcaacgaggtcatcgacgaaatcgaggagctctgccggacccgcgcgctcgccgccttccacctcgaccccgcccgctggggcgtcaacgtgcagccctactcggggtcccccgccaatttcgcggcttacacggggctgctccagccgaacgacaggatcatggggctcgacctgccgtccgggggccacctcacccacgggtactacacggcgagtggcaagaagatttctgcaacctccatctacttccagagcctgccgtataaggtgagctccgacaccgggtacgtcgactacgataagctggaggaaaaggccatggatttccgccccaagcttatcatctgtggcggtagtgcgtgccctcgggagtgggattacgccaggttcagggccatcgcagacaagtgcggggccatgttgctctgcgacatggctcatatcagtggtctcgttgctgcgcaggaggctttggatccttttgagttctctgatgtggttaccactacgacccacaaaagtcttcgagggccaaggtctggtatgattttctacaggaagggcccaaagcctccaaaaaaaggccagcctgagggtgctctgtatgactacgaggacaagatcaactttgctgtgttcccgtcactccagggggggcctcacaatcaccaaattgctgctctagctgtagccttgaaacaggccatgtcacctggattcaaggcctatatccagcaggtcaaggcaaacacagtttcccttggtaaccatttgatgagtaagggctacaagttggttactgatggaacagagaaccaccttgttctctg

SEQ ID NO: 18780 - protein, 454 aa, Zea mays subsp. mays
  peptide (1)..(454): Ceres Seq. ID no. 12435532
ARDHYLEHPNRKPPSPPLLRSAAIRGGGNLPNTVRACVAAMASHHLASPAAAATSAATVSRALFKHAYTKPSYSLLHAPLLRAVAARPALLSAATAVSTTAAPAAAAMDNVEEWGLRPLAEVDPEVYDLIEREKRRQRAGIELIASENFTSLAVMEALGSPLTNKYSEGMPGARYYGGNEVIDEIEELCRTRALAAFHLDPARWGVNVQPYSGSPANFAAYTGLLQPNDRIMGLDLPSGGHLTHGYYTASGKKISATSIYFQSLPYKVSSDTGYVDYDKLEEKAMDFRPKLIICGGSACPREWDYARFRAIADKCGAMLLCDMAHISGLVAAQEALDPFEFSDVVTTTTHKSLRGPRSGMIFYRKGPKPPKKGQPEGALYDYEDKINFAVFPSLQGGPHNHQIAALAVALKQAMSPGFKAYIQQVKANTVSLGNHLMSKGYKLVTDGTENHLVL

SEQ ID NO: 18781 - protein, 414 aa, Zea mays subsp. mays
  peptide (1)..(414): Ceres Seq. ID no. 12435533
MASHHLASPAAAATSAATVSRALFKHAYTKPSYSLLHAPLLRAVAARPALLSAATAVSTTAAPAAAAMDNVEEWGLRPLAEVDPEVYDLIEREKRRQRAGIELIASENFTSLAVMEALGSPLTNKYSEGMPGARYYGGNEVIDEIEELCRTRALAAFHLDPARWGVNVQPYSGSPANFAAYTGLLQPNDRIMGLDLPSGGHLTHGYYTASGKKISATSIYFQSLPYKVSSDTGYVDYDKLEEKAMDFRPKLIICGGSACPREWDYARFRAIADKCGAMLLCDMAHISGLVAAQEALDPFEFSDVVTTTTHKSLRGPRSGMIFYRKGPKPPKKGQPEGALYDYEDKINFAVFPSLQGGPHNHQIAALAVALKQAMSPGFKAYIQQVKANTVSLGNHLMSKGYKLVTDGTENHLVL

SEQ ID NO: 18782 - protein, 347 aa, Zea mays subsp. mays
  peptide (1)..(347): Ceres Seq. ID no. 12435534
MDNVEEWGLRPLAEVDPEVYDLIEREKRRQRAGIELIASENFTSLAVMEALGSPLTNKYSEGMPGARYYGGNEVIDEIEELCRTRALAAFHLDPARWGVNVQPYSGSPANFAAYTGLLQPNDRIMGLDLPSGGHLTHGYYTASGKKISATSIYFQSLPYKVSSDTGYVDYDKLEEKAMDFRPKLIICGGSACPREWDYARFRAIADKCGAMLLCDMAHISGLVAAQEALDPFEFSDVVTTTTHKSLRGPRSGMIFYRKGPKPPKKGQPEGALYDYEDKINFAVFPSLQGGPHNHQIAALAVALKQAMSPGFKAYIQQVKANTVSLGNHLMSKGYKLVTDGTENHLVL

SEQ ID NO: 18783 - DNA, 777 bp, Zea mays subsp. mays
  misc_feature (1)..(777): Ceres Seq. ID no. 13499348
  misc_feature (1)..(777): Ortholog of  Ceres SEQ ID NO 13662959 as cited in SEQ ID NO 65995
aatcgaaaaacatgtctctctccttggagcgaagcagcagcgtggtccgcgacgtcgccacgcccgcgcctccggcgaccagtggcgccagtgcgccgtatccacgcgcgggcgcgggcgcgtcgctctccctgcccggcgcagcggcggcgcacgggcacagccagtacctgcccctcaacgaggacgactccctggacatggtcctcttcgacgtgctccgcgaggcatccggctccgcctccacctccgccgcggcgcccgccacctaccagccgccctcgtcgctgcctacgctgaaggcgctcgcttccggagccgcgcgcaggggcagcaggaccgcgtacgcaccgaaggcggccacggcggggcgccactaccgcggggtgaggcggcggccgtggggcaagtacgccgcggagatccgtgacccggcgcggcacggggcgcggctctggctcggcaccttcgccacggccgaggaggcagccgccgcgtaggaccgcgccgcggtccgcatgcgcggagccaaggcgctgctcaacttcccgccggcggtcgcgggctgcgggagcgccgcaaccgccacggcgaagcaggctgggctgacggaagccaagtgaacagcgaatgcgatctcaaaggaaccagctgcgaaactgtgtgtaatgtaattgtgtggaatagtagtatataatgtaaatgtggatgaactagagagagatttccattcatcattgaacggaccacaccaaggattccaaggcgccggttccc

SEQ ID NO: 18784 - protein, 165 aa, Zea mays subsp. mays
  peptide (1)..(165): Ceres Seq. ID no. 13499349
SKNMSLSLERSSSVVRDVATPAPPATSGASAPYPRAGAGASLSLPGAAAAHGHSQYLPLNEDDSLDMVLFDVLREASGSASTSAAAPATYQPPSSLPTLKALASGAARRGSRTAYAPKAATAGRHYRGVRRRPWGKYAAEIRDPARHGARLWLGTFATAEEAAAA

SEQ ID NO: 18785 - protein, 162 aa, Zea mays subsp. mays
  peptide (1)..(162): Ceres Seq. ID no. 13499350
MSLSLERSSSVVRDVATPAPPATSGASAPYPRAGAGASLSLPGAAAAHGHSQYLPLNEDDSLDMVLFDVLREASGSASTSAAAPATYQPPSSLPTLKALASGAARRGSRTAYAPKAATAGRHYRGVRRRPWGKYAAEIRDPARHGARLWLGTFATAEEAAAA

SEQ ID NO: 18786 - protein, 142 aa, Zea mays subsp. mays
  peptide (1)..(142): Ceres Seq. ID no. 13499351
IEKHVSLLGAKQQRGPRRRHARASGDQWRQCAVSTRGRGRVALPARRSGGARAQPVPAPQRGRLPGHGPLRRAPRGIRLRLHLRRGARHLPAALVAAYAEGARFRSRAQGQQDRVRTEGGHGGAPLPRGEAAAVGQVRRGDP

SEQ ID NO: 18787 - DNA, 484 bp, Zea mays subsp. mays
  misc_feature (1)..(484): Ceres Seq. ID no. 4613295
  misc_feature (1)..(484): Ortholog of  Ceres SEQ ID NO 14312281 as cited in SEQ ID NO 59172
  misc_feature (1)..(484): Ortholog of  Ceres SEQ ID NO 14302299 as cited in SEQ ID NO 68665
  misc_feature (1)..(484): Ortholog of  Ceres SEQ ID NO 15174396 as cited in SEQ ID NO 0
attggccgggctccagtgctgggcgttgtatgagaggtgagcctcccggtggagcgtgggtggtgccggggatgagctgcaacgggtgccgcgtgcttcgcaaggggtgcagcgacgcgtgcgtgctgcggccgtgcctgcagtggatcgacggcgccgaggcgcagggccacgccaccgtcttcgtcgccaagttcttcggccgcgccggcctcatgtccttcctcaccgccgtccccgagccgcagcgcccagcggtgttccagtcgttgatgtacgaggcggccgggcggacgatcaaccctgtgagcggcgccgtggggctgctcggcgcgggcagctggcagctgtgccaggcggcggtggagacggtgcttcggggcggcgccatcgggccgctgcccgagttcgacgggggccgcgacaacacgtttgctctggcggcgacggcgaggcgggccgtggggtgctcgacgttctccac

SEQ ID NO: 18788 - protein, 160 aa, Zea mays subsp. mays
  peptide (1)..(160): Ceres Seq. ID no. 4613296
WPGSSAGRCMRGEPPGGAWVVPGMSCNGCRVLRKGCSDACVLRPCLQWIDGAEAQGHATVFVAKFFGRAGLMSFLTAVPEPQRPAVFQSLMYEAAGRTINPVSGAVGLLGAGSWQLCQAAVETVLRGGAIGPLPEFDGGRDNTFALAATARRAVGCSTFS

SEQ ID NO: 18789 - protein, 151 aa, Zea mays subsp. mays
  peptide (1)..(151): Ceres Seq. ID no. 4613297
MRGEPPGGAWVVPGMSCNGCRVLRKGCSDACVLRPCLQWIDGAEAQGHATVFVAKFFGRAGLMSFLTAVPEPQRPAVFQSLMYEAAGRTINPVSGAVGLLGAGSWQLCQAAVETVLRGGAIGPLPEFDGGRDNTFALAATARRAVGCSTFS

SEQ ID NO: 18790 - protein, 137 aa, Zea mays subsp. mays
  peptide (1)..(137): Ceres Seq. ID no. 4613298
MSCNGCRVLRKGCSDACVLRPCLQWIDGAEAQGHATVFVAKFFGRAGLMSFLTAVPEPQRPAVFQSLMYEAAGRTINPVSGAVGLLGAGSWQLCQAAVETVLRGGAIGPLPEFDGGRDNTFALAATARRAVGCSTFS

SEQ ID NO: 18791 - DNA, 1830 bp, Zea mays subsp. mays
  misc_feature (1)..(1830): Ceres Seq. ID no. 12376720
  misc_feature (1)..(1830): Ortholog of  Ceres SEQ ID NO 13593855 as cited in SEQ ID NO 53838
  misc_feature (1)..(1830): Ortholog of  Ceres SEQ ID NO 14302247 as cited in SEQ ID NO 62154
  misc_feature (1)..(1830): Ortholog of  Ceres SEQ ID NO 13539874 as cited in SEQ ID NO 64069
gcacgagaccattacctagaacatcctaatcaaaaagcgtactgccaccgcaatcgtctcgtttcatacagggcagggaagtcaggaggaagatgatgcagcaggagccctggaacgccgccgccgccatggggctcctccgcccgaccaagtcggctccctgctcgcccatcaagccgccgccggcgaccatgctgcggactcacttccacgtcgcgcacaaggtgccggtcggcgacacgccctacgtgcgagccaagcgcgtccagctggtggacaaggatccggagaaggcgatcgcgctgttctggagtgcgatcaacgccggagaccgcgttgacagcgcgctcaaggacatggccatcgtgatgaagcagcagaaccgcgccgaggaggccatcgaggccatcaagtcgctgcgcagccgatgctccgaccaggcgcaggagtccctcgacaacatcctcctcgatctctacaagagatgcgggcggctggacgaccaaatctcgctgctcaagcacaagctgcagctgatcaaccagggccacgccttcaacggcaagcggaccaaaacggctcgctctcagggccgcaagttccaggtcaccctggagcaagaagccaccaggctccttggtaacctggggtgggcgctgatgcagaaggagaactacacggaagcggagggagcgtaccgtcgggcgctgctcatcgggccggacaacaacaagatgtgcaatcggcatctgccttatgaagcaggcccgcgtgctcgaggccaaggatgtgctcaagcaggtacgccccgcggcggttgatggtctgcgcggcgccgactctcacctcaaggcctacgagcgagcgcaggagatgctgcgggacctcgagaccaagctcatcggccgcccgcgcgctgaccagctcgacacgaactggctcttcgatgcgctgctgctgggatcgtcctcaagcatctggcagccgcagccgtgcaccgatcacttgctgccacctcctgttccggctccagccacggcgccgcgcggccacttcgccgatgaaaacgccggtgtgagcaagaagctggcggtgctccaggagaacatgcttaatgtggacgcgcagcccttctactctttgcgggtgtcgtcgctcgcagccaagtcacataacacgctgcctcagcggcaacagcagcagaagccagctcctgtccatgatcccctgggcaacctgaagagaacacggtccggcaattgcatggacaaggcaggagcagtggtgttcaaggagcagagcatcgacgagaacagcggcaggaggaagtcgctgtcagctgaggacaggtggccagagctacccgaccacagcgcgttcgatgaggccctcgtcgcggccgtcctggctccagtgctcgacgacgaaccaacagctactgaagtcaagctgccggcgagctgcggcacgagtccagcggtgaaggaaaagatcggcaagaggctgaggattttccaggacatcacacagacagtgaacagtttctgattcgttttggttttcttcaatttcctactcacaaattaatcagggaaggagaaagggcttgttctcctgggagctaaattaatcagggattcgattcgatttttaatttgatgctgattttaatttaatttattaacacacaaaaataacagctgattcgcttcttcagcttgacactttagaagcgcgcgcttcctttaccgcaagattctcctcgtaatagaagtggactgcatcttgttctaatttcatttcttttgaaataacaaagttcatttgtgg

SEQ ID NO: 18792 - protein, 263 aa, Zea mays subsp. mays
  peptide (1)..(263): Ceres Seq. ID no. 12376721
MKQARVLEAKDVLKQVRPAAVDGLRGADSHLKAYERAQEMLRDLETKLIGRPRADQLDTNWLFDALLLGSSSSIWQPQPCTDHLLPPPVPAPATAPRGHFADENAGVSKKLAVLQENMLNVDAQPFYSLRVSSLAAKSHNTLPQRQQQQKPAPVHDPLGNLKRTRSGNCMDKAGAVVFKEQSIDENSGRRKSLSAEDRWPELPDHSAFDEALVAAVLAPVLDDEPTATEVKLPASCGTSPAVKEKIGKRLRIFQDITQTVNSF

SEQ ID NO: 18793 - protein, 242 aa, Zea mays subsp. mays
  peptide (1)..(242): Ceres Seq. ID no. 12376722
MMQQEPWNAAAAMGLLRPTKSAPCSPIKPPPATMLRTHFHVAHKVPVGDTPYVRAKRVQLVDKDPEKAIALFWSAINAGDRVDSALKDMAIVMKQQNRAEEAIEAIKSLRSRCSDQAQESLDNILLDLYKRCGRLDDQISLLKHKLQLINQGHAFNGKRTKTARSQGRKFQVTLEQEATRLLGNLGWALMQKENYTEAEGAYRRALLIGPDNNKMCNRHLPYEAGPRARGQGCAQAGTPRGG

SEQ ID NO: 18794 - protein, 241 aa, Zea mays subsp. mays
  peptide (1)..(241): Ceres Seq. ID no. 12376723
MQQEPWNAAAAMGLLRPTKSAPCSPIKPPPATMLRTHFHVAHKVPVGDTPYVRAKRVQLVDKDPEKAIALFWSAINAGDRVDSALKDMAIVMKQQNRAEEAIEAIKSLRSRCSDQAQESLDNILLDLYKRCGRLDDQISLLKHKLQLINQGHAFNGKRTKTARSQGRKFQVTLEQEATRLLGNLGWALMQKENYTEAEGAYRRALLIGPDNNKMCNRHLPYEAGPRARGQGCAQAGTPRGG

SEQ ID NO: 18795 - DNA, 1055 bp, Zea mays subsp. mays
  misc_feature (1)..(1055): Ceres Seq. ID no. 12367864
  misc_feature (1)..(1055): Ortholog of  Ceres SEQ ID NO 14303137 as cited in SEQ ID NO 53594
  misc_feature (1)..(1055): Ortholog of  Ceres SEQ ID NO 13585454 as cited in SEQ ID NO 65280
  misc_feature (1)..(1055): Ortholog of  Ceres SEQ ID NO 14307889 as cited in SEQ ID NO 67245
accgtcgtcctcttcttcctcctcgccctcgtcgcggagcggagtggaggcgcgcgttccgggacggcacgggacaggagcggaggaagctcatctgggtgttggcctcatcccctgcacaagctgaggaatggggcaaaaggactccaagccttcaaatggatatggctactcttctgattacgggggtacttcatcgggatataacttgagaaatactggaagtacgtcctccagttatggcgcgaggtatgtgccttcttcagagaacaatgtacagccagaaacacatgccaggttgcagaggaagtattccaggattggtgatgactatcgttctctgagtcaggtgactgaagctttggcgcaagcaggccttgaatcttcaaatcttatcgtaggcattgattttacaaagagcaatgaatggacaggtaaaatttcatttaatcgccgctgcctacatgatattggaaacactccgaacccatatgagcaagctatatctattattggaaggacactttcagtatttgatgaagataacttgattccctgctttggatttggtgacgcatcaactcatgatcaggaggtattcagcttttacccagagaaccgcccatgcaacggatttgaagaggcactagacagatacagagaaatcgttccaactcttcgattagcaggacctacatctttcgctccgatgatcgagacagcaattggaattgttgacagcactggtggtcaatatcatgttcttctgataatcgcagatggacaggttacccgaagtgtcgatacacaatctggacaattgagtccacaggagcgggatactatagatgcaatagtaagagcaagccagttccccctgtcaattgttcttgttggggttggtgatggaccatgggacatgatgcaccagtttgatgacaatatacctgctcggtcatttgacaatttccagtttgtgaacttcacggagattatgtcaaagagcatagcagctgacagaaaggaggcagaatttgcattgtcagcgctgatgg

SEQ ID NO: 18796 - protein, 308 aa, Zea mays subsp. mays
  peptide (1)..(308): Ceres Seq. ID no. 12367865
MGQKDSKPSNGYGYSSDYGGTSSGYNLRNTGSTSSSYGARYVPSSENNVQPETHARLQRKYSRIGDDYRSLSQVTEALAQAGLESSNLIVGIDFTKSNEWTGKISFNRRCLHDIGNTPNPYEQAISIIGRTLSVFDEDNLIPCFGFGDASTHDQEVFSFYPENRPCNGFEEALDRYREIVPTLRLAGPTSFAPMIETAIGIVDSTGGQYHVLLIIADGQVTRSVDTQSGQLSPQERDTIDAIVRASQFPLSIVLVGVGDGPWDMMHQFDDNIPARSFDNFQFVNFTEIMSKSIAADRKEAEFALSALM

SEQ ID NO: 18797 - DNA, 947 bp, Zea mays subsp. mays
  misc_feature (1)..(947): Ceres Seq. ID no. 12633396
  misc_feature (1)..(947): Ortholog of  Ceres SEQ ID NO 13599983 as cited in SEQ ID NO 573
aagtaaaatgataagacgtgttgtagcctgcaagacgcggcaaatttatcttgtttgagtgagcagctgacgtcaacatcgtccactgcatgctctgaaaccgtagaatgtacctccagccatcagaaacggtcacatgctagtgcaaggtccaaagatgacacccagtcctccggaaacaagcacaaggtcgacggagcccgtgtcggtgctggcacaggtgcaccttcttgcagcgccgacgttccaaagtctgatccgagcccttccacggatgctaagttggtagcgacccagcctgccagtattcgcgcaacggacctgatggaagctaccgttccgcgttgggatgatgtagacgtgccaaatataaaggtcgctgagccgcagtccaaacgcaagagcggtggctacatcttagatgagtgggacgaggagtacgaccgagggaagacgaagaaggtgcggaggtcaaagcaagactttggcgggccaaacccgttccaggaggaggcggactacgtatcgcagcggaggacgaagcagaaatcctaccgaggcaagtcttggaacaagcgggcctaacacggtagagaggggggagttgagagaatacgcgcgcgagagagagaatccccggacgcacatgctgtttgttgttacgttttagcacccattggtgagggagatttacgttaaaaaccatccgttgtcggtagtccccattagctgtcgaagttatgacgttttgggcagttttcgtagaacatttgaaacatttgttcggttgtaacggagtgctgtttagttgagttggggggaacaaaattggcgagactattttgctgcattctgctctgctgtttagttactgatgaagaataaaacgatggtggtgatcagttttatgattcagtgcttgccaatgcgatctttatccttttggg

SEQ ID NO: 18798 - protein, 86 aa, Zea mays subsp. mays
  peptide (1)..(86): Ceres Seq. ID no. 12633397
MEATVPRWDDVDVPNIKVAEPQSKRKSGGYILDEWDEEYDRGKTKKVRRSKQDFGGPNPFQEEADYVSQRRTKQKSYRGKSWNKRA

SEQ ID NO: 18799 - protein, 82 aa, Zea mays subsp. mays
  peptide (1)..(82): Ceres Seq. ID no. 12633398
MSGTRSTTEGRRRRCGGQSKTLAGQTRSRRRRTTYRSGGRSRNPTEASLGTSGPNTVERGELREYARERENPRTHMLFVVTF

SEQ ID NO: 18800 - protein, 50 aa, Zea mays subsp. mays
  peptide (1)..(50): Ceres Seq. ID no. 12633399
MLVQGPKMTPSPPETSTRSTEPVSVLAQVHLLAAPTFQSLIRALPRMLSW

SEQ ID NO: 18801 - DNA, 1270 bp, Zea mays subsp. mays
  misc_feature (1)..(1270): Ceres Seq. ID no. 12375639
  misc_feature (1)..(1270): Ortholog of  Ceres SEQ ID NO 14302396 as cited in SEQ ID NO 66907
  misc_feature (1)..(1270): Ortholog of  Ceres SEQ ID NO 13496281 as cited in SEQ ID NO 69175
gcacgagaccattacctagaacatcctaatcaaaaaaaccgcgagcgcctccgcatttcgaaccaaagggggcagaactgagagatcgagagaaataataaaaaaaaatccgtcttcttgtggtcttctccaaaccctagcgcccccggccccggtctccgcccccccgccttcgccgtcgcggtcgcgccccatggcggggaagtcgcgaccgcccaagcggatcctcgagtcctataccatcaagggttcggacagagtcatcaagcctggcgattgcgtgctaatgagggcatctgatgcttcaaagccaccttatgtggcaagagttgaggcaattgaagcagcaggatctcgaggcaccaatgtgagagtacgagtgcggtggtattatcgaccagaggagtccataggtggtcggcggccatttcatggttccaaggaggttttcctctctgaccactatgatgtacaaagtgctgacaccattgaggggaaatgcaatgtccacagcttccgtagctatacaaagcttgattctgtcaatgctgaggatttcttctgccgcttcgagtataaatcagctactggcagctttgtaccagatcgtatagcagtgttttgcaagtgcgagatgccatacaatccagatgaccttatgatccaatgcgaggaatgttctgactggtttcaccctgcttgcattgggatgacaatcaaagaagcaaagaaactcgagcattttttctgccagacctgtacagctgaaaatggtaagatggttgagaattcacatgaagctacagcgcaatcagaagaaaagccggtggagtcaaaaaggcggcgaaggtgatggccgtgctgattaaatttatgaaatctatgctcggttgtacaaagccttcccacgtttcacgtttgagaactgtaattttattgttcgtcgcagtttgtggtcctgggctggggtccctctaatgtcaggcacactgtatatagcttgtaacctggtcagattgttgtattagagcacactagggtttgtgtgatagcacggaagttcggactactgagtatgtgtagagtatggcattataatgccagcatcaggtgatcaggcttcttctgggcattaggactcctgcatgatccagcaataatacttccatgcagctggacctggttagtcactagtaagttgtcaggaaacttagtactgccatgtgaactttttttgaaaccctctatgtaatgtaagcatctgtgtcct

SEQ ID NO: 18802 - protein, 219 aa, Zea mays subsp. mays
  peptide (1)..(219): Ceres Seq. ID no. 12375640
MAGKSRPPKRILESYTIKGSDRVIKPGDCVLMRASDASKPPYVARVEAIEAAGSRGTNVRVRVRWYYRPEESIGGRRPFHGSKEVFLSDHYDVQSADTIEGKCNVHSFRSYTKLDSVNAEDFFCRFEYKSATGSFVPDRIAVFCKCEMPYNPDDLMIQCEECSDWFHPACIGMTIKEAKKLEHFFCQTCTAENGKMVENSHEATAQSEEKPVESKRRRR

SEQ ID NO: 18803 - protein, 188 aa, Zea mays subsp. mays
  peptide (1)..(188): Ceres Seq. ID no. 12375641
MRASDASKPPYVARVEAIEAAGSRGTNVRVRVRWYYRPEESIGGRRPFHGSKEVFLSDHYDVQSADTIEGKCNVHSFRSYTKLDSVNAEDFFCRFEYKSATGSFVPDRIAVFCKCEMPYNPDDLMIQCEECSDWFHPACIGMTIKEAKKLEHFFCQTCTAENGKMVENSHEATAQSEEKPVESKRRRR

SEQ ID NO: 18804 - DNA, 1270 bp, Zea mays subsp. mays
  misc_feature (1)..(1270): Ceres Seq. ID no. 12366459
  misc_feature (1)..(1270): Ortholog of  Ceres SEQ ID NO 14310097 as cited in SEQ ID NO 20591
gcacgagaccattacctagaacatcctaatcgaaaacgatatgcggacacctgttcggaagtatcttgtgcagatactatccggagtcgaaataagccactgaaatcgacacaacgaaagccaccgcaacttcatacagcaaatagagctaggccaccaagtgtgaaaagttctcaggaacttgaactggaggagctggagaaggcccccaagttcagggccaagccactaaacaaaaagattcttgagagtaagggagacattggagtgtttgtccatcctaagtctcaggtcacagctcccaaagaattccgtttttgtaccgatgttcgcttgggtcctccatcagttgctgacttatttgacaagctctctcttcactctgaatgttcttcaaacagtaacaggcaaggtgtgcctagatgcaccataccaaaccctttcagtctacaaacagaggaaagaggtcaattaaaagagaggcagctagaagcacaactcttacaaaagaaggtggaggaggaaaaggccagggttcacaaagctaacccttacccatacaccacagactatccgatggtgccgccgaagcctgaacctaagccctgtacgagaccagaaggctttcaactagagagtttggtgagacacgaattagagcagcaaaggctgatggaagaaaggcagagaatggagagagaagaagctcagaggagaatcgtcaaagctcaacctgtactgaaagaggaccctatcccacttccggagaaagagcggaaacctctcactgaagttcaacaatttgtgttgcatgttgatgagagggctgtgcatagatcagaatttgatagcatgataaaagagaaagaaaagacttacaaaaggttgagagaggagaacgaattcgcgcaaaagattgaggaggagaaggcgctgaagcagctgaggagaaccatggtgccacatgcccggcaggtccccaagtttgacaaaccattccgaccacagaaatcgacgaagcaggtgacaagaccgaagtcgccacagcttcaggtggatgagcgaggggcgaggaggcatgctttaatcagatgaccaccatcctcgcctcaagatctctgcgacgttgtttatgtatctgttcgtcgggctactaagattcttttttcgctgaccaatttgtagagcaggccagcaacccattgccgctgctgtgtgtgtaggttggtgatgttttatgattatctcaatgatgacactttttaatcgg

SEQ ID NO: 18805 - protein, 364 aa, Zea mays subsp. mays
  peptide (1)..(364): Ceres Seq. ID no. 12366460
ARDHYLEHPNRKRYADTCSEVSCADTIRSRNKPLKSTQRKPPQLHTANRARPPSVKSSQELELEELEKAPKFRAKPLNKKILESKGDIGVFVHPKSQVTAPKEFRFCTDVRLGPPSVADLFDKLSLHSECSSNSNRQGVPRCTIPNPFSLQTEERGQLKERQLEAQLLQKKVEEEKARVHKANPYPYTTDYPMVPPKPEPKPCTRPEGFQLESLVRHELEQQRLMEERQRMEREEAQRRIVKAQPVLKEDPIPLPEKERKPLTEVQQFVLHVDERAVHRSEFDSMIKEKEKTYKRLREENEFAQKIEEEKALKQLRRTMVPHARQVPKFDKPFRPQKSTKQVTRPKSPQLQVDERGARRHALIR

SEQ ID NO: 18806 - DNA, 1517 bp, Zea mays subsp. mays
  misc_feature (1)..(1517): Ceres Seq. ID no. 12375635
  misc_feature (1)..(1517): Ortholog of  Ceres SEQ ID NO 14308803 as cited in SEQ ID NO 55038
gcacgagaccattacctagaacatcctaatcgaaaaatcattcatctatctgatctcatctcctatcttccctctctctcctccccgtcgtctgcctcctttgcccggcaagaccgcctgcccatgtccgtggcgccgtgcaatccgcttcttcagcgcagctccgatccgccaacgccgcccaaggagccgggatcggccgagagagcgtgctgacgagaggcaggcagcggaacagagcagcggcccgcaaggcgattgctctattctgccctgttccagcgttccatgcatggatgccaaggaactcatctcacagtccgacctgcagtcgttctaccagcagcaacaacagcagcaccgtgccttcggcggccaccatagcccgtcctcgctggctgggatgcactccgtcatccgacccatgcccaacatgaatatgagcccaactgctatccttaactccatcagcgggggttccctcgccggcatgcagttccagatggacccgcccccaccattgctgcacaagatcaacgccaccggcgctgtcacaccggcccctgcggagcctctcaagcgcaaacgaggaaggccgcgcaaatacggacctgatggcaccatgaggcaacaacaacaacagcaacaggccgcgtcatcgcagcagcagcagcagcagctcgtcgctacacaaccgaggatatgttctctatcatcgggtcccgacatgctcggcagctccggtatggaggaccccgcgcagaagaagcggcgcggccggccgccgggcaccggcaagaagcaccagccctcgacctcacaaggcaacgcgttcgccggttcggctggaacgaacttcactccgcacatcatcacggcgtctccttcagaggacgtggcggcgaagatcgttgcgttcgccagccagtcgtcaaaggcgatgtgcgtcctctcggcgatgggttccgtctccagggccgtcctccgccacccggccgacggctctcccatggcgagggttcacgcgtcgccgcagccgtacaagaaccctgctgtctacgagggtttctacgagatcctgagcctaaccggctcgtacaacctggcacacggcggcggcctcagcgtcacgctctgcagccctgagaggaacgtgatcggaggcgttctgggcggcccactggtagctgcaggcaccgtgcaggtggttctggggagttttcaccagggagggtcgagatccaagtccaagaaagccgggaagcagcagcaggcggcggccttcagccccgactcgctcaccggcggccaggaggcgtcgccccagctccgggcacaaccaaaatctaacgccgccgccctccgtgacgggagggtggcccacctccggcatatttgacaccagaagttccagcattgatatcaactcgtctagaggctagctcattcgtcgatatagttccagctcgacagaaattttctgttttcgcacaagaatacccaaaaaccatacttcc

SEQ ID NO: 18807 - protein, 368 aa, Zea mays subsp. mays
  peptide (1)..(368): Ceres Seq. ID no. 12375636
MDAKELISQSDLQSFYQQQQQQHRAFGGHHSPSSLAGMHSVIRPMPNMNMSPTAILNSISGGSLAGMQFQMDPPPPLLHKINATGAVTPAPAEPLKRKRGRPRKYGPDGTMRQQQQQQQAASSQQQQQQLVATQPRICSLSSGPDMLGSSGMEDPAQKKRRGRPPGTGKKHQPSTSQGNAFAGSAGTNFTPHIITASPSEDVAAKIVAFASQSSKAMCVLSAMGSVSRAVLRHPADGSPMARVHASPQPYKNPAVYEGFYEILSLTGSYNLAHGGGLSVTLCSPERNVIGGVLGGPLVAAGTVQVVLGSFHQGGSRSKSKKAGKQQQAAAFSPDSLTGGQEASPQLRAQPKSNAAALRDGRVAHLRHI

SEQ ID NO: 18808 - protein, 331 aa, Zea mays subsp. mays
  peptide (1)..(331): Ceres Seq. ID no. 12375637
MHSVIRPMPNMNMSPTAILNSISGGSLAGMQFQMDPPPPLLHKINATGAVTPAPAEPLKRKRGRPRKYGPDGTMRQQQQQQQAASSQQQQQQLVATQPRICSLSSGPDMLGSSGMEDPAQKKRRGRPPGTGKKHQPSTSQGNAFAGSAGTNFTPHIITASPSEDVAAKIVAFASQSSKAMCVLSAMGSVSRAVLRHPADGSPMARVHASPQPYKNPAVYEGFYEILSLTGSYNLAHGGGLSVTLCSPERNVIGGVLGGPLVAAGTVQVVLGSFHQGGSRSKSKKAGKQQQAAAFSPDSLTGGQEASPQLRAQPKSNAAALRDGRVAHLRHI

SEQ ID NO: 18809 - protein, 324 aa, Zea mays subsp. mays
  peptide (1)..(324): Ceres Seq. ID no. 12375638
MPNMNMSPTAILNSISGGSLAGMQFQMDPPPPLLHKINATGAVTPAPAEPLKRKRGRPRKYGPDGTMRQQQQQQQAASSQQQQQQLVATQPRICSLSSGPDMLGSSGMEDPAQKKRRGRPPGTGKKHQPSTSQGNAFAGSAGTNFTPHIITASPSEDVAAKIVAFASQSSKAMCVLSAMGSVSRAVLRHPADGSPMARVHASPQPYKNPAVYEGFYEILSLTGSYNLAHGGGLSVTLCSPERNVIGGVLGGPLVAAGTVQVVLGSFHQGGSRSKSKKAGKQQQAAAFSPDSLTGGQEASPQLRAQPKSNAAALRDGRVAHLRHI

SEQ ID NO: 18810 - DNA, 1683 bp, Zea mays subsp. mays
  misc_feature (1)..(1683): Ceres Seq. ID no. 12362573
  misc_feature (1)..(1683): Ortholog of  Ceres SEQ ID NO 14302216 as cited in SEQ ID NO 66456
aacagctcaccacggcgcagcaaccgcagcccacgcaggcgacgaaaagctgccgaaccaccagcagaggagagcgagggaccgcgcaaccgagccactccctagtccctccttctccctctctctctcttcgcctccggatctcgcatgcgcggtggccaccgccgcgcccgacggtggagggtgaggagttagcgaggggccctgaccctgagtgctggacggcggcgtgatggggggagcgcagctggtggggagatgggtggagtcgtacacggggatgtcgacggacaacatcaagggcctgctgctcgcgctctcctccagcctcttcatcggtgccagcttcatcgtgaagaagaaggggctcaagaaggccgccgcgtccggcgtccgagcaggcgttggtggctactcatacttgcttgagccactgtggtgggcaggaatggtaacaatgattgttggcgaaatcgctaactttgcagcttatgcatttgctcctgctatcttagtcactccacttggtgcacttagcataattatcagtgctgttcttgcccatataatgttgcgggagaaacttcatacatttggtatacttggctgtattctttgtgtggtcggttcgacaacaattgtgcttcatgcccctccagagcgtcaaattgagtctgtggcagaagtgtgggatcttgcgactgaaccagcattcctgtgctatgcagctgttgtgcttgcagcagcttttgtgctcatattccattttgtccctgagtatggtcagacacatatcatggtatatgttggcatatgttctcttgtgggatctttatcggtcatgagtgtcaaagctcttgggatagccttgaagctgacattttctgggatgaaccagctagtctatccacaaacatgggtgttctcatccgttgtaaccttatgcattgtaacacagatgaactatctgaacaaggccctcgacacattcaacactgcagttgtttcacccatatattacacaatgtttacatccttgaccatcttggctagtgtaataatgttcaaggattgggatcgtcaaaatccaacacaaattgtaaggagatgtgcggcttcgttacaatcctttctggaacttttcttcttcacaagacaaaggatatggtggatggtctcccaccaaatttaccgattcggcttcctaaacatgcggatgaggacggctacgctgctgaaggaattcctctcagatccgctgctgacggtattccgctcaggtcaccaagggctacagattcatttcgctcgtcatgatgccccgctgagatttgcatgcgcactcaaatcgtgtcacttgaaggctcatacccagcaggcgtcagtcctatatatacatgggaagggaaagataaccctccattcactcggttggatacacaacgtaggtttagctgtaggattcaaaaggtaacagctcggctgcccccttgtaaattctgaggcattggtacagaattttgaggattatatcagttatactcgtccgggtaagatcaccaggatgaccaagagcccaagtttttgggttgtatacttgtatgtatattgcggtgagccatataggtcactatcttgaattgctgtattttttcaacacaactctcagagtacaggatgttg

SEQ ID NO: 18811 - protein, 413 aa, Zea mays subsp. mays
  peptide (1)..(413): Ceres Seq. ID no. 12362574
MGGAQLVGRWVESYTGMSTDNIKGLLLALSSSLFIGASFIVKKKGLKKAAASGVRAGVGGYSYLLEPLWWAGMVTMIVGEIANFAAYAFAPAILVTPLGALSIIISAVLAHIMLREKLHTFGILGCILCVVGSTTIVLHAPPERQIESVAEVWDLATEPAFLCYAAVVLAAAFVLIFHFVPEYGQTHIMVYVGICSLVGSLSVMSVKALGIALKLTFSGMNQLVYPQTWVFSSVVTLCIVTQMNYLNKALDTFNTAVVSPIYYTMFTSLTILASVIMFKDWDRQNPTQIVRRCAASLQSFLELFFFTRQRIWWMVSHQIYRFGFLNMRMRTATLLKEFLSDPLLTVFRSGHQGLQIHFARHDAPLRFACALKSCHLKAHTQQASVLYIHGKGKITLHSLGWIHNVGLAVGFKR

SEQ ID NO: 18812 - protein, 397 aa, Zea mays subsp. mays
  peptide (1)..(397): Ceres Seq. ID no. 12362575
MSTDNIKGLLLALSSSLFIGASFIVKKKGLKKAAASGVRAGVGGYSYLLEPLWWAGMVTMIVGEIANFAAYAFAPAILVTPLGALSIIISAVLAHIMLREKLHTFGILGCILCVVGSTTIVLHAPPERQIESVAEVWDLATEPAFLCYAAVVLAAAFVLIFHFVPEYGQTHIMVYVGICSLVGSLSVMSVKALGIALKLTFSGMNQLVYPQTWVFSSVVTLCIVTQMNYLNKALDTFNTAVVSPIYYTMFTSLTILASVIMFKDWDRQNPTQIVRRCAASLQSFLELFFFTRQRIWWMVSHQIYRFGFLNMRMRTATLLKEFLSDPLLTVFRSGHQGLQIHFARHDAPLRFACALKSCHLKAHTQQASVLYIHGKGKITLHSLGWIHNVGLAVGFKR

SEQ ID NO: 18813 - protein, 341 aa, Zea mays subsp. mays
  peptide (1)..(341): Ceres Seq. ID no. 12362576
MVTMIVGEIANFAAYAFAPAILVTPLGALSIIISAVLAHIMLREKLHTFGILGCILCVVGSTTIVLHAPPERQIESVAEVWDLATEPAFLCYAAVVLAAAFVLIFHFVPEYGQTHIMVYVGICSLVGSLSVMSVKALGIALKLTFSGMNQLVYPQTWVFSSVVTLCIVTQMNYLNKALDTFNTAVVSPIYYTMFTSLTILASVIMFKDWDRQNPTQIVRRCAASLQSFLELFFFTRQRIWWMVSHQIYRFGFLNMRMRTATLLKEFLSDPLLTVFRSGHQGLQIHFARHDAPLRFACALKSCHLKAHTQQASVLYIHGKGKITLHSLGWIHNVGLAVGFKR

SEQ ID NO: 18814 - DNA, 990 bp, Zea mays subsp. mays
  misc_feature (1)..(990): Ceres Seq. ID no. 12375677
  misc_feature (1)..(990): Ortholog of  Ceres SEQ ID NO 14303097 as cited in SEQ ID NO 66460
  misc_feature (1)..(990): Ortholog of  Ceres SEQ ID NO 15226238 as cited in SEQ ID NO 68840
  misc_feature (1)..(990): Ortholog of  Ceres SEQ ID NO 12635175 as cited in SEQ ID NO 0
  misc_feature (1)..(990): Ortholog of  Ceres SEQ ID NO 14306100 as cited in SEQ ID NO 0
cttcgatcggtccatggctgtcgtcacgagggacgcggcgtgcctgcccctcgtcctcttgctcctagtcttctccgcggccccgtctccggctgacggctgcgaccgctgcgtgcgccggtccaaggccacctactaccaggcctcctcgctcgccctcaacgccgggtcgtgcgggtacggctccttggccgcgtccctcaacggcggcctgctcgccgcagccagccccgagctgtacaggggcggcgtcggctgcggcgcctgcttccaggtgcggtgcagggacagcgagctgtgcagcgccgccggcgccaaggtggtggtgacggaccaggcgcggacgtcgaaccgcacggcgctggtgctgagcgccgcggcgtacgcggccatggccagtgccggcaaggccgcgcgcctcagggaccggcgcgtcgtcgacgtcgagtacaagagggtaccctgcgagtacgcgaaggaccgcaacctgttgatacgcgtggaggagaagagccggccgccaagcaacctgtccatcaggttcctgtaccagggcggccagaccgacatcgtcgccgtcgacgtcgccaccgtggggtcgtccaactggcggttcatggcgcgggaccacgggccggcgtggagcacggcgcaggcgccgccggggccgctgcagttccggctggtggtgaccggtggctacgacggcaagtgggtgtgggcggagtcggaggtgctgccgcgccggtgggaggccggccgcgtctacgacgccggggtgcaggtctccgacgtcgcgcaggaagggtgctacccctgcgacacgcgcgagtggcagtgacgtgacgcgcgcacgggctggattgtagtagattgtacagttttttttttttggtcgggaatgggacgaaagatatgaaatgatgatgagcggagccggagagccgaatcaaaccaaatcaaacaaacgtgccgttgcaagttggttct

SEQ ID NO: 18815 - protein, 279 aa, Zea mays subsp. mays
  peptide (1)..(279): Ceres Seq. ID no. 12375678
FDRSMAVVTRDAACLPLVLLLLVFSAAPSPADGCDRCVRRSKATYYQASSLALNAGSCGYGSLAASLNGGLLAAASPELYRGGVGCGACFQVRCRDSELCSAAGAKVVVTDQARTSNRTALVLSAAAYAAMASAGKAARLRDRRVVDVEYKRVPCEYAKDRNLLIRVEEKSRPPSNLSIRFLYQGGQTDIVAVDVATVGSSNWRFMARDHGPAWSTAQAPPGPLQFRLVVTGGYDGKWVWAESEVLPRRWEAGRVYDAGVQVSDVAQEGCYPCDTREWQ

SEQ ID NO: 18816 - protein, 275 aa, Zea mays subsp. mays
  peptide (1)..(275): Ceres Seq. ID no. 12375679
MAVVTRDAACLPLVLLLLVFSAAPSPADGCDRCVRRSKATYYQASSLALNAGSCGYGSLAASLNGGLLAAASPELYRGGVGCGACFQVRCRDSELCSAAGAKVVVTDQARTSNRTALVLSAAAYAAMASAGKAARLRDRRVVDVEYKRVPCEYAKDRNLLIRVEEKSRPPSNLSIRFLYQGGQTDIVAVDVATVGSSNWRFMARDHGPAWSTAQAPPGPLQFRLVVTGGYDGKWVWAESEVLPRRWEAGRVYDAGVQVSDVAQEGCYPCDTREWQ

SEQ ID NO: 18817 - protein, 149 aa, Zea mays subsp. mays
  peptide (1)..(149): Ceres Seq. ID no. 12375680
MASAGKAARLRDRRVVDVEYKRVPCEYAKDRNLLIRVEEKSRPPSNLSIRFLYQGGQTDIVAVDVATVGSSNWRFMARDHGPAWSTAQAPPGPLQFRLVVTGGYDGKWVWAESEVLPRRWEAGRVYDAGVQVSDVAQEGCYPCDTREWQ

SEQ ID NO: 18818 - DNA, 528 bp, Zea mays subsp. mays; identical to SEQ ID NO: 11689
  misc_feature (1)..(528): Ceres Seq. ID no. 13492510
  misc_feature (1)..(528): Ortholog of  Ceres SEQ ID NO 14308813 as cited in SEQ ID NO 55485
  misc_feature (1)..(528): Ortholog of  Ceres SEQ ID NO 13655744 as cited in SEQ ID NO 64032
  misc_feature (1)..(528): Ortholog of  Ceres SEQ ID NO 13590394 as cited in SEQ ID NO 66581

SEQ ID NO: 18819 - protein, 175 aa, Zea mays subsp. mays; identical to SEQ ID NO: 11690
  peptide (1)..(175): Ceres Seq. ID no. 13492511

SEQ ID NO: 18820 - protein, 156 aa, Zea mays subsp. mays; identical to SEQ ID NO: 11691
  peptide (1)..(156): Ceres Seq. ID no. 13492512

SEQ ID NO: 18821 - protein, 143 aa, Zea mays subsp. mays; identical to SEQ ID NO: 11692
  peptide (1)..(143): Ceres Seq. ID no. 13492513

SEQ ID NO: 18822 - DNA, 1643 bp, Zea mays subsp. mays
  misc_feature (1)..(1643): Ceres Seq. ID no. 12368456
  misc_feature (1)..(1643): Ortholog of  Ceres SEQ ID NO 13592961 as cited in SEQ ID NO 20522
  misc_feature (1)..(1643): Ortholog of  Ceres SEQ ID NO 12583469 as cited in SEQ ID NO 51031
  misc_feature (1)..(1643): Ortholog of  Ceres SEQ ID NO 13595998 as cited in SEQ ID NO 68161
gcacgagaccattacctagaacatcctaatcgaaaagcttgcttcaggcacttgagagttgagactcactcagtcactagcaagtgcctcgtcacatggcagcggcagcgctagcggcgtggtggtggtctctgtcgctcctggctaccatcgtcggcggaggcagcgcctcaccgtcaccggtgcccggctgctacacgcgcatcttcagcttcggcgactcgctgaccgacacgggcaactacgtccacctgacggcgagcagccacagcccctacggcgcgccgccgtacgggaggacgttcttcggcaaacctaccggccgcgccagcgacggacgcctcgtcatcgacttcatcgcggaagagttcgggctggcgaaggtgacggcgatccaggcgggcacggcgccaggggacttccagaacggcgccaacttcgccatcatctcggccaccgccaacaacggctccttcttcgcgggcaacggcatggacatcaggcccttctcgctggacacgcagatgctgtggttcaggacccacctccgcgagctcgtgcaggcggcggcggcggcacagcagaacggcagcgtgggcgcgctgctgagcggcgcgctggtggcgctgggcgagatcggagggaacgactacaacttcgccttctcgcggggcgtgccgcgggacgcggtgcgcaggttcgtgccggccgtggtggacaagctggcgggcgccatggaggagctcatcgccatgggggcgcgcgccttcgtggtgcccgggaacctacccttcggctgcacgccgctgtacctgcagcggttccgcgccaacggcgggtggtgggactacgacccggccacgggctgcctcgcctggttcaaccgcttcgcccagtaccacaaccgggtgctcgcggcgcgcctcgacaggctccggcgcctgcacccggacgtgaccatcgtctacgccgactggtacgaggccacgatgagcatcttccaggaccccgggaagctagggttcacaaacgctctgcggacttgctgcgggaaccagaccgtgccgtgtggcaggcccgggtgctccgtctgcaaggacccgtccacgtacgggtcctgggacgggacgcacccgacggaggcggtgtacaaggtgatcgccgacggggtgctgcacgggccgcacgcgtcccctgttcctctcgccgacacctgtcctccgacatgacccttagaagatttataattggcagctttaagagcggtggtaacatctgaatcgtacttgcgtgattttaaggatggcacgataatagctttgtttaagaatacaggtgaggttggcatatttcgatagcataagcatacacacgaagctctgaagtgataattgagtttgtataaacatcatcattgatttagggggtgtttggttagagggactaaagattagtctctagtttttagtctcttttagtctcttttttaccaaacattaggactaaaatatgaactaaaatgatttagtctgtagtccttcacatatgtgctaaaagggactaaaccatattaattccacatttaccctttatttagttcaattgtactaatagtaggagaatgttaaaggctattttagtct

SEQ ID NO: 18823 - protein, 377 aa, Zea mays subsp. mays
  peptide (1)..(377): Ceres Seq. ID no. 12368457
MAAAALAAWWWSLSLLATIVGGGSASPSPVPGCYTRIFSFGDSLTDTGNYVHLTASSHSPYGAPPYGRTFFGKPTGRASDGRLVIDFIAEEFGLAKVTAIQAGTAPGDFQNGANFAIISATANNGSFFAGNGMDIRPFSLDTQMLWFRTHLRELVQAAAAAQQNGSVGALLSGALVALGEIGGNDYNFAFSRGVPRDAVRRFVPAVVDKLAGAMEELIAMGARAFVVPGNLPFGCTPLYLQRFRANGGWWDYDPATGCLAWFNRFAQYHNRVLAARLDRLRRLHPDVTIVYADWYEATMSIFQDPGKLGFTNALRTCCGNQTVPCGRPGCSVCKDPSTYGSWDGTHPTEAVYKVIADGVLHGPHASPVPLADTCPPT

SEQ ID NO: 18824 - protein, 245 aa, Zea mays subsp. mays
  peptide (1)..(245): Ceres Seq. ID no. 12368458
MDIRPFSLDTQMLWFRTHLRELVQAAAAAQQNGSVGALLSGALVALGEIGGNDYNFAFSRGVPRDAVRRFVPAVVDKLAGAMEELIAMGARAFVVPGNLPFGCTPLYLQRFRANGGWWDYDPATGCLAWFNRFAQYHNRVLAARLDRLRRLHPDVTIVYADWYEATMSIFQDPGKLGFTNALRTCCGNQTVPCGRPGCSVCKDPSTYGSWDGTHPTEAVYKVIADGVLHGPHASPVPLADTCPPT

SEQ ID NO: 18825 - protein, 234 aa, Zea mays subsp. mays
  peptide (1)..(234): Ceres Seq. ID no. 12368459
MLWFRTHLRELVQAAAAAQQNGSVGALLSGALVALGEIGGNDYNFAFSRGVPRDAVRRFVPAVVDKLAGAMEELIAMGARAFVVPGNLPFGCTPLYLQRFRANGGWWDYDPATGCLAWFNRFAQYHNRVLAARLDRLRRLHPDVTIVYADWYEATMSIFQDPGKLGFTNALRTCCGNQTVPCGRPGCSVCKDPSTYGSWDGTHPTEAVYKVIADGVLHGPHASPVPLADTCPPT

SEQ ID NO: 18826 - DNA, 1199 bp, Zea mays subsp. mays
  misc_feature (1)..(1199): Ceres Seq. ID no. 12368694
  misc_feature (1)..(1199): Ortholog of  Ceres SEQ ID NO 14308615 as cited in SEQ ID NO 58538
  misc_feature (1)..(1199): Ortholog of  Ceres SEQ ID NO 13585342 as cited in SEQ ID NO 63601
  misc_feature (1)..(1199): Ortholog of  Ceres SEQ ID NO 15177459 as cited in SEQ ID NO 0
gcacgagaccattacctagaacatcctaaaaaaaaaaaaaaagatggcccctaaattagtctttttcttcctgttgtgctcctcgccttggcgctgcaggcgatcctccggccaccgccgccaaagctctgtggctccccaggtggccctcctctgacatctcccaggatcaagctcagggacggaaggtaccttgcgtacaaagaggatggagtacagagagacaaggccaggtacaagatcatcacagtgcacgcatttgatagcaccaaggacttcccctcgcctgtttctaaggagctcgtggaaggactgggaatttacctccttgcttatgacagagctggatatggggaaagtgaccccaatcccaaccggcatgtcaagagcgaggcgctagatatcgaggagcttgccgaccagctgggccttggccacaagttctatgtgctaggggcctcaatgggaggatactcggtttggggatgcctccagtatatacctcacaggcttgcaggagctgcgctggttgtgccaattatcaactactggtggccttcgttcccagctgaattatccaagcaggccttcaacagactgattgtgccagagcagagaactctttggattgcacacaacataccttccttgctttacctgtggatgacccagaggtggttcccttcttctgcagcagccatgcaccaccctgaaatatttagcaagcatgacatggaggttcttcagaagatgatggcaatgccaagaaccattgagaacaaatcaaggcagcaaggcatttatgaatcgatccaccgtgatttacttgtcgcttttggaacttgggagttcgatccaatgaatgtcaccaatccatttcctcaaaatgagggctctgtgcacatctggcaaggacgcgaagataggttggtgcttgttgagctgcagaggtacattgccaagaagcttccgtggatcaagtatcatgaagtcccagaaggtggacacatgttcgtgatggtagatggatggacagaccgaattctcaaggcactcttgttaggagaagagcccctagatgtgtgacagtagttccattttcaaaatgtcaaaaactgcagctgccagctgttattttacttaattttattcccaatttgtacacttgtattcctacaacaccaagactagtctaattc

SEQ ID NO: 18827 - protein, 207 aa, Zea mays subsp. mays
  peptide (1)..(207): Ceres Seq. ID no. 12368695
MGGYSVWGCLQYIPHRLAGAALVVPIINYWWPSFPAELSKQAFNRLIVPEQRTLWIAHNIPSLLYLWMTQRWFPSSAAAMHHPEIFSKHDMEVLQKMMAMPRTIENKSRQQGIYESIHRDLLVAFGTWEFDPMNVTNPFPQNEGSVHIWQGREDRLVLVELQRYIAKKLPWIKYHEVPEGGHMFVMVDGWTDRILKALLLGEEPLDV

SEQ ID NO: 18828 - protein, 140 aa, Zea mays subsp. mays
  peptide (1)..(140): Ceres Seq. ID no. 12368696
MTQRWFPSSAAAMHHPEIFSKHDMEVLQKMMAMPRTIENKSRQQGIYESIHRDLLVAFGTWEFDPMNVTNPFPQNEGSVHIWQGREDRLVLVELQRYIAKKLPWIKYHEVPEGGHMFVMVDGWTDRILKALLLGEEPLDV

SEQ ID NO: 18829 - protein, 128 aa, Zea mays subsp. mays
  peptide (1)..(128): Ceres Seq. ID no. 12368697
MHHPEIFSKHDMEVLQKMMAMPRTIENKSRQQGIYESIHRDLLVAFGTWEFDPMNVTNPFPQNEGSVHIWQGREDRLVLVELQRYIAKKLPWIKYHEVPEGGHMFVMVDGWTDRILKALLLGEEPLDV

SEQ ID NO: 18830 - DNA, 1346 bp, Zea mays subsp. mays
  misc_feature (1)..(1346): Ceres Seq. ID no. 13493167
  misc_feature (1)..(1346): Ortholog of  Ceres SEQ ID NO 13661969 as cited in SEQ ID NO 61215
  misc_feature (1)..(1346): Ortholog of  Ceres SEQ ID NO 12614809 as cited in SEQ ID NO 68808
  misc_feature (1)..(1346): Ortholog of  Ceres SEQ ID NO 12634366 as cited in SEQ ID NO 0
  misc_feature (1)..(1346): Ortholog of  Ceres SEQ ID NO 14309113 as cited in SEQ ID NO 0
  misc_feature (1)..(1346): Ortholog of  Ceres SEQ ID NO 15175257 as cited in SEQ ID NO 0
gcacgagaccattacctagaacatcctaatcgaaaaatcccagcagcaggtagcagcagcgcatgactttgtatctgcaactcgtttcgactagcctgcacgccgggagccctcgtctcgcccttctccacctccgaaggtagggtacctgatacttccctgccccgcgcatcgcatccgcggttttagtttgctggcctcggttccgatcgattcctatcctccctccgggcgggcgtccaccgacttcatcatccactcgccggccgaaccgatttgtttcgtttgccgttcgatccgcagatcctgcgagttcaacccgcgagtgagcatgtcgtcctactccccgccgccgccgccgccgcgggaccagtccatggacaccgaggcacccaacgcgcccatcaccagggagcggaggctcaaccccgatctgcaggagcagctccccaagccatatctcgcgagagctctcgaggcggtggacccgagccacccgcaggggaccaaggggcgcgacccccgcggcatgagcgtgcttcagcagcacgccgccttcttcgaccgcaatggcgacggcgtcatctacccctgggagacgtttcaaggactgcgagcgataggatgtggactcactgtatcattcgcgttctccatactgatcaacctcttcctcagttatcccactcagccgggatggttaccttctcctttgctgtccatccgtatagacaacatccacaagggtaagcacgggagtgattctgaaacctacgacactgaagggaggtttgatccatcaaagttcgatgctatattcagtaagtacggtcgaacccatcctaatgctataacaagagacgagttaagctcaatgcttcaaggaaaccgcaatacgtacgatttccttggctggttggccgctgccggtgaatggctcttactctacagcttggcgaaagacaaggatggcctcttgcagcgcgaaactgtccgtggtctatttgatgggagcctatttgagcgactggaagacgacaacaacaagaagaaatcgtcatgaatgctgagcagccttgtacagctcagggaagtgctgtcagtacaaaactaccagatataccattggtcgtgttcaaataacaaatgcttcggctttgttcatccgtcattaactatgagtgctgggatttgtttgtatgtgtgtcgtgctaccagtttcttctcctgtcgtctcacacaggtactgaattacgcatgtgttttctagtgttcgtgcggaagctgtattataagctgaaaaatgtgcgtttgaaatttatgggcaaaactgtcttcttggtctt

SEQ ID NO: 18831 - protein, 243 aa, Zea mays subsp. mays
  peptide (1)..(243): Ceres Seq. ID no. 13493168
MSSYSPPPPPPRDQSMDTEAPNAPITRERRLNPDLQEQLPKPYLARALEAVDPSHPQGTKGRDPRGMSVLQQHAAFFDRNGDGVIYPWETFQGLRAIGCGLTVSFAFSILINLFLSYPTQPGWLPSPLLSIRIDNIHKGKHGSDSETYDTEGRFDPSKFDAIFSKYGRTHPNAITRDELSSMLQGNRNTYDFLGWLAAAGEWLLLYSLAKDKDGLLQRETVRGLFDGSLFERLEDDNNKKKSS

SEQ ID NO: 18832 - protein, 228 aa, Zea mays subsp. mays
  peptide (1)..(228): Ceres Seq. ID no. 13493169
MDTEAPNAPITRERRLNPDLQEQLPKPYLARALEAVDPSHPQGTKGRDPRGMSVLQQHAAFFDRNGDGVIYPWETFQGLRAIGCGLTVSFAFSILINLFLSYPTQPGWLPSPLLSIRIDNIHKGKHGSDSETYDTEGRFDPSKFDAIFSKYGRTHPNAITRDELSSMLQGNRNTYDFLGWLAAAGEWLLLYSLAKDKDGLLQRETVRGLFDGSLFERLEDDNNKKKSS

SEQ ID NO: 18833 - protein, 177 aa, Zea mays subsp. mays
  peptide (1)..(177): Ceres Seq. ID no. 13493170
MSVLQQHAAFFDRNGDGVIYPWETFQGLRAIGCGLTVSFAFSILINLFLSYPTQPGWLPSPLLSIRIDNIHKGKHGSDSETYDTEGRFDPSKFDAIFSKYGRTHPNAITRDELSSMLQGNRNTYDFLGWLAAAGEWLLLYSLAKDKDGLLQRETVRGLFDGSLFERLEDDNNKKKSS

SEQ ID NO: 18834 - DNA, 465 bp, Zea mays subsp. mays
  misc_feature (1)..(465): Ceres Seq. ID no. 1846808
  misc_feature (1)..(465): Ortholog of  Ceres SEQ ID NO 13598527 as cited in SEQ ID NO 64914
  misc_feature (1)..(465): Ortholog of  Ceres SEQ ID NO 12589281 as cited in SEQ ID NO 0
aattaattaattcttcaattgatcccatttgctctctggatgtgatttctcccttcaaagattcagattcagatatcggcccgcttgtcgaaaagattgatgatccaagcatggccaacgataaggatttactgcaggttgtccggttactggatgatgcttgcaaggaggccggattcttctatgtgaaaggccatggtattgatgagtcactgatgagggaagtcaggaatgtaacccgtgaattctttcagcttccttatgaggaaaaattaaaaattaagatgacacctcaaagtggatatagagggtatcaaaggataggggaaaatattaccaagggtaagcctgatatgcatgaagcaatcgattgttatactcctattagacctggcaaatatggagatctcgctaaaccaatggaaggatctaacttatggccaaaatacccatcaaattttgaag

SEQ ID NO: 18835 - protein, 154 aa, Zea mays subsp. mays
  peptide (1)..(154): Ceres Seq. ID no. 1846809
LINSSIDPICSLDVISPFKDSDSDIGPLVEKIDDPSMANDKDLLQVVRLLDDACKEAGFFYVKGHGIDESLMREVRNVTREFFQLPYEEKLKIKMTPQSGYRGYQRIGENITKGKPDMHEAIDCYTPIRPGKYGDLAKPMEGSNLWPKYPSNFE

SEQ ID NO: 18836 - protein, 118 aa, Zea mays subsp. mays
  peptide (1)..(118): Ceres Seq. ID no. 1846810
MANDKDLLQVVRLLDDACKEAGFFYVKGHGIDESLMREVRNVTREFFQLPYEEKLKIKMTPQSGYRGYQRIGENITKGKPDMHEAIDCYTPIRPGKYGDLAKPMEGSNLWPKYPSNFE

SEQ ID NO: 18837 - protein, 83 aa, Zea mays subsp. mays
  peptide (1)..(83): Ceres Seq. ID no. 1846811
MREVRNVTREFFQLPYEEKLKIKMTPQSGYRGYQRIGENITKGKPDMHEAIDCYTPIRPGKYGDLAKPMEGSNLWPKYPSNFE

SEQ ID NO: 18838 - DNA, 468 bp, Zea mays subsp. mays
  misc_feature (1)..(468): Ceres Seq. ID no. 1851208
  misc_feature (1)..(468): Ortholog of  Ceres SEQ ID NO 12610112 as cited in SEQ ID NO 56168
  misc_feature (1)..(468): Ortholog of  Ceres SEQ ID NO 13590885 as cited in SEQ ID NO 62660
atccccagaaccacacggataaaccctagctgcgcgagccccccggcgatgtcggtggccatccgctccggcgagctccttgcgtgccccgtcgcactccggcgggcgcccttggctgtgtctgtggtgtcggtgcggatgagggctaggggcgccgtggctgtgcgggcggaggcaacggccgagggggtagggaaagaggggaagaaggcggcggggaagaagaagccggcgagcgggatcaccaagccgaagcccatctctacagagctgcgggagttcgtcggcggcgcggcggagctgccccggactgaggccatcaagctggtatgggcgcacatcaagggcaacaacctccaggatccaaacaacaagaagataataatctgcgatgagaaactgaagaagaaggggcactcctactctgagatcatcaacgagagcgtgattgagtcggtggactcgctg

SEQ ID NO: 18839 - protein, 156 aa, Zea mays subsp. mays
  peptide (1)..(156): Ceres Seq. ID no. 1851209
IPRTTRINPSCASPPAMSVAIRSGELLACPVALRRAPLAVSVVSVRMRARGAVAVRAEATAEGVGKEGKKAAGKKKPASGITKPKPISTELREFVGGAAELPRTEAIKLVWAHIKGNNLQDPNNKKIIICDEKLKKKGHSYSEIINESVIESVDSL

SEQ ID NO: 18840 - protein, 140 aa, Zea mays subsp. mays
  peptide (1)..(140): Ceres Seq. ID no. 1851210
MSVAIRSGELLACPVALRRAPLAVSVVSVRMRARGAVAVRAEATAEGVGKEGKKAAGKKKPASGITKPKPISTELREFVGGAAELPRTEAIKLVWAHIKGNNLQDPNNKKIIICDEKLKKKGHSYSEIINESVIESVDSL

SEQ ID NO: 18841 - protein, 110 aa, Zea mays subsp. mays
  peptide (1)..(110): Ceres Seq. ID no. 1851211
MRARGAVAVRAEATAEGVGKEGKKAAGKKKPASGITKPKPISTELREFVGGAAELPRTEAIKLVWAHIKGNNLQDPNNKKIIICDEKLKKKGHSYSEIINESVIESVDSL

SEQ ID NO: 18842 - DNA, 1863 bp, Zea mays subsp. mays
  misc_feature (1)..(1863): Ceres Seq. ID no. 12566913
  misc_feature (1)..(1863): Ortholog of  Ceres SEQ ID NO 15177336 as cited in SEQ ID NO 51374
gcgggaaactctcaaaatcatcttctccgtttccagtccacaaccttctccattcctcaataccgcaaaccctagaaaaatctcgctccgcaaaaccatgagcgcccctatggagatctccttcactgcgcccccaccccctccggacgcagcgtctaccgccgacgcttccccgctgctggaacctgccgccgcgcagatgctgccccctgtcgccgcagtctcctcctcgcagccgatgcagcagacagctgcggctgcggccgtggttgctccttccccggccgacgataaggtcctcgtgtcagttgaggtactgttgcacgccacgagcgtagctcgccacgaggacgtccaggtggcggtcgagaggatgctcgaagctcgaagcttaagctatgttgatgggcctgtgccaattcctgccgataattcttttcttcttgaaaatgtcaaaaggatacaaataagtgatactgatgagtgggttgagaatcacaaagttctcttattttggcaagtcaagcctgttgtgcatgtgttccagctgagtgaagatggtccaggtgaggaaccaagcgaggatgatacactctctagctttaatgagtgggccttaccggccaaagaatttgatggtctgtgggaaagtttactatatgaagttggtctcaagcagaggttgctgagatatgctgtcagtgctttgctttttactgaaagaggtgtggacacatgtctggtttcatggaaccggattgtacttttgcatggtccacctggaacaggaaagacttccttgtgtaaagcactagcacagaaactttctattcggttcaaatcaaggtattctatgtgtcaattgattgaagtcaatgctcattcattgttcagcaagtggttttctgaaagtggaaaactggttgccaaacttttccagaagatccaggagatggtggaggaagaaagcaacctagtatttgtattaatagatgaagttgaaagccttgctgctgccagacaagctgccatatctggctctgaaccttcagactccattagagttgtgaatgcactgctaacacaaatggacaaactgaagtcttggccaaatgttatcattttgacaacatcgaatattactacagcaatagatattgcatttgttgacagggcagacattaaggcatatgtcggaccccctacgcttcaagcacgatacgagatcttgaggtcatgcatacaggaactcttaagagttggtattcttacatatcctcagggtagtagtgtgccatgtattctgaactattcgaccctgaaggagaagaagcactgtcctgaggctgcagaaccccatggtgcgcttcatctatccaatctactgtatgaagccgcaaaactgtgtgagggacttagtggccggtcattgaggaaactccctttcctgacacatgcctctgttaccaatccgtcatgctgcgatgcttctactttcttgcatacattgatacagactgcacggagagaagtcttggagtcacgtggttagttcacccttgaaaccttggcgtcttttggaagagcaaaatgctaacagttcattccaaacaccatgtcctggagtcccctgatgtgatcaattgccgggtcgttaaaaccataagaaagtccatcccatcgctagagttaggttagtgttaaatgtagagagacaagaacaaagaatgaatgaattggcttaattccattgattgatcggtatgtatatacatggcgaacagtcgccttgacgttccttagggatgtcacacggttaatagtaagcctagtcacaaatccgtttgaagatagatccgttgg

SEQ ID NO: 18843 - protein, 516 aa, Zea mays subsp. mays
  peptide (1)..(516): Ceres Seq. ID no. 12566914
RETLKIIFSVSSPQPSPFLNTANPRKISLRKTMSAPMEISFTAPPPPPDAASTADASPLLEPAAAQMLPPVAAVSSSQPMQQTAAAAAVVAPSPADDKVLVSVEVLLHATSVARHEDVQVAVERMLEARSLSYVDGPVPIPADNSFLLENVKRIQISDTDEWVENHKVLLFWQVKPVVHVFQLSEDGPGEEPSEDDTLSSFNEWALPAKEFDGLWESLLYEVGLKQRLLRYAVSALLFTERGVDTCLVSWNRIVLLHGPPGTGKTSLCKALAQKLSIRFKSRYSMCQLIEVNAHSLFSKWFSESGKLVAKLFQKIQEMVEEESNLVFVLIDEVESLAAARQAAISGSEPSDSIRVVNALLTQMDKLKSWPNVIILTTSNITTAIDIAFVDRADIKAYVGPPTLQARYEILRSCIQELLRVGILTYPQGSSVPCILNYSTLKEKKHCPEAAEPHGALHLSNLLYEAAKLCEGLSGRSLRKLPFLTHASVTNPSCCDASTFLHTLIQTARREVLESRG

SEQ ID NO: 18844 - protein, 484 aa, Zea mays subsp. mays
  peptide (1)..(484): Ceres Seq. ID no. 12566915
MSAPMEISFTAPPPPPDAASTADASPLLEPAAAQMLPPVAAVSSSQPMQQTAAAAAVVAPSPADDKVLVSVEVLLHATSVARHEDVQVAVERMLEARSLSYVDGPVPIPADNSFLLENVKRIQISDTDEWVENHKVLLFWQVKPVVHVFQLSEDGPGEEPSEDDTLSSFNEWALPAKEFDGLWESLLYEVGLKQRLLRYAVSALLFTERGVDTCLVSWNRIVLLHGPPGTGKTSLCKALAQKLSIRFKSRYSMCQLIEVNAHSLFSKWFSESGKLVAKLFQKIQEMVEEESNLVFVLIDEVESLAAARQAAISGSEPSDSIRVVNALLTQMDKLKSWPNVIILTTSNITTAIDIAFVDRADIKAYVGPPTLQARYEILRSCIQELLRVGILTYPQGSSVPCILNYSTLKEKKHCPEAAEPHGALHLSNLLYEAAKLCEGLSGRSLRKLPFLTHASVTNPSCCDASTFLHTLIQTARREVLESRG

SEQ ID NO: 18845 - protein, 480 aa, Zea mays subsp. mays
  peptide (1)..(480): Ceres Seq. ID no. 12566916
MEISFTAPPPPPDAASTADASPLLEPAAAQMLPPVAAVSSSQPMQQTAAAAAVVAPSPADDKVLVSVEVLLHATSVARHEDVQVAVERMLEARSLSYVDGPVPIPADNSFLLENVKRIQISDTDEWVENHKVLLFWQVKPVVHVFQLSEDGPGEEPSEDDTLSSFNEWALPAKEFDGLWESLLYEVGLKQRLLRYAVSALLFTERGVDTCLVSWNRIVLLHGPPGTGKTSLCKALAQKLSIRFKSRYSMCQLIEVNAHSLFSKWFSESGKLVAKLFQKIQEMVEEESNLVFVLIDEVESLAAARQAAISGSEPSDSIRVVNALLTQMDKLKSWPNVIILTTSNITTAIDIAFVDRADIKAYVGPPTLQARYEILRSCIQELLRVGILTYPQGSSVPCILNYSTLKEKKHCPEAAEPHGALHLSNLLYEAAKLCEGLSGRSLRKLPFLTHASVTNPSCCDASTFLHTLIQTARREVLESRG

SEQ ID NO: 18846 - DNA, 457 bp, Zea mays subsp. mays
  misc_feature (1)..(457): Ceres Seq. ID no. 12387788
  misc_feature (1)..(457): Ortholog of  Ceres SEQ ID NO 15175545 as cited in SEQ ID NO 0
atctatccagtcgcatctccctctccgaaatcaaggtagcgtacaccgctgcagtttctagagccctctctgccactcgtgatcccactagtcacaatgcctgccctcgccaagcccgcctcccgcaccgccaagcccgccgcggctccgaagccgaagcctgccgccgccaagccgaaggcggccaccgctggtgcctcccacccgccttacttcgagatgatcaaggaggctatcacggcgctcaaggagaggaccggctccagctcgcaagcgatcgccaagtatgtgggggacaagcacggcgcgtcaacctcttgcactatttattcattcataagttggatgacatcaaataatgatattaacttgatgtattcgcatcttattcattgtaaaaacgttgctcataattaaagagcatccatccaatctcaaagagatttctggagcaatc

SEQ ID NO: 18847 - protein, 118 aa, Zea mays subsp. mays
  peptide (1)..(118): Ceres Seq. ID no. 12387789
LSSRISLSEIKVAYTAAVSRALSATRDPTSHNACPRQARLPHRQARRGSEAEACRRQAEGGHRWCLPPALLRDDQGGYHGAQGEDRLQLASDRQVCGGQARRVNLLHYLFIHKLDDIK

SEQ ID NO: 18848 - protein, 106 aa, Zea mays subsp. mays
  peptide (1)..(106): Ceres Seq. ID no. 12387790
MPALAKPASRTAKPAAAPKPKPAAAKPKAATAGASHPPYFEMIKEAITALKERTGSSSQAIAKYVGDKHGASTSCTIYSFISWMTSNNDINLMYSHLIHCKNVAHN

SEQ ID NO: 18849 - protein, 65 aa, Zea mays subsp. mays
  peptide (1)..(65): Ceres Seq. ID no. 12387791
MIKEAITALKERTGSSSQAIAKYVGDKHGASTSCTIYSFISWMTSNNDINLMYSHLIHCKNVAHN

SEQ ID NO: 18850 - DNA, 1320 bp, Zea mays subsp. mays
  misc_feature (1)..(1320): Ceres Seq. ID no. 12360889
  misc_feature (1)..(1320): Ortholog of  Ceres SEQ ID NO 13638651 as cited in SEQ ID NO 52216
  misc_feature (1)..(1320): Ortholog of  Ceres SEQ ID NO 15171460 as cited in SEQ ID NO 58412
gcacgagaccattacctagaacatcctaatcgaaaaacttgtcgtctcgtccactcggtcgatcgccttatctcctcctctcccagtcctcccgcccctcgccccatcccccaccacccagtcagtgtctgtcaccgcctcaccgaccacacgccaagggaagaagcagcagcgccatggccgcgccgctcacggccgtccgggcccgcctcctcctcctcccagtgacctgcacggcagccggtaccaccggccggccggcccctccgtccaagagcagcaggccgcgtctactaccaccaggcaccacccggtgccggtgctccaggcctcccatggaggcggtggcgccggtgtccgcggcggcggtgggcggcgctgctgctgctgccggcggacgcggcgctggcggtgggcggcgagttggggatcctcgagggccgcagcttcgcgctgctgcacccgctcatcatgggcgggctcttcgcgtacacgctctgggcggggtacctcggctggcagtggcgccgggtgcgcaccgtccaggacgagatcaacgcgctcaagaagcagctcaagcccgccgccgcggccactcccgcggcggtcggcgccggcgcggactcctcctccaccacaaccccgccgcccgctgcggccagcaagtcgccgtcgccggcggaggcccggatcgaggagctcaccgacgagcggaaggcgctgctcaaggggtcgttccgggaccgccacttcaacgcgggctccctcctcctcggcctcggcgtgctcgagtccgtcggcggcgcgctcaacacctggttccgcaccggcaagctgttcccgggcccgcacctcttcgcgggcgccgccatcaccgtgctgtgggccgccgcggccgcgctcgtcccggcgatgcagaagggggacgagacggcccgcagcctgcacatcgcgctcaacgccgtcaacgtcctgctcttcgtctggcagatccccaccgggctcgagatcgtcggcaaggtcttcgagttcaccacctggccatgagacgacgtccttgtgcgtgcgtgtctgctctgctatgcgcatcctgcatgtcccttcacccttctcttctctttcgtcccatcccatgacccatgtattgcttggtagtgttaggttcaatctccgtctgcaggtcgttgttttcttgacctgtcgaagtcgatccatgttcacaaagctgtgatgctgagaatgccaatcacaagttcctttacactgtacatgacaagagttcgttctgcagtacacagtctttagttaagccgaatcgcc

SEQ ID NO: 18851 - protein, 319 aa, Zea mays subsp. mays
  peptide (1)..(319): Ceres Seq. ID no. 12360890
MAAPLTAVRARLLLLPVTCTAAGTTGRPAPPSKSSRPRLLPPGTTRCRCSRPPMEAVAPVSAAAVGGAAAAAGGRGAGGGRRVGDPRGPQLRAAAPAHHGRALRVHALGGVPRLAVAPGAHRPGRDQRAQEAAQARRRGHSRGGRRRRGLLLHHNPAARCGQQVAVAGGGPDRGAHRRAEGAAQGVVPGPPLQRGLPPPRPRRARVRRRRAQHLVPHRQAVPGPAPLRGRRHHRAVGRRGRARPGDAEGGRDGPQPAHRAQRRQRPALRLADPHRARDRRQGLRVHHLAMRRRPCACVSALLCASCMSLHPSLLFRPIP

SEQ ID NO: 18852 - protein, 266 aa, Zea mays subsp. mays
  peptide (1)..(266): Ceres Seq. ID no. 12360891
MEAVAPVSAAAVGGAAAAAGGRGAGGGRRVGDPRGPQLRAAAPAHHGRALRVHALGGVPRLAVAPGAHRPGRDQRAQEAAQARRRGHSRGGRRRRGLLLHHNPAARCGQQVAVAGGGPDRGAHRRAEGAAQGVVPGPPLQRGLPPPRPRRARVRRRRAQHLVPHRQAVPGPAPLRGRRHHRAVGRRGRARPGDAEGGRDGPQPAHRAQRRQRPALRLADPHRARDRRQGLRVHHLAMRRRPCACVSALLCASCMSLHPSLLFRPIP

SEQ ID NO: 18853 - protein, 191 aa, Zea mays subsp. mays
  peptide (1)..(191): Ceres Seq. ID no. 12360892
MGGLFAYTLWAGYLGWQWRRVRTVQDEINALKKQLKPAAAATPAAVGAGADSSSTTTPPPAAASKSPSPAEARIEELTDERKALLKGSFRDRHFNAGSLLLGLGVLESVGGALNTWFRTGKLFPGPHLFAGAAITVLWAAAAALVPAMQKGDETARSLHIALNAVNVLLFVWQIPTGLEIVGKVFEFTTWP

SEQ ID NO: 18854 - DNA, 1372 bp, Zea mays subsp. mays
  misc_feature (1)..(1372): Ceres Seq. ID no. 12381735
  misc_feature (1)..(1372): Ortholog of  Ceres SEQ ID NO 13599520 as cited in SEQ ID NO 633
  misc_feature (1)..(1372): Ortholog of  Ceres SEQ ID NO 13598460 as cited in SEQ ID NO 63382
gcacgagaccattacctagaacatcctaatcaaaaaaccgacgagcaccccctgagcctccgccgtcgagttcgagacgagacggtaccactatggagagtgagcaccacctgttcgagatcgcggccgcccggctcgagcgtagttctgccttcttggacgaggactactcttcatggtctccctgcatacagggctaccactggcgatgcgtctgctccgctgatcccgccgctggtacggcgtccttcaccgtctctcttccctacagcagcacccgcgagcccctcaacgcctcgttcaagctcagcctgctggaccgaggaggcctgccggtgccgtccaggacccgagccaccttgttccagaactgcctgatccagcagatgtggcagttggagtgtccgggcttcctcaccagggacgacctggagcggcaggagtactacctcgacaacgacggcggccgctgcttccacgtccgctgtgacatcgccatcaagcccttcgccgcggccacggccggcgacggcgacggcgacgtcgcggtgcccccgtccgacgacctccaccggcacctcggcgacctgctggcgcgcaaggacggcgcggacgtcacgttccagctggtcgacgccggcgagacgttctccgcgcaccggtgcgtgctcgcggcgcggtcgcccgtgttcagagcgcagctgttcggcgagatgatggagagcaacaagggcaccggcgtcgtcataccggttgaggacatggaagcccaggtgttcagcgccctgctggccttcatctacaccgactcgttgccgccggagaccgacagcgacgacgacgacgacgaagaagccatggtgcactatcagcttctgcttgccgccgcggacaggtacggcgtcgacaggatgaagctggtttgccaggagaagctgtgcaagcacatacgcgcggactcggtggcgacgatgctggttttagctgaccgacaccattgccctgcgctcaaggaggcgtgctttcgtttcctctcttctagcgccaatcttgcctccttcactgagacgacggatggcttcgaggtgctcaacgccagctgccctgctgttctcaaggagctactggcccaagcttgccaccgttttgatcttctgagtaaccatggccgacggtttccagtttcatacaatgcaggttgctctgctcgtttctcaaaagcgatgcacttctttgatgaattagtacgtgcaggttttgaacgcattttccggtggtctgcgaaaacgaaaaatcgctcgaaattcgttgaatttcgtaaatctcgagcactttgtaacttcaaatttgaaaaccccgattttcattgctc

SEQ ID NO: 18855 - protein, 426 aa, Zea mays subsp. mays
  peptide (1)..(426): Ceres Seq. ID no. 12381736
MESEHHLFEIAAARLERSSAFLDEDYSSWSPCIQGYHWRCVCSADPAAGTASFTVSLPYSSTREPLNASFKLSLLDRGGLPVPSRTRATLFQNCLIQQMWQLECPGFLTRDDLERQEYYLDNDGGRCFHVRCDIAIKPFAAATAGDGDGDVAVPPSDDLHRHLGDLLARKDGADVTFQLVDAGETFSAHRCVLAARSPVFRAQLFGEMMESNKGTGVVIPVEDMEAQVFSALLAFIYTDSLPPETDSDDDDDEEAMVHYQLLLAAADRYGVDRMKLVCQEKLCKHIRADSVATMLVLADRHHCPALKEACFRFLSSSANLASFTETTDGFEVLNASCPAVLKELLAQACHRFDLLSNHGRRFPVSYNAGCSARFSKAMHFFDELVRAGFERIFRWSAKTKNRSKFVEFRKSRALCNFKFENPDFHC

SEQ ID NO: 18856 - protein, 328 aa, Zea mays subsp. mays
  peptide (1)..(328): Ceres Seq. ID no. 12381737
MWQLECPGFLTRDDLERQEYYLDNDGGRCFHVRCDIAIKPFAAATAGDGDGDVAVPPSDDLHRHLGDLLARKDGADVTFQLVDAGETFSAHRCVLAARSPVFRAQLFGEMMESNKGTGVVIPVEDMEAQVFSALLAFIYTDSLPPETDSDDDDDEEAMVHYQLLLAAADRYGVDRMKLVCQEKLCKHIRADSVATMLVLADRHHCPALKEACFRFLSSSANLASFTETTDGFEVLNASCPAVLKELLAQACHRFDLLSNHGRRFPVSYNAGCSARFSKAMHFFDELVRAGFERIFRWSAKTKNRSKFVEFRKSRALCNFKFENPDFHC

SEQ ID NO: 18857 - protein, 219 aa, Zea mays subsp. mays
  peptide (1)..(219): Ceres Seq. ID no. 12381738
MMESNKGTGVVIPVEDMEAQVFSALLAFIYTDSLPPETDSDDDDDEEAMVHYQLLLAAADRYGVDRMKLVCQEKLCKHIRADSVATMLVLADRHHCPALKEACFRFLSSSANLASFTETTDGFEVLNASCPAVLKELLAQACHRFDLLSNHGRRFPVSYNAGCSARFSKAMHFFDELVRAGFERIFRWSAKTKNRSKFVEFRKSRALCNFKFENPDFHC

SEQ ID NO: 18858 - DNA, 959 bp, Zea mays subsp. mays
  misc_feature (1)..(959): Ceres Seq. ID no. 12364026
  misc_feature (1)..(959): Ortholog of  Ceres SEQ ID NO 13638595 as cited in SEQ ID NO 52050
  misc_feature (1)..(959): Ortholog of  Ceres SEQ ID NO 14301870 as cited in SEQ ID NO 61501
  misc_feature (1)..(959): Ortholog of  Ceres SEQ ID NO 12583993 as cited in SEQ ID NO 68098
gcacgagaccattacctagaacatcctaatcaaaaatcgtcagagacacgcgtccaaacatacagctagctagcctctgcatgcctacgtacagcatggccaaggccgagctgctgctcctcgccctcgtggcttcgctctccgtgctgccattctcctccctcgccgtgtaccaggacttctgcatcgccgacctatccgccgccgccacgccgggcggctacccgtgcaagcccccgaaggacgtgaccgccgacgacttccactacggcggcctcgccacccccggcacggcgctgaaacccttcaaaatctccctgggctcggccgtcgtcaccacgttccccggcctgaacgggctgggcatctccgccgcgcggatggtgatggtcccgggcggcgtcgcgccgctgcactcccacccgggaggcaccgagctcatcttcgtcatcgagggcagcgtcgtctgcggcttcatcagcgccacgctcaacagggtgtacaccaagacgctgtacgccggcgacctgatggtgctcccgcagggccagctccacttccagtacagccacggcaacaccacggcggtgacgctgtcctcgttcagcagcgacaaccccggcctgcagatcctcgacttcgcgctcttcgccaacgacctgcccacagaggtcgtgaacaaggtgaccaacctggacgaactgcagatcgtcaagctcaaggcactgttcggagggaggggctagacggatatatatgtactccgtatataggaacagtcaacggtgttgatcattgaattgtgtgtgtattattctatacttgtgatggatgtttgtcttgtcattctataaaataaattgtaacgcgcgcagcaggcgtgagagcgaaagtagctgccacatttgatgtactaatatttacatctccattgttgataataatacattattggcctc

SEQ ID NO: 18859 - protein, 221 aa, Zea mays subsp. mays
  peptide (1)..(221): Ceres Seq. ID no. 12364027
MPTYSMAKAELLLLALVASLSVLPFSSLAVYQDFCIADLSAAATPGGYPCKPPKDVTADDFHYGGLATPGTALKPFKISLGSAVVTTFPGLNGLGISAARMVMVPGGVAPLHSHPGGTELIFVIEGSVVCGFISATLNRVYTKTLYAGDLMVLPQGQLHFQYSHGNTTAVTLSSFSSDNPGLQILDFALFANDLPTEVVNKVTNLDELQIVKLKALFGGRG

SEQ ID NO: 18860 - protein, 216 aa, Zea mays subsp. mays
  peptide (1)..(216): Ceres Seq. ID no. 12364028
MAKAELLLLALVASLSVLPFSSLAVYQDFCIADLSAAATPGGYPCKPPKDVTADDFHYGGLATPGTALKPFKISLGSAVVTTFPGLNGLGISAARMVMVPGGVAPLHSHPGGTELIFVIEGSVVCGFISATLNRVYTKTLYAGDLMVLPQGQLHFQYSHGNTTAVTLSSFSSDNPGLQILDFALFANDLPTEVVNKVTNLDELQIVKLKALFGGRG

SEQ ID NO: 18861 - protein, 121 aa, Zea mays subsp. mays
  peptide (1)..(121): Ceres Seq. ID no. 12364029
MVMVPGGVAPLHSHPGGTELIFVIEGSVVCGFISATLNRVYTKTLYAGDLMVLPQGQLHFQYSHGNTTAVTLSSFSSDNPGLQILDFALFANDLPTEVVNKVTNLDELQIVKLKALFGGRG

SEQ ID NO: 18862 - DNA, 1218 bp, Zea mays subsp. mays
  misc_feature (1)..(1218): Ceres Seq. ID no. 12368278
  misc_feature (1)..(1218): Ortholog of  Ceres SEQ ID NO 14314879 as cited in SEQ ID NO 54119
gcacgagaccattacctagaacatcctaatcaaaaaatcgcatcgatcgggcaggcattaattgtacagctttattagctcctgcttctgcttctgcttctgcttcttcttagctggagactagagaaagaagaagacacagtgatcatcggcatagatagtaagtagaagaagagctagcaggaagaagcagcagctagctagctgacccaacgaaatgacgatgagagatgagatcgtcttcttcgacgtggagacgacggctccgtcggcggccgggcccggtcggtggtggctgctggagttcggcgccatcctggtgtgccccaggaagctggtggaggtaggcagctacgacaccctcatccgcccgggcgacctctccgccgtctccaggcgattcacggacgacgtggaggcggccataatggcgtcggcgccgccccttcaaggacgtggccgacaagatattcgacatcctggacggccgcgtttgggctgggcacaacatccagcgtttcgactgcccccgcatccgcgaggccttcgccgacatcgggcgccccgccccggagcccgtcggcgtcatcgactccctcaacgtcctggccgcacacttcggccgccgcgccggagacctcaagatggccaccctcgcgacctacttcggcatcgggaagcagaagcacaggggcctggacgacgcgcgcatgaacctcgaggtgctcaagcactgcgccaccgtcctgctgctggagtccagcctgccggacgtcctctgcgcgcagcagtctcgccgagccgcggtcaccaggaggacgtcgcaggcgcagaccatcaagccgccacctaaacatgctgtgcaccaccacctgcggcccggcggcgtcgtcatgtcgcagacaaagctaccatttaccgctgtaacagctacacctgcacctgcggccgccaccccctgcggcaagaggaatagcctgggcaaggtggtggcgagggccgtgacggcggcgaccactgccccattgagtagcagtagcagcacaagcacaaacactaggcgccccgtgacggcgaccacgcccttccacatgatcctcaggcactccagggccatcctcagatgatgatccatgtttcattcattcattctttctttggatgatccatgatcggatttcgttccattcaattcaattgtacagttccatcgatttg

SEQ ID NO: 18863 - protein, 211 aa, Zea mays subsp. mays
  peptide (1)..(211): Ceres Seq. ID no. 12368279
MTMRDEIVFFDVETTAPSAAGPGRWWLLEFGAILVCPRKLVEVGSYDTLIRPGDLSAVSRRFTDDVEAAIMASAPPLQGRGRQDIRHPGRPRLGWAQHPAFRLPPHPRGLRRHRAPRPGARRRHRLPQRPGRTLRPPRRRPQDGHPRDLLRHREAEAQGPGRRAHEPRGAQALRHRPAAGVQPAGRPLRAAVSPSRGHQEDVAGADHQAAT

SEQ ID NO: 18864 - protein, 209 aa, Zea mays subsp. mays
  peptide (1)..(209): Ceres Seq. ID no. 12368280
MRDEIVFFDVETTAPSAAGPGRWWLLEFGAILVCPRKLVEVGSYDTLIRPGDLSAVSRRFTDDVEAAIMASAPPLQGRGRQDIRHPGRPRLGWAQHPAFRLPPHPRGLRRHRAPRPGARRRHRLPQRPGRTLRPPRRRPQDGHPRDLLRHREAEAQGPGRRAHEPRGAQALRHRPAAGVQPAGRPLRAAVSPSRGHQEDVAGADHQAAT

SEQ ID NO: 18865 - protein, 160 aa, Zea mays subsp. mays
  peptide (1)..(160): Ceres Seq. ID no. 12368281
MATLATYFGIGKQKHRGLDDARMNLEVLKHCATVLLLESSLPDVLCAQQSRRAAVTRRTSQAQTIKPPPKHAVHHHLRPGGVVMSQTKLPFTAVTATPAPAAATPCGKRNSLGKVVARAVTAATTAPLSSSSSTSTNTRRPVTATTPFHMILRHSRAILR

SEQ ID NO: 18866 - DNA, 1747 bp, Zea mays subsp. mays
  misc_feature (1)..(1747): Ceres Seq. ID no. 13493123
  misc_feature (1)..(1747): Ortholog of  Ceres SEQ ID NO 14308359 as cited in SEQ ID NO 55097
  misc_feature (1)..(1747): Ortholog of  Ceres SEQ ID NO 15169195 as cited in SEQ ID NO 55200
  misc_feature (1)..(1747): Ortholog of  Ceres SEQ ID NO 15226540 as cited in SEQ ID NO 58479
  misc_feature (1)..(1747): Ortholog of  Ceres SEQ ID NO 13581611 as cited in SEQ ID NO 59028
  misc_feature (1)..(1747): Ortholog of  Ceres SEQ ID NO 13596689 as cited in SEQ ID NO 62728
  misc_feature (1)..(1747): Ortholog of  Ceres SEQ ID NO 14301693 as cited in SEQ ID NO 69246
taatcgaaaaacctccacccgccccgtcccgttttgacggccctttctcccctctcctccgcgagcgccgccgcagtagaacccggtggtaacccactgccgcaagcatcccaccgcgccgagctacgcgacggacgcggcgcgcggcccacaacccaaccgcagcggcaacaaccgctctataaagcaatccccccacctaccggctccgcggcctcgctcgcttcgctttcccccaaatccaccgcgggctcgagctcggaggagaggagacgagacgacccaagactttctcacccccctttgcttcctgcgcaattcctgcggcagcgcctttctctctttcaatggacagcgactacgttgctagcctgctcatgggcatgggctcatccgcccctgcgctcgacttcgccgcgctggacgccgggttcctcgaaacgctctgcggcggcggcggcggcctcttcggggtgtccggggtcgccgcgggggccgggtgtggcggcgtgtccccggaggggtcgtcggtgtccgacccggcgtgggcgcgcgccagggacgatgacaatgtcaggaagcgcaaggagccgcccacggggtccgccggcggcaaggaggcctgcccgggcaaggctgcggaggccaagggtccggacgggaagaggtgcagagtgggcggcagcgacagcccggtgaagccgaaggtagaggaggtggcggcgagcgacgcctcggttgaactcaaagcgcagaagaagggcaaggggaagaccgccaagccggcagtcgaaccgcccaaggactacgtccatgtccgggcgcggcgagggcaggcgactgacagccacagcctcgcagagagggttagaagagagaagatcagccagaggatgaagtttctgcaggacctagtgccaggatgcaacaaggtggttggcaaggcactcatgctcgatgagatcataaactacgtccagtcgctgcagcagcaagtcgagttcctgtccatgaagctcgccactgtgaacccacagcttgacttcagcaacctgtcgacactcctacacaaagacatgtaccaaccatgtggcccttcggcaaattcggtctttccactggaaagtgacggtgcagctttcccattctgcgaccaagcggatcttttccacagctttggttcgggttcggctgctatggaggatcagtgctctctaagcctgctagacacggctctgccccacgcggccaacccacagtttgcttttcaaaagcagcagagggacttctgggaggatggcctacagaacgcattgcctaccggtagtgagcaaagacaggaggaggatgggcttttagtacccaactttgatggccagttacatgctgaccagacaaaggttgagttctagtccctggtgctcctcccaaggttgatatttttgtatataggtggggtaccaagacctgtggcaagcaaagctctctctttctctctgtgtccgaagctgaccatcattagagtctaggcctgcgaactgatttcgttccgtgataatgctgcatgtatggcatctcgattcttcccacagagatcatgtgatgtgatcgacctcgagaaattaaaagtagattgtgtactagatatggcgcaaatattacatgcgccatcttctaaagttgtactgattggtatgtaagggcgctgggtggtgttggaacggataccgtgtactgtttgttgctt

SEQ ID NO: 18867 - protein, 354 aa, Zea mays subsp. mays
  peptide (1)..(354): Ceres Seq. ID no. 13493124
MDSDYVASLLMGMGSSAPALDFAALDAGFLETLCGGGGGLFGVSGVAAGAGCGGVSPEGSSVSDPAWARARDDDNVRKRKEPPTGSAGGKEACPGKAAEAKGPDGKRCRVGGSDSPVKPKVEEVAASDASVELKAQKKGKGKTAKPAVEPPKDYVHVRARRGQATDSHSLAERVRREKISQRMKFLQDLVPGCNKVVGKALMLDEIINYVQSLQQQVEFLSMKLATVNPQLDFSNLSTLLHKDMYQPCGPSANSVFPLESDGAAFPFCDQADLFHSFGSGSAAMEDQCSLSLLDTALPHAANPQFAFQKQQRDFWEDGLQNALPTGSEQRQEEDGLLVPNFDGQLHADQTKVEF

SEQ ID NO: 18868 - protein, 344 aa, Zea mays subsp. mays
  peptide (1)..(344): Ceres Seq. ID no. 13493125
MGMGSSAPALDFAALDAGFLETLCGGGGGLFGVSGVAAGAGCGGVSPEGSSVSDPAWARARDDDNVRKRKEPPTGSAGGKEACPGKAAEAKGPDGKRCRVGGSDSPVKPKVEEVAASDASVELKAQKKGKGKTAKPAVEPPKDYVHVRARRGQATDSHSLAERVRREKISQRMKFLQDLVPGCNKVVGKALMLDEIINYVQSLQQQVEFLSMKLATVNPQLDFSNLSTLLHKDMYQPCGPSANSVFPLESDGAAFPFCDQADLFHSFGSGSAAMEDQCSLSLLDTALPHAANPQFAFQKQQRDFWEDGLQNALPTGSEQRQEEDGLLVPNFDGQLHADQTKVEF

SEQ ID NO: 18869 - protein, 342 aa, Zea mays subsp. mays
  peptide (1)..(342): Ceres Seq. ID no. 13493126
MGSSAPALDFAALDAGFLETLCGGGGGLFGVSGVAAGAGCGGVSPEGSSVSDPAWARARDDDNVRKRKEPPTGSAGGKEACPGKAAEAKGPDGKRCRVGGSDSPVKPKVEEVAASDASVELKAQKKGKGKTAKPAVEPPKDYVHVRARRGQATDSHSLAERVRREKISQRMKFLQDLVPGCNKVVGKALMLDEIINYVQSLQQQVEFLSMKLATVNPQLDFSNLSTLLHKDMYQPCGPSANSVFPLESDGAAFPFCDQADLFHSFGSGSAAMEDQCSLSLLDTALPHAANPQFAFQKQQRDFWEDGLQNALPTGSEQRQEEDGLLVPNFDGQLHADQTKVEF

SEQ ID NO: 18870 - DNA, 2001 bp, Zea mays subsp. mays
  misc_feature (1)..(2001): Ceres Seq. ID no. 12368484
  misc_feature (1)..(2001): Ortholog of  Ceres SEQ ID NO 12605517 as cited in SEQ ID NO 20422
gcacgagaccattacctagaacatcctaatcaaaaggaggccccggggatcggtggccaggctgagctcctcccagagtcccagtacgcctccggagtccggatccgcggagccaggctgagctgctcccgtggtctactctccagtacgcggctcggcagggaccgggagcgaggacgagcgtcctgcgtcgacgggatcggcgtgccaggggagcgctgaaatctgcgcttccgtctccggacggccgatgccaggccttgctcgggagaggtagcaaacgaaacatggagctgaggcggctgctgctgcttgcgctcatctgcctgcgtgctccccgtttggcttcggctcagcagccggatgaggcgacggtcatagttaagggctccactaggattgcggaaacggatgacaactacgtctgtgctacaattgattggtggccgccggagaagtgcaactacaatcagtgcccatggggccaggcgtcaattcttaatctggatctggatcacccgtttctggctcaggccattcaagcatttgaccatttgaggattaggctgggaggctccttgcaagaccgagttgtttatgatgtgggaacagaaagtccatgctccccatttacaaatgtatccaatgccttgtttggtttctcagttggttgccttggtatggataggtgggacaaactgaatgacctattcgagagaacaggagcaattgtcacatttggtgtgaatgcactctacgggaggtataatgttcgacgttccatctgggcaggcaaatggaattccactaatgcatatgattttgtaaaatacacaatctcaaagggatacccagttggctcttgggaatttggcaatgagctgagtgggcatggaatcggagcaaaagttgatgctaaactttatggaaaagatgtaattgaatttaaatccatccttcggcaattgtataaggcaccactgtcccagccactcctgttagccccgggagggttctttgatcaacagtggtattctcagctacttgagacttcaggtcatggtgttgttaatgccttatctcaccatgtatataatcttggtggagggaatgatgttcatcttataaggaagatcttagacccaaagtacttggatcgtgctgaagatacttacagagacatgcaacttaccatccaaaggcatggaacatgggcttctgcttgggtcagtgaaagtggcggtgtattcaacaatggtggtcaactggtgtcaaatacattcatcaacagtatctggtatctagatcagcttgggatggcatctaagtacaacacaaaagtgttctgcagacagactctcatcggtggcaactatggactgctcgacacgcaaacttttctgccaaatcctgattactacagcgctctactatggcatcggcttatgggcaatggagttctttcagttgatataaacgcaccgcgtcaaatacgcgcttatgctcattgtaggaaacaacagcaaggcatcacgattctgttgatcaacctgagcaacactactggatacaacgtcactctccagaacgacatcaacgtcagcttgggcaaaagacctgaccttgagaagcgcagttctttcacgcacaggctcaggaaagcagtctcatggctggggaggaaaccagcaagcaacaccaggaggcgggaggagtaccatctgaccgccaaggacggcgatctccagagcaaaacgatgctgctcaacggggccccgttggaacttggagacgctggcagcattccagctatggatccggtgctcgtcgccgttgatttgccggtgcagctagcaccaacatccatcgccttcgtagtcctacccaagtttgaggccaaggcttgttcttgacacatgagctcttgaaatcagtttttttttgtgtgtgccttgaaatgttccatagacctatttcgtgaaagaaatcatacaacgcggc

SEQ ID NO: 18871 - protein, 541 aa, Zea mays subsp. mays
  peptide (1)..(541): Ceres Seq. ID no. 12368485
MELRRLLLLALICLRAPRLASAQQPDEATVIVKGSTRIAETDDNYVCATIDWWPPEKCNYNQCPWGQASILNLDLDHPFLAQAIQAFDHLRIRLGGSLQDRVVYDVGTESPCSPFTNVSNALFGFSVGCLGMDRWDKLNDLFERTGAIVTFGVNALYGRYNVRRSIWAGKWNSTNAYDFVKYTISKGYPVGSWEFGNELSGHGIGAKVDAKLYGKDVIEFKSILRQLYKAPLSQPLLLAPGGFFDQQWYSQLLETSGHGVVNALSHHVYNLGGGNDVHLIRKILDPKYLDRAEDTYRDMQLTIQRHGTWASAWVSESGGVFNNGGQLVSNTFINSIWYLDQLGMASKYNTKVFCRQTLIGGNYGLLDTQTFLPNPDYYSALLWHRLMGNGVLSVDINAPRQIRAYAHCRKQQQGITILLINLSNTTGYNVTLQNDINVSLGKRPDLEKRSSFTHRLRKAVSWLGRKPASNTRRREEYHLTAKDGDLQSKTMLLNGAPLELGDAGSIPAMDPVLVAVDLPVQLAPTSIAFVVLPKFEAKACS

SEQ ID NO: 18872 - protein, 410 aa, Zea mays subsp. mays
  peptide (1)..(410): Ceres Seq. ID no. 12368486
MDRWDKLNDLFERTGAIVTFGVNALYGRYNVRRSIWAGKWNSTNAYDFVKYTISKGYPVGSWEFGNELSGHGIGAKVDAKLYGKDVIEFKSILRQLYKAPLSQPLLLAPGGFFDQQWYSQLLETSGHGVVNALSHHVYNLGGGNDVHLIRKILDPKYLDRAEDTYRDMQLTIQRHGTWASAWVSESGGVFNNGGQLVSNTFINSIWYLDQLGMASKYNTKVFCRQTLIGGNYGLLDTQTFLPNPDYYSALLWHRLMGNGVLSVDINAPRQIRAYAHCRKQQQGITILLINLSNTTGYNVTLQNDINVSLGKRPDLEKRSSFTHRLRKAVSWLGRKPASNTRRREEYHLTAKDGDLQSKTMLLNGAPLELGDAGSIPAMDPVLVAVDLPVQLAPTSIAFVVLPKFEAKACS

SEQ ID NO: 18873 - DNA, 483 bp, Zea mays subsp. mays
  misc_feature (1)..(483): Ceres Seq. ID no. 1846912
  misc_feature (1)..(483): Ortholog of  Ceres SEQ ID NO 13600220 as cited in SEQ ID NO 0
gggattcattcgcgcacgtcccaggaaatattgcagggaatcaaaatggagacgttgcagtggatcaataccatcgctacaaggaagacgtcgatctcatgaaaagtttgaactttgatgcctaccggttctcaatctcatggtccaggatcttcccggatggcgaagggaaagtcaatccagaaggtgtagcgtattacaataatttgataaactatctgcttcagcaaggcatgactccttacatcaacctttaccactatgatcttcctcttgcgcttgagaagaaatatggagggtggttaagcgcgaagatggcggacttgtttacagactatgctgacttctgttttaagacctacggcgatcgcgtaaagcactggtttacattcaatgagccaaggatagtagcgctacttggctatgacacagggtcaaatcctcctcaaaggtgcacagatgcgctgctggtgggaattcagc

SEQ ID NO: 18874 - protein, 160 aa, Zea mays subsp. mays
  peptide (1)..(160): Ceres Seq. ID no. 1846913
DSFAHVPGNIAGNQNGDVAVDQYHRYKEDVDLMKSLNFDAYRFSISWSRIFPDGEGKVNPEGVAYYNNLINYLLQQGMTPYINLYHYDLPLALEKKYGGWLSAKMADLFTDYADFCFKTYGDRVKHWFTFNEPRIVALLGYDTGSNPPQRCTDALLVGIQ

SEQ ID NO: 18875 - protein, 128 aa, Zea mays subsp. mays
  peptide (1)..(128): Ceres Seq. ID no. 1846914
MKSLNFDAYRFSISWSRIFPDGEGKVNPEGVAYYNNLINYLLQQGMTPYINLYHYDLPLALEKKYGGWLSAKMADLFTDYADFCFKTYGDRVKHWFTFNEPRIVALLGYDTGSNPPQRCTDALLVGIQ

SEQ ID NO: 18876 - protein, 83 aa, Zea mays subsp. mays
  peptide (1)..(83): Ceres Seq. ID no. 1846915
MTPYINLYHYDLPLALEKKYGGWLSAKMADLFTDYADFCFKTYGDRVKHWFTFNEPRIVALLGYDTGSNPPQRCTDALLVGIQ

SEQ ID NO: 18877 - DNA, 692 bp, Zea mays subsp. mays
  misc_feature (1)..(692): Ceres Seq. ID no. 12375668
  misc_feature (1)..(692): Ortholog of  Ceres SEQ ID NO 13583909 as cited in SEQ ID NO 63232
gagaactcacattgcggttgcggacctcagcttgcccactacagagctaaccaaaagagatgaaagggagcctttcccacgagctcgagacggggctcccagccgccgacgtgtgggaggtctacggaggcctccttgttggggacttgattccccagctgcttcctcaagttttctcaaaggttgaactcgtagagggagacggtggagttggaacggttctgctcgtcactctcccgccagggactcctggatcagaggctttcaaagagaagttcgtcaaggtcgatgacgaaaaccgcgtcaaggagtgcctggtaaccgagggaagcttttttgaccgtggcttcaagaaatacctggtgcgaatcgagatcataggagaagatcgggaggcatccaccataagatcaactatcgagtacgaagttgaccaggagcatgcaggcaacccccctgttgccagtagcagtggcttggctactatcgctaaggccatcgcagaatatatcatcaagcagaagaagaaaggtcctcctgagtcctgagtaattaagctcccatgtaatcaactccgggaagaaaggatattatattatatcgtgtatatgtttgatcagtgaacaactgaagttaatttgtgtctaccaatgaacaaatagaatacggtaacgagcgaatggttgccattt

SEQ ID NO: 18878 - protein, 162 aa, Zea mays subsp. mays
  peptide (1)..(162): Ceres Seq. ID no. 12375669
MKGSLSHELETGLPAADVWEVYGGLLVGDLIPQLLPQVFSKVELVEGDGGVGTVLLVTLPPGTPGSEAFKEKFVKVDDENRVKECLVTEGSFFDRGFKKYLVRIEIIGEDREASTIRSTIEYEVDQEHAGNPPVASSSGLATIAKAIAEYIIKQKKKGPPES

SEQ ID NO: 18879 - DNA, 1842 bp, Zea mays subsp. mays
  misc_feature (1)..(1842): Ceres Seq. ID no. 12375598
  misc_feature (1)..(1842): Ortholog of  Ceres SEQ ID NO 15172174 as cited in SEQ ID NO 60481
  misc_feature (1)..(1842): Ortholog of  Ceres SEQ ID NO 15176081 as cited in SEQ ID NO 65838
  misc_feature (1)..(1842): Ortholog of  Ceres SEQ ID NO 14302875 as cited in SEQ ID NO 66242
  misc_feature (1)..(1842): Ortholog of  Ceres SEQ ID NO 13660287 as cited in SEQ ID NO 67316
  misc_feature (1)..(1842): Ortholog of  Ceres SEQ ID NO 14307892 as cited in SEQ ID NO 67490
atccacacatgcagctccaagcatcggtacggcactgagcatcggtgaggcaggcgacgcgcgccgcgcgagagaggcgcctcgcctggggagacagggagggtggccgagcccgagatggccgccgcgagggaggaggacgaggcggcacggccgctgcttctgctgccgcggacggcgcaggaggaccagaagtggtggaggcggtgggcgcgcgaggccgggtgggtggggtacctggccctgcccatggtggtggtgaacctgtcgcagtacgccgtccaggtgtcgtccaacatgatggtggggcacctccccggcgtgctcccgctctcctccgccgccatcgccacctccctcgccaacgtctccgggttcagcctcctgatcggaatggcaagtgcactggagacgctatgcggccaggcctacggtgcgaagcagtaccataagctaggcctagacacctacagagcggtcgtcaccctcctggtggtctgcgtccccctctcgctcctctgggtgttcatggacaagatcctggtcctcataggccaggaccctctcatctcgcaaggcgccgggaggtacatggtctggctgatcccggggctcttcgccaacgcggtgatccagccgctcaccaagttcctgcagacgcagagcctcatctacccgctgctgctgtcgtccgcggcgacggcggcggtccacgtccccctgtgctacgtgatggtgttcaagaccgggctcgggtacacgggcgccgccctgaccataagcatatcgtactggctgaacgtggccatgctcgtcggatacatcgccttctccagctcttgcaaggagacgcgcgcgcgcccgacggtcgaggtcttcaggggagtcgacgcgttcctgcgtctcgccctgccttctgcgctcatgatgtgtcttgaatggtggtcgtttgagctccttactctcatgtcagggcttctacccaacccagagctgcagacctcagtgctttcgatctgtctcacgagtgtaacattactcttcactataccttttggccttggagctgctggaagcacgcgagtggcaaatgagctgggcgctgggaaccctgacggagctcgatcagcagtccgcgtggtgctgtccatggcggggatcgacgcggtcgtcgtgagcggaagccttctggcggcccggcgcctcgtgggcatcgcgtacagcagcgaggaggaggtcatatctgcggtcgccgccatggttcctctggtctgcatcaccgccataactgactgcctacaaggaatcctctcaggcgtcgcccgcgggtgcgggtggcagcacctgggcgcgtacgtgaacctcggctcgttctacctgctggggatcccgatggcgatcctcctcggctttgtgctgcgcatggggtcgagggggctctggatgggcatcgtctgcggctccctgtcgcagaccacgctcatgtccgccatcacgttcttcaccgactggaacaagatggctgagaaggctagagagagggtgttcagcgacaagcagccacaagagccggggccatgatttgtacgccgactagcggcagctgcacatttttccagaccggttttgcaggggatcggaaggcgtttgcttgtcattccgtcgcattcacgaggagggagggggtcatgcctccctcctgcaaagtttctcacaaggcaaatgggttcttgctttgaacttcgccttcctacgtttgatttttgtatcatgtaaagtggagaggaacatggaacgaacaaattggacctcatatatgactaacaaggcgaaaatcatctc

SEQ ID NO: 18880 - protein, 487 aa, Zea mays subsp. mays
  peptide (1)..(487): Ceres Seq. ID no. 12375599
MAAAREEDEAARPLLLLPRTAQEDQKWWRRWAREAGWVGYLALPMVVVNLSQYAVQVSSNMMVGHLPGVLPLSSAAIATSLANVSGFSLLIGMASALETLCGQAYGAKQYHKLGLDTYRAVVTLLVVCVPLSLLWVFMDKILVLIGQDPLISQGAGRYMVWLIPGLFANAVIQPLTKFLQTQSLIYPLLLSSAATAAVHVPLCYVMVFKTGLGYTGAALTISISYWLNVAMLVGYIAFSSSCKETRARPTVEVFRGVDAFLRLALPSALMMCLEWWSFELLTLMSGLLPNPELQTSVLSICLTSVTLLFTIPFGLGAAGSTRVANELGAGNPDGARSAVRVVLSMAGIDAVVVSGSLLAARRLVGIAYSSEEEVISAVAAMVPLVCITAITDCLQGILSGVARGCGWQHLGAYVNLGSFYLLGIPMAILLGFVLRMGSRGLWMGIVCGSLSQTTLMSAITFFTDWNKMAEKARERVFSDKQPQEPGP

SEQ ID NO: 18881 - protein, 443 aa, Zea mays subsp. mays
  peptide (1)..(443): Ceres Seq. ID no. 12375600
MVVVNLSQYAVQVSSNMMVGHLPGVLPLSSAAIATSLANVSGFSLLIGMASALETLCGQAYGAKQYHKLGLDTYRAVVTLLVVCVPLSLLWVFMDKILVLIGQDPLISQGAGRYMVWLIPGLFANAVIQPLTKFLQTQSLIYPLLLSSAATAAVHVPLCYVMVFKTGLGYTGAALTISISYWLNVAMLVGYIAFSSSCKETRARPTVEVFRGVDAFLRLALPSALMMCLEWWSFELLTLMSGLLPNPELQTSVLSICLTSVTLLFTIPFGLGAAGSTRVANELGAGNPDGARSAVRVVLSMAGIDAVVVSGSLLAARRLVGIAYSSEEEVISAVAAMVPLVCITAITDCLQGILSGVARGCGWQHLGAYVNLGSFYLLGIPMAILLGFVLRMGSRGLWMGIVCGSLSQTTLMSAITFFTDWNKMAEKARERVFSDKQPQEPGP

SEQ ID NO: 18882 - protein, 427 aa, Zea mays subsp. mays
  peptide (1)..(427): Ceres Seq. ID no. 12375601
MMVGHLPGVLPLSSAAIATSLANVSGFSLLIGMASALETLCGQAYGAKQYHKLGLDTYRAVVTLLVVCVPLSLLWVFMDKILVLIGQDPLISQGAGRYMVWLIPGLFANAVIQPLTKFLQTQSLIYPLLLSSAATAAVHVPLCYVMVFKTGLGYTGAALTISISYWLNVAMLVGYIAFSSSCKETRARPTVEVFRGVDAFLRLALPSALMMCLEWWSFELLTLMSGLLPNPELQTSVLSICLTSVTLLFTIPFGLGAAGSTRVANELGAGNPDGARSAVRVVLSMAGIDAVVVSGSLLAARRLVGIAYSSEEEVISAVAAMVPLVCITAITDCLQGILSGVARGCGWQHLGAYVNLGSFYLLGIPMAILLGFVLRMGSRGLWMGIVCGSLSQTTLMSAITFFTDWNKMAEKARERVFSDKQPQEPGP

SEQ ID NO: 18883 - DNA, 1102 bp, Zea mays subsp. mays
  misc_feature (1)..(1102): Ceres Seq. ID no. 12435527
  misc_feature (1)..(1102): Ortholog of  Ceres SEQ ID NO 12484482 as cited in SEQ ID NO 53324
  misc_feature (1)..(1102): Ortholog of  Ceres SEQ ID NO 15176234 as cited in SEQ ID NO 54949
  misc_feature (1)..(1102): Ortholog of  Ceres SEQ ID NO 13594048 as cited in SEQ ID NO 58604
  misc_feature (1)..(1102): Ortholog of  Ceres SEQ ID NO 14314507 as cited in SEQ ID NO 59337
gcacgagaccattacctagaacatcctaatcgaaaaaatggattattggatggatgaaggtctgggcgggctgggtgtggacgagacgacgctggtgtccgcgctggggcggtggcggcgggagccggagaagcgggcgcagttccggcgcggcttcccgggcttcttctcgtcgagcgccggcgccgggatcgagcggtgcgaggacgagtacctgctgcacctcaaggcggagttcgcgcgcttcaaggacgcggcggtgctgtgggcgatgcacccgtgggagcgcgacgcgcgctgggcgcaccacgtgctgcacaaggcgcacccgccgcacatcctcgtcgaggtcgcctgcacgcgcgccgccgacgacctgctcggcgcccgccgcgcgtaccaggcgctctaccaccgctcgctcgaggaggacgtcgcgtaccgcgtcagggacgccaacgccagtctgctgttggggctggtgagcgcgtaccggtacgagggcgcgcgcgtgaacgaggacctcgccactgaggaagccaaggcgctggccgccgccgttagggccgcgccggcggcggcgaccaagctagtgcagaacgagcaggtggtgcgggtgctggttaccagaagcaagccccatctcggggccaccttcagggtctacatggagctgcacggcaagccgcttgaagaggaactgcccgccgagccgtgcctgcgagaggccgtcaggtgcttggactcgccgcccaagtacttcagcgaggtgatccacagggcgttcagcgacgacgcggacaggtaggccaaggcggcgctcacccgcgtcctcgtgtcccgcgccgacacggacatggaggatatcaaggacgcctacaccaggcagtacgggaccaagctcgccgacgccgtggccaagaacacccacggccactacaaggaagcgctgctcgccatcatcggcaagtgaaaggaacccagggtgtcgtgtggccacatgaataataacacgttctttcaaatgaaacagttaaataagattgtacccatctctgcggaatagataaaagaagagcattctgttgtcatgttatgactg

SEQ ID NO: 18884 - protein, 256 aa, Zea mays subsp. mays
  peptide (1)..(256): Ceres Seq. ID no. 12435528
MDYWMDEGLGGLGVDETTLVSALGRWRREPEKRAQFRRGFPGFFSSSAGAGIERCEDEYLLHLKAEFARFKDAAVLWAMHPWERDARWAHHVLHKAHPPHILVEVACTRAADDLLGARRAYQALYHRSLEEDVAYRVRDANASLLLGLVSAYRYEGARVNEDLATEEAKALAAAVRAAPAAATKLVQNEQVVRVLVTRSKPHLGATFRVYMELHGKPLEEELPAEPCLREAVRCLDSPPKYFSEVIHRAFSDDADR

SEQ ID NO: 18885 - protein, 252 aa, Zea mays subsp. mays
  peptide (1)..(252): Ceres Seq. ID no. 12435529
MDEGLGGLGVDETTLVSALGRWRREPEKRAQFRRGFPGFFSSSAGAGIERCEDEYLLHLKAEFARFKDAAVLWAMHPWERDARWAHHVLHKAHPPHILVEVACTRAADDLLGARRAYQALYHRSLEEDVAYRVRDANASLLLGLVSAYRYEGARVNEDLATEEAKALAAAVRAAPAAATKLVQNEQVVRVLVTRSKPHLGATFRVYMELHGKPLEEELPAEPCLREAVRCLDSPPKYFSEVIHRAFSDDADR

SEQ ID NO: 18886 - protein, 178 aa, Zea mays subsp. mays
  peptide (1)..(178): Ceres Seq. ID no. 12435530
MHPWERDARWAHHVLHKAHPPHILVEVACTRAADDLLGARRAYQALYHRSLEEDVAYRVRDANASLLLGLVSAYRYEGARVNEDLATEEAKALAAAVRAAPAAATKLVQNEQVVRVLVTRSKPHLGATFRVYMELHGKPLEEELPAEPCLREAVRCLDSPPKYFSEVIHRAFSDDADR

SEQ ID NO: 18887 - DNA, 1253 bp, Zea mays subsp. mays
  misc_feature (1)..(1253): Ceres Seq. ID no. 12360598
  misc_feature (1)..(1253): Ortholog of  Ceres SEQ ID NO 13597590 as cited in SEQ ID NO 60707
  misc_feature (1)..(1253): Ortholog of  Ceres SEQ ID NO 14309283 as cited in SEQ ID NO 0
gcacgagaccattacctagaacatcctaatcgaaaaagaaagctgaaagcctgagcctgactaccgacgagtgacgagccatggagctccgcgagctgggcggtacgggtctccgcgtcagcaccgtcggctttggtgcctccccgcttggcaacgttttcggggacgtgccccgcgacaccgctcgcgccgccgtccgccgcgcgctcgacctcggcatcaacttcttcgatacctcgccgtactacggtggcacgatatcggagtcagtcctcggagattgcctccgccacgcggccgttccgcgggaccgagtcatcgtcgccaccaagtgcggccgctacaaagacgagggtttcgacttctccgccaaccgtgtgacacgcagcatagacgagagcctcgcccgactggggctggactacgtcgacatcctccacgctcatgacatcgagttcacccatctcgaacagattgtgaatgagacaattcccgcactccagaagatcaaggagaatgggaaggcacggttcattggcatcaccgggttgcctctcagcatctacccttatgtcctcgaccgtgtagcaccaggctcggtggacgtgattctatcttattgtcactacgggatcaatgacacctcccttgttgatctgctcccctacttgaagagcaaaggtgttggggttatcagtgcttcgcccctctccatgggtcttttaacagataatgggccaccggagtggcaccctgcaccagaagaacttaagtcagcatgcaaggctgcagcagatcactgtagaaagaaggggaaaagcattacgaagctagctatgcagtacagcttaatgaacaatgaaatctcgacagttcttgttggaatgaactctttggaacaggtggaggagaatgtggcggctgcactggagttgtcaacatcaggcatcgatgatgaacttctgcgtgaagttgaagcaattcttgagcctgtgaagaatctgacatggcctagcggcatccaacaagcctgacggccagaagcagctttgcctaactggagaagctggcatgatgggcgtatcactgctgttcgatgcagtcaattgtacacaccagcatcattggctgctgattgcaaaatttgcaatgcccgtatggtcattgatggaaggggactgttgggctttgtggtaatttagacatgtcgaataaacgcgcaacgcgagcaatgaaagatcgatgctgaaccg

SEQ ID NO: 18888 - protein, 317 aa, Zea mays subsp. mays
  peptide (1)..(317): Ceres Seq. ID no. 12360599
MELRELGGTGLRVSTVGFGASPLGNVFGDVPRDTARAAVRRALDLGINFFDTSPYYGGTISESVLGDCLRHAAVPRDRVIVATKCGRYKDEGFDFSANRVTRSIDESLARLGLDYVDILHAHDIEFTHLEQIVNETIPALQKIKENGKARFIGITGLPLSIYPYVLDRVAPGSVDVILSYCHYGINDTSLVDLLPYLKSKGVGVISASPLSMGLLTDNGPPEWHPAPEELKSACKAAADHCRKKGKSITKLAMQYSLMNNEISTVLVGMNSLEQVEENVAAALELSTSGIDDELLREVEAILEPVKNLTWPSGIQQA

SEQ ID NO: 18889 - DNA, 443 bp, Zea mays subsp. mays
  misc_feature (1)..(443): Ceres Seq. ID no. 5760569
  misc_feature (1)..(443): Ortholog of  Ceres SEQ ID NO 12621592 as cited in SEQ ID NO 67016
agcgacccaggcgtcacggcgtgatgcagttcctccgaggcagcggcggcggggcggtgggttcccgggggttgcgtgggaggtgttgcggcgnmactdmtctaagaagcggtccgtggacgtgaggcggatcaaccccaaggtgcccaaggaggaggccgtcgccatttccggccgactcctccagatcctctccgaccatgggcccctcaccgtcggcaacacctggaaccacgccaaggatgctggcatcgctggcctgaacagcaagacgcacatgaagatcctgctgaaatggatgacggggagaaatgtcgtgaagctgacctgcgtgcacgtgggcaacgcgaagaagttcctctactccccgtccactgaaagcagcagcagcagcgccggcgcatcaccgtcatccacatcggcctcgcagtgacagtcagtcg

SEQ ID NO: 18890 - protein, 143 aa, Zea mays subsp. mays
  peptide (1)..(143): Ceres Seq. ID no. 5760570
  misc_feature (31)..(31): Xaa is any aa, unknown or other
  misc_feature (32)..(32): Xaa is any aa, unknown or other
  misc_feature (33)..(33): Xaa is any aa, unknown or other
ATQASRRDAVPPRQRRRGGGFPGVAWEVLRXXXSKKRSVDVRRINPKVPKEEAVAISGRLLQILSDHGPLTVGNTWNHAKDAGIAGLNSKTHMKILLKWMTGRNVVKLTCVHVGNAKKFLYSPSTESSSSSAGASPSSTSASQ

SEQ ID NO: 18891 - DNA, 1657 bp, Zea mays subsp. mays; identical to SEQ ID NO: 7414
  misc_feature (1)..(1657): Ceres Seq. ID no. 12548275
  misc_feature (1)..(1657): Ortholog of  Ceres SEQ ID NO 14308813 as cited in SEQ ID NO 55485
  misc_feature (1)..(1657): Ortholog of  Ceres SEQ ID NO 13655744 as cited in SEQ ID NO 64032
  misc_feature (1)..(1657): Ortholog of  Ceres SEQ ID NO 13590394 as cited in SEQ ID NO 66581

SEQ ID NO: 18892 - protein, 465 aa, Zea mays subsp. mays; identical to SEQ ID NO: 7415
  peptide (1)..(465): Ceres Seq. ID no. 12548276

SEQ ID NO: 18893 - protein, 376 aa, Zea mays subsp. mays; identical to SEQ ID NO: 7416
  peptide (1)..(376): Ceres Seq. ID no. 12548277

SEQ ID NO: 18894 - protein, 318 aa, Zea mays subsp. mays; identical to SEQ ID NO: 7417
  peptide (1)..(318): Ceres Seq. ID no. 12548278

SEQ ID NO: 18895 - DNA, 1540 bp, Zea mays subsp. mays
  misc_feature (1)..(1540): Ceres Seq. ID no. 12418818
  misc_feature (1)..(1540): Ortholog of  Ceres SEQ ID NO 15170037 as cited in SEQ ID NO 55447
  misc_feature (1)..(1540): Ortholog of  Ceres SEQ ID NO 13598527 as cited in SEQ ID NO 64914
gcacgagaccattacctagaacatcctaatcgaaaactttttcgaccaaccttcgtctccagactcgtccaccctataaattgtctcgccagatcattccaatccggcaactcctgctctgcctgagcctgagcgtaggcggctaccagagagaagggtaggcggcgccggcggcgggagcaatacaagagcggtaaatccaagagagatcagagcctcggagggaaacagaagcgcacagagcatggagagcccgatctcgaggactaacctgaattgcatcagcctggcggacccgaacgtccagaaatcagtggcgctcctcaagcaggcatgcctggattcaggcttcttctatgttgtggatcatgggataagccaagagttcatggatgaagtttttgcccagagcaagaagttctttgaccttcctcatagtgagaaaatgaagcttctccgagacgagaagaatagagggtacacacccatgctagatgaaattcttgatcctgaaaatcaagttaatggtgactacaaggaaggatattatattggagttgaggtacctgcagatgatccagaagcaaacaggccattttatggtccaaatcagtggccttctaaagaagtactaccaaaatggagagaagtgatggagcaatatcacagggaggcattgatagtagcaaaatcagtcgcaaggatcatcgctcttgctctagatctagacgtggacttcttcgatagacctgaaatgcttggcgagtccatagccacgctaaggctcctgcactacgaaggtggacaagaaacaggtaaggtgtcagatcctgcaaagggtgtttacggagcgggcgcccattcagactacggcctgataactctcctggcaaccgatgatgtagttgggctccaaatatgcaaggacaagaacgctcagcctcaactgtgggaatacgtagctccgttgaaaggcggatttatcgtcaaccttggcgacatgctcgaaaggtggagtaacggcgttttcaggtcaaccttacatcgagtggtcctagatgggcgagaacgctactcgatagcctacttcgtggaaccaagccacgactgcgtggtggagtgcctgccgacctgcaagtccgaatcaaatcctccaaagttccctccgatcacctgctccgcgtacctgtcccagcgctacaaggacactcacgcggatctgaaatcctacgacgacagcaaggcctgatcagaggactgccctctcctctctctgtctcagcgatcagtacgtacgacgtgtatcctgcaataacactgggtggagggcggcagtaccagtgtaccacagtatcagtataggtatagagagttctgttggtgccaccgtgccaccgtccatgtgttcatgtaagatgacgagaagaatcaagaacgggggccggcgttgaggtccccggccttaatctaggccttgttgttgctgtcgtgttgtgaggttcaatccccgagcttatcctttggtgctgttgagaggtcc

SEQ ID NO: 18896 - protein, 334 aa, Zea mays subsp. mays
  peptide (1)..(334): Ceres Seq. ID no. 12418819
MESPISRTNLNCISLADPNVQKSVALLKQACLDSGFFYVVDHGISQEFMDEVFAQSKKFFDLPHSEKMKLLRDEKNRGYTPMLDEILDPENQVNGDYKEGYYIGVEVPADDPEANRPFYGPNQWPSKEVLPKWREVMEQYHREALIVAKSVARIIALALDLDVDFFDRPEMLGESIATLRLLHYEGGQETGKVSDPAKGVYGAGAHSDYGLITLLATDDVVGLQICKDKNAQPQLWEYVAPLKGGFIVNLGDMLERWSNGVFRSTLHRVVLDGRERYSIAYFVEPSHDCVVECLPTCKSESNPPKFPPITCSAYLSQRYKDTHADLKSYDDSKA

SEQ ID NO: 18897 - protein, 286 aa, Zea mays subsp. mays
  peptide (1)..(286): Ceres Seq. ID no. 12418820
MDEVFAQSKKFFDLPHSEKMKLLRDEKNRGYTPMLDEILDPENQVNGDYKEGYYIGVEVPADDPEANRPFYGPNQWPSKEVLPKWREVMEQYHREALIVAKSVARIIALALDLDVDFFDRPEMLGESIATLRLLHYEGGQETGKVSDPAKGVYGAGAHSDYGLITLLATDDVVGLQICKDKNAQPQLWEYVAPLKGGFIVNLGDMLERWSNGVFRSTLHRVVLDGRERYSIAYFVEPSHDCVVECLPTCKSESNPPKFPPITCSAYLSQRYKDTHADLKSYDDSKA

SEQ ID NO: 18898 - protein, 267 aa, Zea mays subsp. mays
  peptide (1)..(267): Ceres Seq. ID no. 12418821
MKLLRDEKNRGYTPMLDEILDPENQVNGDYKEGYYIGVEVPADDPEANRPFYGPNQWPSKEVLPKWREVMEQYHREALIVAKSVARIIALALDLDVDFFDRPEMLGESIATLRLLHYEGGQETGKVSDPAKGVYGAGAHSDYGLITLLATDDVVGLQICKDKNAQPQLWEYVAPLKGGFIVNLGDMLERWSNGVFRSTLHRVVLDGRERYSIAYFVEPSHDCVVECLPTCKSESNPPKFPPITCSAYLSQRYKDTHADLKSYDDSKA

SEQ ID NO: 18899 - DNA, 1593 bp, Zea mays subsp. mays
  misc_feature (1)..(1593): Ceres Seq. ID no. 12359106
  misc_feature (1)..(1593): Ortholog of  Ceres SEQ ID NO 14314300 as cited in SEQ ID NO 57386
  misc_feature (1)..(1593): Ortholog of  Ceres SEQ ID NO 13596509 as cited in SEQ ID NO 62004
  misc_feature (1)..(1593): Ortholog of  Ceres SEQ ID NO 13500385 as cited in SEQ ID NO 67583
cttccctccccctccctgctcggtgctcgcacacgctggcgcggcttgcccccacgctgcgctcccaccaccaccactatataatccccgatcgcctcacgcacacgcaccgacccaccggccgacgaggggcgaccgccgcaacacaaatccacacgcccgccgccaccgccgccatacggacccactcctccttgccctggtgcgagcaggcttcggcagcaaaccccgcaggctgctcccggacgagggagaacgcgcggggctgggctagccgctagtcaggggaccgggggcggaggcagcgaggaggtacgtatggacaagtatgaggcggtgcgggacatcgggtcggggaacttcggggtggcgcggctgatgcgcaaccgcgagactcgagagctcgtcgccgtcaagtgcatcgagcgtggccaccggattgacgagaatgtgtacagggagatcatcaaccaccgctcgctgcgccatcccaacattattcgcttcaaggaggtgatacttacaccaacacatcttatgattctgatggagtttgcagcaggtggagagctttttgatcggatctgtgatcgtgggcggtttagtgaggatgaggcccggtatttctttcagcagttgatctgtggagtgagctattgccattacatgcaaatatgccatagagatctgaagctggagaagttctcttggatggcagcccagctccacggcttaagatctgcgattttggctattccaagtcatcagtgttgcattcaagacccaaatcagcagtaggaacgccagcatatattgcacctgaggtgctatcccgtcgcgagtatgatggaaagcttgcagacgtatggtcctgtggggtgactctttacgtcatgcttgtgggagcatacccatttgaagacccagatgaccccaagaatatacgcaagaccattcagcaaataatgcaagtgcaatacaagataccagatcatgtccacatatctacggaatgccagcaacttattgcccgtatctttgttgccaatccaatgaggagaatcacaatgaaggaaataaagagccatccatggtttttgaagaacctaccacgggaactcacggagactgcacaaggcatgtactacaggagggataacagggtcccttcttattcagaccaaacgtcggaagaaatcatgaagatagttcaagatgcaaggaccatgccgaaatcatccagatcaggctatgggtggagcagtgagtattcggatgaagaagaagagaaggaagaggaacacagaccagaggagcatgaggaagaggaagatgaatacgataggagggtgaaggaggtccatgcaagcggagaactccgtatggacgctcttcacatatgaaagctagtggaagagaaagttgcatgtagataactgggttgttgcggatctgaaggatccagtgggatgtatgcagttttggcttgagaatttgcttctgtttgtcaattttcatgtaacataatttaatacaccgagacaacagactaccatgttcttatattggtaaatatgaagcatgtaccttctg

SEQ ID NO: 18900 - protein, 169 aa, Zea mays subsp. mays
  peptide (1)..(169): Ceres Seq. ID no. 12359107
MLVGAYPFEDPDDPKNIRKTIQQIMQVQYKIPDHVHISTECQQLIARIFVANPMRRITMKEIKSHPWFLKNLPRELTETAQGMYYRRDNRVPSYSDQTSEEIMKIVQDARTMPKSSRSGYGWSSEYSDEEEEKEEEHRPEEHEEEEDEYDRRVKEVHASGELRMDALHI

SEQ ID NO: 18901 - protein, 159 aa, Zea mays subsp. mays
  peptide (1)..(159): Ceres Seq. ID no. 12359108
MDKYEAVRDIGSGNFGVARLMRNRETRELVAVKCIERGHRIDENVYREIINHRSLRHPNIIRFKEVILTPTHLMILMEFAAGGELFDRICDRGRFSEDEARYFFQQLICGVSYCHYMQICHRDLKLEKFSWMAAQLHGLRSAILAIPSHQCCIQDPNQQ

SEQ ID NO: 18902 - protein, 145 aa, Zea mays subsp. mays
  peptide (1)..(145): Ceres Seq. ID no. 12359109
MQVQYKIPDHVHISTECQQLIARIFVANPMRRITMKEIKSHPWFLKNLPRELTETAQGMYYRRDNRVPSYSDQTSEEIMKIVQDARTMPKSSRSGYGWSSEYSDEEEEKEEEHRPEEHEEEEDEYDRRVKEVHASGELRMDALHI

SEQ ID NO: 18903 - DNA, 1526 bp, Zea mays subsp. mays
  misc_feature (1)..(1526): Ceres Seq. ID no. 13492010
  misc_feature (1)..(1526): Ortholog of  Ceres SEQ ID NO 14304573 as cited in SEQ ID NO 53242
  misc_feature (1)..(1526): Ortholog of  Ceres SEQ ID NO 15171148 as cited in SEQ ID NO 58167
atccaaatggggcttatcgccaccatccaatcgaagctctggaacctcctccactcccagcttccgccgacgctcgcttcagctgctgctttccttcccatccttcaacaggtgcaatttgcatttcccatggagctcactgattaataacgtgtgagctgaacttgcttttctgtggacaatttggaacttcagtactagtttccgataggattcagggagaaatgatctcttttaacaatttattttggagctcccttcagccttctttcaagttttacagaaagtgcctgacaaactgcccatattttgcactgaccatgcattcaactacaaagcccttgggttcatctatgccggtaaagagggcgcatttgaagccacatgccgcagacatcaagaggaacccccatgtacatgagctttacaaattggtttaccgacttccggagaaccttagctggctgttggcaccaccagaaattcctaaaagacctgcctcaaagaagaaaaaacaaaaagacgaaatagtggccggtaacagctttggtgtgatcttggagtgggagggagttgttgtggatgatgatgatccagacttggagccccgggtttggtatgttctatcactagaagaggggaagtctttccctccagatgcattgctgaagaaaatcgagggaatgagaactgaccaggctattgcagaagtcttatgttggtcagaagatccagcagaaatccaaaggttggcaacacacaaggaggttatatatcaaaaacttcaaggtggatactaccagctgcgaccacatgtgcttgatttcttgaacacccttgtgggttttgacattccaatagcaattgcagctcctcgctcaaggaagagccttgaagaagggatcaaaactgttggtctgcaaggctacttcgatgctatagttgcattggaggacttctgcttagggaaacctgatggtgagatgtttgaagtcgcagcggagcaacttggtctggaaccagatgcctgtgttgtgtttggtaactcaaacttgacgacggaatctgcacataacgctgggatgaggtgtgtggcagttgcaggccgacaccctgcctatgagctccaatcagcaaaccatgttgtgagatggcttgatcagctctctattgttgacttgcagaggcttgctaatggtgaagttattggtcgcaggggtagagaatctgacatggatatggaaattgtgattgaggaatgatgatgtttctgcaaaaatgacgcactaatatattgttgtgcttataatctgatacacctaagtaatgcattacattttgtaaacaggccaagcagtgcaagttccggactaaggatactccggagtttgcattaccttcctggtttgcttgtgatgaattggaattcgcctaaaactcttttagtcattagagttggaagtgaagaaactcccacccgtaacttgtgtatgtacagtatatatatgtattacctattcttccct

SEQ ID NO: 18904 - protein, 345 aa, Zea mays subsp. mays
  peptide (1)..(345): Ceres Seq. ID no. 13492011
MISFNNLFWSSLQPSFKFYRKCLTNCPYFALTMHSTTKPLGSSMPVKRAHLKPHAADIKRNPHVHELYKLVYRLPENLSWLLAPPEIPKRPASKKKKQKDEIVAGNSFGVILEWEGVVVDDDDPDLEPRVWYVLSLEEGKSFPPDALLKKIEGMRTDQAIAEVLCWSEDPAEIQRLATHKEVIYQKLQGGYYQLRPHVLDFLNTLVGFDIPIAIAAPRSRKSLEEGIKTVGLQGYFDAIVALEDFCLGKPDGEMFEVAAEQLGLEPDACVVFGNSNLTTESAHNAGMRCVAVAGRHPAYELQSANHVVRWLDQLSIVDLQRLANGEVIGRRGRESDMDMEIVIEE

SEQ ID NO: 18905 - protein, 313 aa, Zea mays subsp. mays
  peptide (1)..(313): Ceres Seq. ID no. 13492012
MHSTTKPLGSSMPVKRAHLKPHAADIKRNPHVHELYKLVYRLPENLSWLLAPPEIPKRPASKKKKQKDEIVAGNSFGVILEWEGVVVDDDDPDLEPRVWYVLSLEEGKSFPPDALLKKIEGMRTDQAIAEVLCWSEDPAEIQRLATHKEVIYQKLQGGYYQLRPHVLDFLNTLVGFDIPIAIAAPRSRKSLEEGIKTVGLQGYFDAIVALEDFCLGKPDGEMFEVAAEQLGLEPDACVVFGNSNLTTESAHNAGMRCVAVAGRHPAYELQSANHVVRWLDQLSIVDLQRLANGEVIGRRGRESDMDMEIVIEE

SEQ ID NO: 18906 - protein, 302 aa, Zea mays subsp. mays
  peptide (1)..(302): Ceres Seq. ID no. 13492013
MPVKRAHLKPHAADIKRNPHVHELYKLVYRLPENLSWLLAPPEIPKRPASKKKKQKDEIVAGNSFGVILEWEGVVVDDDDPDLEPRVWYVLSLEEGKSFPPDALLKKIEGMRTDQAIAEVLCWSEDPAEIQRLATHKEVIYQKLQGGYYQLRPHVLDFLNTLVGFDIPIAIAAPRSRKSLEEGIKTVGLQGYFDAIVALEDFCLGKPDGEMFEVAAEQLGLEPDACVVFGNSNLTTESAHNAGMRCVAVAGRHPAYELQSANHVVRWLDQLSIVDLQRLANGEVIGRRGRESDMDMEIVIEE

SEQ ID NO: 18907 - DNA, 1058 bp, Zea mays subsp. mays
  misc_feature (1)..(1058): Ceres Seq. ID no. 12360632
  misc_feature (1)..(1058): Ortholog of  Ceres SEQ ID NO 13598499 as cited in SEQ ID NO 64013
aaaccctcacatacagatacagtacagttcacacactctcctgtctcctatccagccaccgaacgaagctagccaagatgtctcagttgctgcacctgccggacctcgcggcgccgcggaccaggatgggctcggcgctgccggcgggggcccgcgtcaagcagggggaggcggggacggcgagggggaggcgggtgctcaggctcgccgaccccgtgcggcgggagtgccgggtgccggtcccgctgccgccgccgccgctcctcgccgcggggaggcgcggagacgacgacgacgacgacggcgtcgacgaggataggcagaggtactacctcaacctgggctacgcgatccggacgctcagggaggagctccccgacgtgctctgcaaggaccacagcttcgacatctacagagaagacattgtcttcagagaccctctgaacacattcaagggcctgggaaactacaagaggctcttctgggcgctgcgcctcaccggccgggtcttcttcagggcgtcgtgggttgaagtggtcagcatatggcagcccgccgagaacagcatcctgcttcgctggaccgcccacggcgtccctcgggtgccctggggctggtgggacgccgcccacgcccgcttcgacggcgcgtccgtgtacaagctcgacaggaacggcaagatctacgagcacacggtgcacaacgtcgctacgaacccgccggccaagtccaaggtcctgccggtccacgagctggtcaggtcactcggttgcccctccactgccgaacccacctgttctgacttctgaagctttcgtcgtcgcagtgccatcttattattcgagaattaattatctgggagaaggataggcgtgggtttaacatggtacctccgaattttgcgttttttcagtgtgatttgatagcacacaaagttactgagtactcttggagttcagtgtgatttgatagcacacaaagttactgagtactcttggagttgtatatatgtatgtacagtgatagtttataaaataaaggcctgtcatttaaggtgt

SEQ ID NO: 18908 - protein, 268 aa, Zea mays subsp. mays
  peptide (1)..(268): Ceres Seq. ID no. 12360633
TLTYRYSTVHTLSCLLSSHRTKLAKMSQLLHLPDLAAPRTRMGSALPAGARVKQGEAGTARGRRVLRLADPVRRECRVPVPLPPPPLLAAGRRGDDDDDDGVDEDRQRYYLNLGYAIRTLREELPDVLCKDHSFDIYREDIVFRDPLNTFKGLGNYKRLFWALRLTGRVFFRASWVEVVSIWQPAENSILLRWTAHGVPRVPWGWWDAAHARFDGASVYKLDRNGKIYEHTVHNVATNPPAKSKVLPVHELVRSLGCPSTAEPTCSDF

SEQ ID NO: 18909 - protein, 243 aa, Zea mays subsp. mays
  peptide (1)..(243): Ceres Seq. ID no. 12360634
MSQLLHLPDLAAPRTRMGSALPAGARVKQGEAGTARGRRVLRLADPVRRECRVPVPLPPPPLLAAGRRGDDDDDDGVDEDRQRYYLNLGYAIRTLREELPDVLCKDHSFDIYREDIVFRDPLNTFKGLGNYKRLFWALRLTGRVFFRASWVEVVSIWQPAENSILLRWTAHGVPRVPWGWWDAAHARFDGASVYKLDRNGKIYEHTVHNVATNPPAKSKVLPVHELVRSLGCPSTAEPTCSDF

SEQ ID NO: 18910 - protein, 227 aa, Zea mays subsp. mays
  peptide (1)..(227): Ceres Seq. ID no. 12360635
MGSALPAGARVKQGEAGTARGRRVLRLADPVRRECRVPVPLPPPPLLAAGRRGDDDDDDGVDEDRQRYYLNLGYAIRTLREELPDVLCKDHSFDIYREDIVFRDPLNTFKGLGNYKRLFWALRLTGRVFFRASWVEVVSIWQPAENSILLRWTAHGVPRVPWGWWDAAHARFDGASVYKLDRNGKIYEHTVHNVATNPPAKSKVLPVHELVRSLGCPSTAEPTCSDF

SEQ ID NO: 18911 - DNA, 1737 bp, Zea mays subsp. mays
  misc_feature (1)..(1737): Ceres Seq. ID no. 12435333
  misc_feature (1)..(1737): Ortholog of  Ceres SEQ ID NO 13656161 as cited in SEQ ID NO 64908
  misc_feature (1)..(1737): Ortholog of  Ceres SEQ ID NO 13597600 as cited in SEQ ID NO 65142
gcaaaagcgcacagttcccgttccccctccgacccgttcattccgcttggttttctcctcctccgtcctcttcgctccccgtcagaccatccctgtgaggctgtgacgcaaccgggcgccggcggtctctcctgcaccacagggcacgccgcctcccgcgcacgtgttctcctcttccggggattcagatctggggattgctattctgtccgtctgactccgtccgtcccgaggcgcggcgaggggagcgagatgggttacattggccaccacggcgtcgccacgctgcggcgctacaagtacagcggcgtcgaccactcgctcgtcgccaagtacatcctccagcccttctggtcccgattcgtcaacatcttcccgctatggttcccaccgaacatgattacactgacaggtttcatgtttctactgacatcagcattccttggctttttatattcaccccatctagatacagcaccccccagatgggttcaccttgctcatggactgcttctctttctttatcagacttttgatgctgtggatggaaaacaagcaaggcgtaccaactcatcaagtcctctaggcgagctttttgaccacggatgtgatgcgcttgcgtgtgcttttgaatccttggcttttggaagcacggcgatgtgtggaaaggctaccttctggttttggttcatttcagctgtcccattttacttcgcaacctgggaacacttttttacaaatacacttattcttcctatagtcaacggaccaactgaaggccttatgctgatctacttgtgccattttttcacctttttcacaggagccgagtggtgggcacaggattttcagaagtcaatgcccctgctgggttgggttcctcttatctctgaaatcccggtgtatgacattgtgctatgtcttatgattgcttttgctgtaatcccaacaattggatctaacatccacaatgtatataaagtcgttgaagcaagaaaaggaagcatgcttctggcactagccatgctctttccttttggtttgctcttggctggagttcttgtctggtcctacctttctccttcagatataatgagaacccaaccacatttgctaattattggaactggttttgcatttggatttcttgtgggaagaatgattctggctcacttgtgtgatgaacccaagggtttgaaaacagggatgtgcatgtcccttgcgtattttccatttgcaattgcaaacgcgttgactgcccggcttgatgatggaaatccactcgttgatgagcagctagtgctcctgatgtactgcctatttacagtggctctgtacatgcattttgctacatcagttattcatgagatcaccaatgcactcgggatccactgcttcaggatcactaggaaaaaggcatagttcctccgtccacgggcatcagcgttgccctggattgtgtaatcaatcacaactcacaaggtggtgcctgacagacaagcaatttttcatatttaatggatgctgcttcctgaatactcacatggatgacgcccccccgccccttaaaattcacatcggcatgaacgtgcggatgagaaagcagtgtttttttttgaaacaattagcaacatcatgctgtatcttaccaattttttgtggaattcgttgaatttgctgatagtgatgtattgcaaattaagaattgtttggattttgttaaaggaatgccccccc

SEQ ID NO: 18912 - protein, 473 aa, Zea mays subsp. mays
  peptide (1)..(473): Ceres Seq. ID no. 12435334
AKAHSSRSPSDPFIPLGFLLLRPLRSPSDHPCEAVTQPGAGGLSCTTGHAASRARVLLFRGFRSGDCYSVRLTPSVPRRGEGSEMGYIGHHGVATLRRYKYSGVDHSLVAKYILQPFWSRFVNIFPLWFPPNMITLTGFMFLLTSAFLGFLYSPHLDTAPPRWVHLAHGLLLFLYQTFDAVDGKQARRTNSSSPLGELFDHGCDALACAFESLAFGSTAMCGKATFWFWFISAVPFYFATWEHFFTNTLILPIVNGPTEGLMLIYLCHFFTFFTGAEWWAQDFQKSMPLLGWVPLISEIPVYDIVLCLMIAFAVIPTIGSNIHNVYKVVEARKGSMLLALAMLFPFGLLLAGVLVWSYLSPSDIMRTQPHLLIIGTGFAFGFLVGRMILAHLCDEPKGLKTGMCMSLAYFPFAIANALTARLDDGNPLVDEQLVLLMYCLFTVALYMHFATSVIHEITNALGIHCFRITRKKA

SEQ ID NO: 18913 - protein, 389 aa, Zea mays subsp. mays
  peptide (1)..(389): Ceres Seq. ID no. 12435335
MGYIGHHGVATLRRYKYSGVDHSLVAKYILQPFWSRFVNIFPLWFPPNMITLTGFMFLLTSAFLGFLYSPHLDTAPPRWVHLAHGLLLFLYQTFDAVDGKQARRTNSSSPLGELFDHGCDALACAFESLAFGSTAMCGKATFWFWFISAVPFYFATWEHFFTNTLILPIVNGPTEGLMLIYLCHFFTFFTGAEWWAQDFQKSMPLLGWVPLISEIPVYDIVLCLMIAFAVIPTIGSNIHNVYKVVEARKGSMLLALAMLFPFGLLLAGVLVWSYLSPSDIMRTQPHLLIIGTGFAFGFLVGRMILAHLCDEPKGLKTGMCMSLAYFPFAIANALTARLDDGNPLVDEQLVLLMYCLFTVALYMHFATSVIHEITNALGIHCFRITRKKA

SEQ ID NO: 18914 - protein, 341 aa, Zea mays subsp. mays
  peptide (1)..(341): Ceres Seq. ID no. 12435336
MITLTGFMFLLTSAFLGFLYSPHLDTAPPRWVHLAHGLLLFLYQTFDAVDGKQARRTNSSSPLGELFDHGCDALACAFESLAFGSTAMCGKATFWFWFISAVPFYFATWEHFFTNTLILPIVNGPTEGLMLIYLCHFFTFFTGAEWWAQDFQKSMPLLGWVPLISEIPVYDIVLCLMIAFAVIPTIGSNIHNVYKVVEARKGSMLLALAMLFPFGLLLAGVLVWSYLSPSDIMRTQPHLLIIGTGFAFGFLVGRMILAHLCDEPKGLKTGMCMSLAYFPFAIANALTARLDDGNPLVDEQLVLLMYCLFTVALYMHFATSVIHEITNALGIHCFRITRKKA

SEQ ID NO: 18915 - DNA, 883 bp, Zea mays subsp. mays
  misc_feature (1)..(883): Ceres Seq. ID no. 12382302
  misc_feature (1)..(883): Ortholog of  Ceres SEQ ID NO 15172948 as cited in SEQ ID NO 51777
  misc_feature (1)..(883): Ortholog of  Ceres SEQ ID NO 12784416 as cited in SEQ ID NO 61324
gctccaaccatattcaactgcgtaaggccaccctgtcatgcttgactggtcctcttgtgatatgttcatgttaatagcatgatgtcttttgttctattggaaaataaaaagtctccctggactctaaaatcaatgcctgtgaacacatgaactgtttgtgtcacccatgttcctctgctccttggcactttctgatgcatgctcaaatgcttaagaaagactcatagaagcgactcctattcctatgccaggtcattgagataccaaggggcagcaaggttaaatatgaacttgacaagaaaactggactgatcaaggtggaccgtgtgctgtattcatcagttgtttaccctcacaactatggattcattcctcgcacgctttgtgaagacagtgatcctttggatgtactggttataatgcaggagcctgttatcccaggctgtttcctacgtgcgaaggccatcggccttatgccgatgattgatcagggagaggcagatgacaagatcattgcagtgtgcgctgatgatcccgagtacaggcattacaatgatatcaaggagctcccacctcaccgcttggctgaaatcaggcgcttcttcgaggactacaagaagaatgagaacaaggaggttgctgtgaatgactttctaccagcgagcgccgcttatgaagccatacagcactctatggacctgtatgctacatacatcgttgagggcctgaggaggtaggattctgatggctaggaaaggtggggaggatgttgacgaaaaactgggagaccatttaccgcatggaacgagtaccgttattattttatttgtgtcgtgtatactgcagccagtaatagtaatctgcaactgtgcgttaaatggtc

SEQ ID NO: 18916 - protein, 105 aa, Zea mays subsp. mays
  peptide (1)..(105): Ceres Seq. ID no. 12382303
MQEPVIPGCFLRAKAIGLMPMIDQGEADDKIIAVCADDPEYRHYNDIKELPPHRLAEIRRFFEDYKKNENKEVAVNDFLPASAAYEAIQHSMDLYATYIVEGLRR

SEQ ID NO: 18917 - protein, 87 aa, Zea mays subsp. mays
  peptide (1)..(87): Ceres Seq. ID no. 12382304
MPMIDQGEADDKIIAVCADDPEYRHYNDIKELPPHRLAEIRRFFEDYKKNENKEVAVNDFLPASAAYEAIQHSMDLYATYIVEGLRR

SEQ ID NO: 18918 - protein, 85 aa, Zea mays subsp. mays
  peptide (1)..(85): Ceres Seq. ID no. 12382305
MIDQGEADDKIIAVCADDPEYRHYNDIKELPPHRLAEIRRFFEDYKKNENKEVAVNDFLPASAAYEAIQHSMDLYATYIVEGLRR

SEQ ID NO: 18919 - DNA, 1521 bp, Zea mays subsp. mays
  misc_feature (1)..(1521): Ceres Seq. ID no. 12375686
  misc_feature (1)..(1521): Ortholog of  Ceres SEQ ID NO 13594547 as cited in SEQ ID NO 51243
  misc_feature (1)..(1521): Ortholog of  Ceres SEQ ID NO 13661265 as cited in SEQ ID NO 61340
gcacgagaccattacctagaacatcctaatcgaaaaacaaacaatggctttccaccaaagatcagtgagcctgccgtccaagagcctcaccaaggaggccgaagtcgaggccgaactgcaaagcctggaggacgccgcctctcccccctcctcctcctcctcctcctcaaccgtcgcggcggtgcgcgacggtctgacgaggctcggagacgtgtacggacacatcgaggagatcgtccacctccccagtaaccaagcctgcaccgtccagcagcagcggaaggagctggacgcggagatggagcgctctctggacctcatcgacctctgcaacgcgacgcaggagagcctcgccgagctgaaggccgccgtccaggacctgctggcgggtctcaggaggagggacgacgcgagcgtccaggccaaggtccagtcgtacgtccgcctggccaagaacgcgcggaagcagctcaggaaggccggcaggagggccgctgccgcctctggcagggaggagcgcgagtgcagtctcgtcatcaggctgctgctcagggccaggctggtcgctgcctccctcctcggctcggcgctgcagtgcctcgcgggcgtggcgaagcaggtggtgactctgacgcccaggaggtcccttgtctccaaggcgttgcagaggagaagcaaggcggtcgtctgcgaggagggccagccggccaggtgctggcgctggagcgcgtcgtcgttggagagcttgagcgtggagcggagcttctgttcaggaggatggtccagaccagagtcgccctcctcaacgtccttagctcgtagatcctcctcgtcttcatgtgtagcgcgcgtcctgcgattggcctccgcgttttagaggatcctccaatctacatatgtgtacagtttttgtagatagatgtgcagtatgtagattgtatgatcaatgccctgcagaggatcttgaactggcgaagctgttggtaagacccggcttccagttcatggacgacccaacgatgaaggacgagacgctgctgacggacggcaactacgggtccgtgaagagggtgtttgtcgtcgccaaagccgacagaagcagcaccgaggagatgcagcgccggatggtggagctgagccccggcgcggacgtcgaggaggtcgccggagccgatcacatggccatgctctccaagccaacggaggtctgcgaagttctggtcaggattgccggcaggtacgactgagaagaagacgggcaatgggtgcttcagtctgctacgtacctttcagttcaagtgtgctggattgctagcaatgactgttatgcaagcgatccacaagtataatcgtgtaagcgagcttcctgatccgttagttcatgatccaagactgctagggggtgttgttttctttgcaagttcacagtcgctgacgcatgtgccatgtggagttgcgctgcagggattcaaactgattttaagaagcgtcatggctaaacgaataatgctacactttctt

SEQ ID NO: 18920 - protein, 277 aa, Zea mays subsp. mays
  peptide (1)..(277): Ceres Seq. ID no. 12375687
MAFHQRSVSLPSKSLTKEAEVEAELQSLEDAASPPSSSSSSSTVAAVRDGLTRLGDVYGHIEEIVHLPSNQACTVQQQRKELDAEMERSLDLIDLCNATQESLAELKAAVQDLLAGLRRRDDASVQAKVQSYVRLAKNARKQLRKAGRRAAAASGREERECSLVIRLLLRARLVAASLLGSALQCLAGVAKQVVTLTPRRSLVSKALQRRSKAVVCEEGQPARCWRWSASSLESLSVERSFCSGGWSRPESPSSTSLARRSSSSSCVARVLRLASAF

SEQ ID NO: 18921 - protein, 192 aa, Zea mays subsp. mays
  peptide (1)..(192): Ceres Seq. ID no. 12375688
MERSLDLIDLCNATQESLAELKAAVQDLLAGLRRRDDASVQAKVQSYVRLAKNARKQLRKAGRRAAAASGREERECSLVIRLLLRARLVAASLLGSALQCLAGVAKQVVTLTPRRSLVSKALQRRSKAVVCEEGQPARCWRWSASSLESLSVERSFCSGGWSRPESPSSTSLARRSSSSSCVARVLRLASAF

SEQ ID NO: 18922 - DNA, 1192 bp, Zea mays subsp. mays
  misc_feature (1)..(1192): Ceres Seq. ID no. 12420040
  misc_feature (1)..(1192): Ortholog of  Ceres SEQ ID NO 12583280 as cited in SEQ ID NO 56136
  misc_feature (1)..(1192): Ortholog of  Ceres SEQ ID NO 13595979 as cited in SEQ ID NO 68468
  misc_feature (1)..(1192): Ortholog of  Ceres SEQ ID NO 13654715 as cited in SEQ ID NO 68676
acaccactgatcaagcaacaggacgatcgagcaagaagcaagcagcagtaacaagaaaccatcatcgatccatgtatccaccaatggcggcgctcggaggacggcggaggagggcgtcgtcagcggccctcctgctagccttgttggcggtggccctggtctccctggccggcccagccacggccgcggggaacaagaccgggcaggtgaccgtgttctggggccggaacaaggccgagggcacgctgcgcgaggcctgcgactcgggcctctacaccatggtgatcatgtccttcctcgacgtctacggcccgcagcgcggcggctaccagtaccacctggacctgtcgggccacccgacggccggcatcggggacgacatcaagcactgccagttcgtgggcgtgccggtgacgctctccgtcggcggcttcggctccgggctactcgctcccgtcgacgcaggcggcgctggacctgttcgactacctctggaacgccttcctcggcgggtcgaagccgggcgtgcgccgccccttcggcgacgcgtggctcgacggcgtcgacctgttcctggagcgcggctcgcccgccgaccgctacgacgtgctggcgctcgagctcgccaagcacaacatccgcggcgggcccggcaagccgctgcacctgacggccacgccgcgctgcgggttcccgcccgccggctacctgcgccgcgcgctcgacacgggcatcttcgagcgcgtccacgtccggatctacgacgacgccgactgcgaggccaggtggcacctcgcgtgggacgagtggacggcggcgtacccggccaccaggttctacgtcggcctcacggcgtcggagatgacgcacggctgggtgcaccccaagaacgtctactacgacgtcgcgccgtccggcgcagaaggcggacaactacggcggcttcatgatctgggaccgctactacgacaaactctccaactacaccagcatggtcaaggactacgcttgattggatttctcgactcagttcagagcagacatgcatgctagctgcgtcagccgcttcgatctagctcaccgacctatataagccgaagtactgtgtagtgtgtttgcattttattgtaagaaactaagaaggaataaattggcgaataaacaagagtaaaatacaccgggttgttgagtg

SEQ ID NO: 18923 - protein, 315 aa, Zea mays subsp. mays
  peptide (1)..(315): Ceres Seq. ID no. 12420041
TTDQATGRSSKKQAAVTRNHHRSMYPPMAALGGRRRRASSAALLLALLAVALVSLAGPATAAGNKTGQVTVFWGRNKAEGTLREACDSGLYTMVIMSFLDVYGPQRGGYQYHLDLSGHPTAGIGDDIKHCQFVGVPVTLSVGGFGSGLLAPVDAGGAGPVRLPLERLPRRVEAGRAPPLRRRVARRRRPVPGARLARRPLRRAGARARQAQHPRRARQAAAPDGHAALRVPARRLPAPRARHGHLRARPRPDLRRRRLRGQVAPRVGRVDGGVPGHQVLRRPHGVGDDARLGAPQERLLRRRAVRRRRRTTTAAS

SEQ ID NO: 18924 - protein, 292 aa, Zea mays subsp. mays
  peptide (1)..(292): Ceres Seq. ID no. 12420042
MYPPMAALGGRRRRASSAALLLALLAVALVSLAGPATAAGNKTGQVTVFWGRNKAEGTLREACDSGLYTMVIMSFLDVYGPQRGGYQYHLDLSGHPTAGIGDDIKHCQFVGVPVTLSVGGFGSGLLAPVDAGGAGPVRLPLERLPRRVEAGRAPPLRRRVARRRRPVPGARLARRPLRRAGARARQAQHPRRARQAAAPDGHAALRVPARRLPAPRARHGHLRARPRPDLRRRRLRGQVAPRVGRVDGGVPGHQVLRRPHGVGDDARLGAPQERLLRRRAVRRRRRTTTAAS

SEQ ID NO: 18925 - protein, 288 aa, Zea mays subsp. mays
  peptide (1)..(288): Ceres Seq. ID no. 12420043
MAALGGRRRRASSAALLLALLAVALVSLAGPATAAGNKTGQVTVFWGRNKAEGTLREACDSGLYTMVIMSFLDVYGPQRGGYQYHLDLSGHPTAGIGDDIKHCQFVGVPVTLSVGGFGSGLLAPVDAGGAGPVRLPLERLPRRVEAGRAPPLRRRVARRRRPVPGARLARRPLRRAGARARQAQHPRRARQAAAPDGHAALRVPARRLPAPRARHGHLRARPRPDLRRRRLRGQVAPRVGRVDGGVPGHQVLRRPHGVGDDARLGAPQERLLRRRAVRRRRRTTTAAS

SEQ ID NO: 18926 - DNA, 1508 bp, Zea mays subsp. mays
  misc_feature (1)..(1508): Ceres Seq. ID no. 12359110
  misc_feature (1)..(1508): Ortholog of  Ceres SEQ ID NO 15177463 as cited in SEQ ID NO 0
atcttctctttgtgaaagctgaaacattgacaaatgctggcattccagtccgatcagtcctcaccagctactacaagagccctcagttcttgcagcgcaagcacgacctctacaacagctacaccagtcccgacgaggtcattctttgccccgacagccagcagagcatgtactgccagctactctgcggcctggtggaacgccagaacgtcgtccgtctcggagcagtcttcgcctcagcattcctccggtccatcagcttcctcgagaagcactggcatgacctagtcaccgacatccgaaccggccggatcaatcccagcatcaccaacgccgcatgccgggtggccacggagagctttctcgcgcagcccaaccccgagctagctgacgaagtcgaggcgatatgcagctcggagtcatggaagggcgttcttggcaggctctggcctaacgtcaagtacatcgaggccgtcctgacggggacgatggcgcagtacgtccccatgctcgagttctacagcgacggcaggatccccctggtctgcaccatgtacgcttcctcggagagctacttcggcgtcaacctgcggccgctgtgcagcccgaaggacgtgtcctacaccatcctccccaacatggcctacttcgagttcgtgccgttggacgacggcctcaggctggcggaggatggtgaggctgtggagaaggagaagcttgtcggcctcgtggacgtcaaggtcggatgctactacgagctcgtggttaccacatttgccggtctttacaggtacagggtaggcgatgtactccaggtgacaggcttctacaaccgcgcaccccagttcaaattcatctgccggaggaacgtgatcctgagcgtggacgcagacaagacgaacgaggaagacctccacggcagcgtctcccgggccaagaagatcctggaggaccgaggccacatcctactggagtacaccagcttcaccgacacgtcgacggtgccgggccactacgtcctgttctgggaggtgaaggccacgcccacctccggctccgggggcgcgcggctggacgcgcaggtcctggagagctgctgcgtcgccgtggaggagtcgctggactgcgtgtacaggcggtgcagggcgcacgacaggtccgtggggccgctggagatacggctggtggaagccggcgccttcgacgcgctcatggacctgttggtcagccagggcggctccatcaaccagtacaagacgccacggtgcatccgagccgggcggcgccgcgctggagctgctcgactccaaggccaccgcctcgttcttcagcccccgggatcctgaagctactggtgtctgaggttgttctgctactctgaaactaatcctctgctggatctaaataatctgagaattttcgtctgggttatccccgtttacattgcacttttgtcaggctttgctactatgcaaagaagccttttttctttatttgagattgtgatc

SEQ ID NO: 18927 - protein, 447 aa, Zea mays subsp. mays
  peptide (1)..(447): Ceres Seq. ID no. 12359111
LLFVKAETLTNAGIPVRSVLTSYYKSPQFLQRKHDLYNSYTSPDEVILCPDSQQSMYCQLLCGLVERQNVVRLGAVFASAFLRSISFLEKHWHDLVTDIRTGRINPSITNAACRVATESFLAQPNPELADEVEAICSSESWKGVLGRLWPNVKYIEAVLTGTMAQYVPMLEFYSDGRIPLVCTMYASSESYFGVNLRPLCSPKDVSYTILPNMAYFEFVPLDDGLRLAEDGEAVEKEKLVGLVDVKVGCYYELVVTTFAGLYRYRVGDVLQVTGFYNRAPQFKFICRRNVILSVDADKTNEEDLHGSVSRAKKILEDRGHILLEYTSFTDTSTVPGHYVLFWEVKATPTSGSGGARLDAQVLESCCVAVEESLDCVYRRCRAHDRSVGPLEIRLVEAGAFDALMDLLVSQGGSINQYKTPRCIRAGRRRAGAARLQGHRLVLQPPGS

SEQ ID NO: 18928 - protein, 392 aa, Zea mays subsp. mays
  peptide (1)..(392): Ceres Seq. ID no. 12359112
MYCQLLCGLVERQNVVRLGAVFASAFLRSISFLEKHWHDLVTDIRTGRINPSITNAACRVATESFLAQPNPELADEVEAICSSESWKGVLGRLWPNVKYIEAVLTGTMAQYVPMLEFYSDGRIPLVCTMYASSESYFGVNLRPLCSPKDVSYTILPNMAYFEFVPLDDGLRLAEDGEAVEKEKLVGLVDVKVGCYYELVVTTFAGLYRYRVGDVLQVTGFYNRAPQFKFICRRNVILSVDADKTNEEDLHGSVSRAKKILEDRGHILLEYTSFTDTSTVPGHYVLFWEVKATPTSGSGGARLDAQVLESCCVAVEESLDCVYRRCRAHDRSVGPLEIRLVEAGAFDALMDLLVSQGGSINQYKTPRCIRAGRRRAGAARLQGHRLVLQPPGS

SEQ ID NO: 18929 - protein, 285 aa, Zea mays subsp. mays
  peptide (1)..(285): Ceres Seq. ID no. 12359113
MAQYVPMLEFYSDGRIPLVCTMYASSESYFGVNLRPLCSPKDVSYTILPNMAYFEFVPLDDGLRLAEDGEAVEKEKLVGLVDVKVGCYYELVVTTFAGLYRYRVGDVLQVTGFYNRAPQFKFICRRNVILSVDADKTNEEDLHGSVSRAKKILEDRGHILLEYTSFTDTSTVPGHYVLFWEVKATPTSGSGGARLDAQVLESCCVAVEESLDCVYRRCRAHDRSVGPLEIRLVEAGAFDALMDLLVSQGGSINQYKTPRCIRAGRRRAGAARLQGHRLVLQPPGS

SEQ ID NO: 18930 - DNA, 938 bp, Zea mays subsp. mays
  misc_feature (1)..(938): Ceres Seq. ID no. 12367866
  misc_feature (1)..(938): Ortholog of  Ceres SEQ ID NO 13582332 as cited in SEQ ID NO 59890
  misc_feature (1)..(938): Ortholog of  Ceres SEQ ID NO 13598278 as cited in SEQ ID NO 68456
tcctgtatcaacatattcgctcatttgcgctagtcagctggccttcaatgctgtcttctcatatgtcctaaatgctcaaaagttcaccccattcattttcaactcagtaatcctccttacgttttccgctgcgcttcttggagtcgacgaagattctcagggtaccaatggtttatcgcgtgggaagtacatattgggtttcgcattgaccctaggagcctcggccacatactcactaattctctctctaatcaagtcgcattcgagaaggttattaagaaggaaactttctcagtcgtgttgaatatgcagatatatacagcactagtggcaacagtagcttctcttatcggtttatttgcaagcggcgagtggaagactttagagggagagatgcatgccttcagctcagggagagtgtcctatgtgatgacacttctatggactgctgtatcttggcagatagcttccgtaggagtggtgggtttgatctttgttgtgtcatcactcttttcaaatgtgataagcacactggctctacccatcattccgatttttgctgtgattttcttccacgacaagatggatggagtgaagattattgctatgttgatggccatctggggattcgtttcatatggatatcaattatatgtcagtgacaagaaggctaggaagacttcagtcagtgtggaggagaattcctaagcgcttgttggcctgttacattggtctttgtggctcctataccactttaagttgctggtattgaggaggtactagttattgacttattgtatccaaaaggagctcagttgagaatctcaggtttacacaattcataggtatatacttctgttagtattgtcatatcatcatatgtaccgatgtatggttgtgttgtcctttaaaataaaaagattagcatttccagaggc

SEQ ID NO: 18931 - protein, 133 aa, Zea mays subsp. mays
  peptide (1)..(133): Ceres Seq. ID no. 12367867
MQIYTALVATVASLIGLFASGEWKTLEGEMHAFSSGRVSYVMTLLWTAVSWQIASVGVVGLIFVVSSLFSNVISTLALPIIPIFAVIFFHDKMDGVKIIAMLMAIWGFVSYGYQLYVSDKKARKTSVSVEENS

SEQ ID NO: 18932 - protein, 104 aa, Zea mays subsp. mays
  peptide (1)..(104): Ceres Seq. ID no. 12367868
MHAFSSGRVSYVMTLLWTAVSWQIASVGVVGLIFVVSSLFSNVISTLALPIIPIFAVIFFHDKMDGVKIIAMLMAIWGFVSYGYQLYVSDKKARKTSVSVEENS

SEQ ID NO: 18933 - protein, 100 aa, Zea mays subsp. mays
  peptide (1)..(100): Ceres Seq. ID no. 12367869
PVSTYSLICASQLAFNAVFSYVLNAQKFTPFIFNSVILLTFSAALLGVDEDSQGTNGLSRGKYILGFALTLGASATYSLILSLIKSHSRRLLRRKLSQSC

SEQ ID NO: 18934 - DNA, 1841 bp, Zea mays subsp. mays
  misc_feature (1)..(1841): Ceres Seq. ID no. 12419338
  misc_feature (1)..(1841): Ortholog of  Ceres SEQ ID NO 15176273 as cited in SEQ ID NO 58534
gcacgagaccattacctagaacatcctaatcgaaaaacttgcgcatcggatcgcatcagctgctgcttttgtccaccaagcaacgattccctttccttccgccgcccaaatgccagtggccaccttcctcctcgtcgcgcttctctcgtgcggcgcacgagccatccggacgcacggcggctatgtctccgcggtcggggaccccggcatgcggcgcgacggcctccgcgtggcatgggaggcgtggaacttctgcaacgaggtcggccaggaggcccccggcatgggcagcccccgcggtgccgattgcttcgatcttctcggtccgtccattccatctctttctctcctctttcgccggggtggttgagtgggttgccaccaagattaggtttttgaggaagcgtggatctctgttccgttccgcagagacgagctccgacgaggagggggcggccggtgtactcggtggcgcacctggtgagcgacgccgacaaccgcctgggcgcgggcgacccgttcccggggtccccgccgggcgcggcccgcgtcacggacgccgacctctacgcgccggccaaggagctgtacctcggcgaccgctgccaggtggccgacaccccggcgccgtggcagttctggatggtcatgctcaagaacggcaacctcgacacaaccgccgccgcctgcccggagaacggccgccccgcgcgcccgttcccgcagacgtcccgcttcccgtgccccgccggcgccgggtgcatgaaccagccgctgctgttccacaaccgcaccgcgctggacgacgccggccgccggctccgcggcggcctgttcgggacctacgacctcgacgccgccgcgggtctcggcgctggcgacgtctccttctactccgggacgtgggagaaggaggtggcggcgagcggtcgcggcggcgggtgggcattccaccacaagctgcgcacgtccaccaagtacccgtggctgatgctgtacctacggtccgacgccacgaggggcttctccggcggttaccactacgacagcagaggcatgaccaagacagtgccggagtctccggacttcaaggtgcggctgaccctggacgtgaagcagggcggcgggcgcaacagccagttctacctgatggacatggtcagctgctggaagaacgacgggcgcgcctgcgacggcgacacggcgacggacgtgacgcggtacagcgagatgatcatcaacccggccacgccggcgtggtgctcgccgtcgcggatcgaccagtgcccgccatggcacaccttccggaacggcagccgcgtgcaccgccgcgacggagcccgcttcccctacggcgcctaccacgtgtactgctcccccgggaacgcggcgcgcgcggagcagcccaccacctactgcgacgcctacagcaacccgcaggcgcaggagatcctgcagctgctgccgcaccccgtgtggggagagttcggctacccgacggccaggggacaggggtgggtcggcgaccccagggcgtgggacctcgacgtcggcgccatgtcccaggcgctctacttctaccaggaccccggcacgccgccggccaggaggcggtggacgtcgctcgacgtcggcacggagatatacgtcagcgacagggccgaggaggcggagtggacgctcagtggcttcgacatccttgtgccggacaagtgtatcaagtcacagcaacgggccagcaacagctgctggtagacagacactttaatgtcactgtacgttacgctgagtagcatagcaggccaaagtgttcttcgtactagaagaggtggtgtaggatg

SEQ ID NO: 18935 - protein, 536 aa, Zea mays subsp. mays
  peptide (1)..(536): Ceres Seq. ID no. 12419339
MSPRSGTPACGATASAWHGRRGTSATRSARRPPAWAAPAVPIASIFSVRPFHLFLSSFAGVVEWVATKIRFLRKRGSLFRSAETSSDEEGAAGVLGGAPGERRRQPPGRGRPVPGVPAGRGPRHGRRPLRAGQGAVPRRPLPGGRHPGAVAVLDGHAQERQPRHNRRRLPGERPPRAPVPADVPLPVPRRRRVHEPAAAVPQPHRAGRRRPPAPRRPVRDLRPRRRRGSRRWRRLLLLRDVGEGGGGERSRRRVGIPPQAAHVHQVPVADAVPTVRRHEGLLRRLPLRQQRHDQDSAGVSGLQGAADPGREAGRRAQQPVLPDGHGQLLEERRARLRRRHGDGRDAVQRDDHQPGHAGVVLAVADRPVPAMAHLPERQPRAPPRRSPLPLRRLPRVLLPRERGARGAAHHLLRRLQQPAGAGDPAAAAAPRVGRVRLPDGQGTGVGRRPQGVGPRRRRHVPGALLLPGPRHAAGQEAVDVARRRHGDIRQRQGRGGGVDAQWLRHPCAGQVYQVTATGQQQLLVDRHFNVTVRYAE

SEQ ID NO: 18936 - protein, 370 aa, Zea mays subsp. mays
  peptide (1)..(370): Ceres Seq. ID no. 12419340
MVMLKNGNLDTTAAACPENGRPARPFPQTSRFPCPAGAGCMNQPLLFHNRTALDDAGRRLRGGLFGTYDLDAAAGLGAGDVSFYSGTWEKEVAASGRGGGWAFHHKLRTSTKYPWLMLYLRSDATRGFSGGYHYDSRGMTKTVPESPDFKVRLTLDVKQGGGRNSQFYLMDMVSCWKNDGRACDGDTATDVTRYSEMIINPATPAWCSPSRIDQCPPWHTFRNGSRVHRRDGARFPYGAYHVYCSPGNAARAEQPTTYCDAYSNPQAQEILQLLPHPVWGEFGYPTARGQGWVGDPRAWDLDVGAMSQALYFYQDPGTPPARRRWTSLDVGTEIYVSDRAEEAEWTLSGFDILVPDKCIKSQQRASNSCW

SEQ ID NO: 18937 - protein, 368 aa, Zea mays subsp. mays
  peptide (1)..(368): Ceres Seq. ID no. 12419341
MLKNGNLDTTAAACPENGRPARPFPQTSRFPCPAGAGCMNQPLLFHNRTALDDAGRRLRGGLFGTYDLDAAAGLGAGDVSFYSGTWEKEVAASGRGGGWAFHHKLRTSTKYPWLMLYLRSDATRGFSGGYHYDSRGMTKTVPESPDFKVRLTLDVKQGGGRNSQFYLMDMVSCWKNDGRACDGDTATDVTRYSEMIINPATPAWCSPSRIDQCPPWHTFRNGSRVHRRDGARFPYGAYHVYCSPGNAARAEQPTTYCDAYSNPQAQEILQLLPHPVWGEFGYPTARGQGWVGDPRAWDLDVGAMSQALYFYQDPGTPPARRRWTSLDVGTEIYVSDRAEEAEWTLSGFDILVPDKCIKSQQRASNSCW

SEQ ID NO: 18938 - DNA, 2076 bp, Zea mays subsp. mays
  misc_feature (1)..(2076): Ceres Seq. ID no. 12381770
  misc_feature (1)..(2076): Ortholog of  Ceres SEQ ID NO 15179918 as cited in SEQ ID NO 57077
gcacgagaccattacctagaacatcctaatcgaaaaatcaaaccgctctcctctccttccctgcccccccctcgcaaccccgaagaagcccccacacgcaaggccgcaaacgcgccgcgcaccgcaaggtcccagggagcgacacgaggcggcctcattgcagcatggctgctatggccgccgccgccgccgccgccgctggcggcgtcgggctccatctcattggcgctgccacggccacgctcatcgcggcggtccttgttgcggccgtgctggggcgccgccgccgggcccgggcccgggcccaggcgcctccggtggaagggaaacccgcgccggaggcaggctgcgcggtcggtgacggcgcgggtcccgacggcgggacggacgtcatcatcgtcggcgccggagtggctggatctgcgctggcgttacacgctcggaaaggatggccgccgggtgcatgtcatcgagagggatctgacagaacctgacagaattgtgggcgagctgttgcaacctggaggttacttgaaattaattgagttaggcctccaagattgtgtggaagaaattgatgcccaacgggtgcttggttacgcattattcaaagatggaagaaacacaaagcttgcttatcccttagagaagttccattctgatgttgctggtaggagctttcacaatgggaggtttatacagaggatgcgtcagaaagctgcgtctttgcccaatgttcaattagaacaaggaactgttacatcacttcttgaagaaaatggtactgttaaaggtgttcaatacaaaaccaagtcaggtgaagaactaaaagcttatgcgcccttgacgattgtatgtgatggctgcttttcaaatctacggcgtgccctttgctctccaaaagttgatgttccatcatgttttgttgggctggtattggagaattgccaacttccacatccaaaccatggccatgttatcttggccaatccttcgccaatactattttacccaattagcagcacagaggtgcgctgtttggttgatgtccctggtcagaaggtgccttccatagctagcggtgaaatggcaaattatctcaaaaccgtcgttgcaccccagattcctccagaaatctatgactctttcatagcggccattgataagggaagcataagaacaatgccaaacaggagcatgccagcggctccacttcctacccctggcgcacttctgatgggggatgctttcaatatgagacaccctttaactggtggaggaatgaccgttgcattatccgacatcgttgtcctacgcaatcttctcaagcctctccgcaatctccacgacgcatcttccctgtgcaagtacctcgaatcgttctatacgctgcggaagccggttgcctccaccataaacacgttgtccggtgctctgtacaaggtcttcagcgcctcgcctgatgaagctaggaacgagatgcgccaggcctgttttgattacttgagcctcggaggcgtcttctcgaatgggcctattgccttactctcgggtcttaatcctcggccactgagtttagttgcacacttcttcgctgtcgctatctacggtgtcggtcgcttgatgctccctcttccttcacctaaacggatgtggattggagccaggctgatttctggtgcatgcggcatcatcctcccgatcatcaaagctgaaggcgtgagacagatgttcttccctgccactgtacccgcatattaccgggctgcgcctacgggagaataagtaaagcgcgcgagaaccgattccggggctgctgctcatcccaccatgatctgatggcaactgatgtgtcatggatggcaatttttttccctgtgttagtggttgttaggtggttggttgtgcttctgtcattggaatgaggaacctgtatagtgtgcccctggatagtggtcaaagttgggtcctacccatgtcgattactgccaagttgtatatgattctgttgaactagtgaaacctgcccccatctataacgcgtatcaatcttggttgctcccctgccccccgagc

SEQ ID NO: 18939 - protein, 594 aa, Zea mays subsp. mays
  peptide (1)..(594): Ceres Seq. ID no. 12381771
ARDHYLEHPNRKIKPLSSPSLPPPRNPEEAPTRKAANAPRTARSQGATRGGLIAAWLLWPPPPPPPLAASGSISLALPRPRSSRRSLLRPCWGAAAGPGPGPRRLRWKGNPRRRQAARSVTARVPTAGRTSSSSAPEWLDLRWRYTLGKDGRRVHVIERDLTEPDRIVGELLQPGGYLKLIELGLQDCVEEIDAQRVLGYALFKDGRNTKLAYPLEKFHSDVAGRSFHNGRFIQRMRQKAASLPNVQLEQGTVTSLLEENGTVKGVQYKTKSGEELKAYAPLTIVCDGCFSNLRRALCSPKVDVPSCFVGLVLENCQLPHPNHGHVILANPSPILFYPISSTEVRCLVDVPGQKVPSIASGEMANYLKTVVAPQIPPEIYDSFIAAIDKGSIRTMPNRSMPAAPLPTPGALLMGDAFNMRHPLTGGGMTVALSDIVVLRNLLKPLRNLHDASSLCKYLESFYTLRKPVASTINTLSGALYKVFSASPDEARNEMRQACFDYLSLGGVFSNGPIALLSGLNPRPLSLVAHFFAVAIYGVGRLMLPLPSPKRMWIGARLISGACGIILPIIKAEGVRQMFFPATVPAYYRAAPTGE

SEQ ID NO: 18940 - protein, 359 aa, Zea mays subsp. mays
  peptide (1)..(359): Ceres Seq. ID no. 12381772
MRQKAASLPNVQLEQGTVTSLLEENGTVKGVQYKTKSGEELKAYAPLTIVCDGCFSNLRRALCSPKVDVPSCFVGLVLENCQLPHPNHGHVILANPSPILFYPISSTEVRCLVDVPGQKVPSIASGEMANYLKTVVAPQIPPEIYDSFIAAIDKGSIRTMPNRSMPAAPLPTPGALLMGDAFNMRHPLTGGGMTVALSDIVVLRNLLKPLRNLHDASSLCKYLESFYTLRKPVASTINTLSGALYKVFSASPDEARNEMRQACFDYLSLGGVFSNGPIALLSGLNPRPLSLVAHFFAVAIYGVGRLMLPLPSPKRMWIGARLISGACGIILPIIKAEGVRQMFFPATVPAYYRAAPTGE

SEQ ID NO: 18941 - DNA, 399 bp, Zea mays subsp. mays
  misc_feature (1)..(399): Ceres Seq. ID no. 12419441
  misc_feature (1)..(399): Ortholog of  Ceres SEQ ID NO 15227046 as cited in SEQ ID NO 0
atccatcgagctgcccgcgcgcggcagttaagctcacacatcagctagctcaccttggacggccgaccaggtacgttccgcgagatggaggtggacgagggcgaggaggagacggcccggaccggcaggtccgtcgaggagcagatctcgtcgtgggagaagatcgcgggtgacatctccaggatccccgcgatggtggagctggacctggcgcggtccgcgcggcagtggcgggagccgaggctggaggccagggaggtcggcgccaggatagagaccctcatcttcgatgacatcaggagggagaccgtgtgcgacatgctcgcctcgcattgtagatcggcggcggcggcggcggcagcagcaacgtcttgttgatcgaggtagtaggaggagggg

SEQ ID NO: 18942 - protein, 97 aa, Zea mays subsp. mays
  peptide (1)..(97): Ceres Seq. ID no. 12419442
MEVDEGEEETARTGRSVEEQISSWEKIAGDISRIPAMVELDLARSARQWREPRLEAREVGARIETLIFDDIRRETVCDMLASHCRSAAAAAAAATSC

SEQ ID NO: 18943 - protein, 61 aa, Zea mays subsp. mays
  peptide (1)..(61): Ceres Seq. ID no. 12419443
MVELDLARSARQWREPRLEAREVGARIETLIFDDIRRETVCDMLASHCRSAAAAAAAATSC

SEQ ID NO: 18944 - protein, 56 aa, Zea mays subsp. mays
  peptide (1)..(56): Ceres Seq. ID no. 12419444
PSSCPRAAVKLTHQLAHLGRPTRYVPRDGGGRGRGGDGPDRQVRRGADLVVGEDRG

SEQ ID NO: 18945 - DNA, 454 bp, Zea mays subsp. mays
  misc_feature (1)..(454): Ceres Seq. ID no. 4614316
  misc_feature (1)..(454): Ortholog of  Ceres SEQ ID NO 13597732 as cited in SEQ ID NO 64810
  misc_feature (1)..(454): Ortholog of  Ceres SEQ ID NO 14301912 as cited in SEQ ID NO 67786
caggtgcctctattttcttcgaaagcatgtcgtacaaggtgaacccacaaactgggtatattgattacgacaagctcgaggagagagcaatggatttccacccgaaaattctcatatgtggtgggagctcttaccccagagagtgggactttgctcggatgagattgattgctgataagtgtggtgcagtgcttctttgcgatatggcacatatcagtgggcttgttgcagcaaaggaatgtcgtagccctttcgactactgtgatgttgttacgtcaactactcacaagaatcttaggggccctagaggtggtataatattcttcaggaaagggaaaaatttaaggaaacgagctggatctttttctcaaggagatgagaatgaatacgacttcgaggataggataaattttggtgtttttccttcaatgcaaggggggcccataataatcat

SEQ ID NO: 18946 - protein, 150 aa, Zea mays subsp. mays
  peptide (1)..(150): Ceres Seq. ID no. 4614317
GASIFFESMSYKVNPQTGYIDYDKLEERAMDFHPKILICGGSSYPREWDFARMRLIADKCGAVLLCDMAHISGLVAAKECRSPFDYCDVVTSTTHKNLRGPRGGIIFFRKGKNLRKRAGSFSQGDENEYDFEDRINFGVFPSMQGGPIII

SEQ ID NO: 18947 - protein, 142 aa, Zea mays subsp. mays
  peptide (1)..(142): Ceres Seq. ID no. 4614318
MSYKVNPQTGYIDYDKLEERAMDFHPKILICGGSSYPREWDFARMRLIADKCGAVLLCDMAHISGLVAAKECRSPFDYCDVVTSTTHKNLRGPRGGIIFFRKGKNLRKRAGSFSQGDENEYDFEDRINFGVFPSMQGGPIII

SEQ ID NO: 18948 - protein, 121 aa, Zea mays subsp. mays
  peptide (1)..(121): Ceres Seq. ID no. 4614319
MDFHPKILICGGSSYPREWDFARMRLIADKCGAVLLCDMAHISGLVAAKECRSPFDYCDVVTSTTHKNLRGPRGGIIFFRKGKNLRKRAGSFSQGDENEYDFEDRINFGVFPSMQGGPIII

SEQ ID NO: 18949 - DNA, 1999 bp, Zea mays subsp. mays
  misc_feature (1)..(1999): Ceres Seq. ID no. 12359114
  misc_feature (1)..(1999): Ortholog of  Ceres SEQ ID NO 15171212 as cited in SEQ ID NO 56899
  misc_feature (1)..(1999): Ortholog of  Ceres SEQ ID NO 12613725 as cited in SEQ ID NO 68196
  misc_feature (1)..(1999): Ortholog of  Ceres SEQ ID NO 14301486 as cited in SEQ ID NO 69222
aactgaggcgagggagagagagagagagtgagtgagtgagtaatgggcggttcatcaggccttgtggactggagaggacggccggtgaacaccaagaagcatggaggagtgagagcttcaattttcattcatgcgctggtgctgctcagcaacgtagccaacattgccagtatactgaatcgtaagctatctgcgcgaggagatgcacatggatgtcgcgagggcgacgacgatggcgagcaatttctttgccgcgctgcaaatgttctccatcccagcagccttccttgctgactcctacatcaagcgtttctacactgtcctcatctttggcccaattgaaatactgggctacatcctgctcgcggtccaagcacatgtcccatccctgcacccaccaccgtgcgtccctggacaagagacaagtacgtgtgagtccgtgagcggttcgaacctgagcctgctcctcctgggtctctacctgatccccatcggcgatggggcggctcgggcatgcctcccggctctcggcggggagcagttcgacaggtcggatcccgtagagcagaggcaggagtcgagcttcttcaactggtacaccttctccgtctcgacgggtggcttcgtggggctggtcttcatcgtgtgggtggagaacagtaaaggctgggacgtaggcttcgccgtctgtgccttgtccgtgctcctcgggatgctgatatggattgctggcctcccgttatacaggaaccagctgccaactagtagccccatcacaagaatactgcaggttcttgtagctgcattcaagaaaagaaatgttgcattaccggccaaccccagtgagctaaagcaaataagtcaaggcgacgccggttccctcgagattctgcatagaaccgacggatttcgctgccttgacaaagcagcggtggacaccggaaggaccggtggctggattctctgcagcataacccaggtggaggagactaagatcattctccggatggtgcccatcttcctgagtgctgtcctaggctacattccggtgcctctcatcctcaatttcaccgtgcagcagggcaacacaatggacaccaggcttggcgcacttcacatctcacccgcgacgctattcatcatccctacgcttttccagatggtgatcctcgttgtttacgaccggttcattgtcccgttcctaagacggataaccgggtacgtgggcggtgtcacgcacctccagcgcatcggcatcggattcctttcaaccgtagtggccaccggcgttgcagcaatagtggaggccagtaggaaaaaggtggtacgagacagttgccttgtggatgctacagctggaattccaatatctgttttctggctgaccatacagttcttcctgctaggcattgtggatgtcacctcctttgtagggcttcttgagttcttctacagtgaggcgtccacggggatgaagtctattggaagctccatcttctactgcatccttggggtgtcagcttggttggggagcctgttgattcaagtggcaaaccgagttacaagacaccgcgatggcacaggaggctggcttgatgggaccaacttgaacaaggggaaacttgaacgattctattggttgctagcagttcttgagctggtgtcgctattagtctacgtcttcttcgcctccaggtatgtttacgggaatgaccaaagggttgtggctgacgaagataataatacggctccatctgatggtaccataaatgttatctgattgttagagcgtagtggtaacgagactgagagattgtgcaaatgacagagacagaatgacagttgtctttattgcaaggaagacaatgcttatatatacagacgaactagtgcctccccaaggggtgcgtcccttggggagaaactgtcgcaccccatggaggggattgaacacacatattgtaacactcccccttaatcaatctaagtccatttgatc

SEQ ID NO: 18950 - protein, 525 aa, Zea mays subsp. mays
  peptide (1)..(525): Ceres Seq. ID no. 12359115
MHMDVARATTMASNFFAALQMFSIPAAFLADSYIKRFYTVLIFGPIEILGYILLAVQAHVPSLHPPPCVPGQETSTCESVSGSNLSLLLLGLYLIPIGDGAARACLPALGGEQFDRSDPVEQRQESSFFNWYTFSVSTGGFVGLVFIVWVENSKGWDVGFAVCALSVLLGMLIWIAGLPLYRNQLPTSSPITRILQVLVAAFKKRNVALPANPSELKQISQGDAGSLEILHRTDGFRCLDKAAVDTGRTGGWILCSITQVEETKIILRMVPIFLSAVLGYIPVPLILNFTVQQGNTMDTRLGALHISPATLFIIPTLFQMVILVVYDRFIVPFLRRITGYVGGVTHLQRIGIGFLSTVVATGVAAIVEASRKKVVRDSCLVDATAGIPISVFWLTIQFFLLGIVDVTSFVGLLEFFYSEASTGMKSIGSSIFYCILGVSAWLGSLLIQVANRVTRHRDGTGGWLDGTNLNKGKLERFYWLLAVLELVSLLVYVFFASRYVYGNDQRVVADEDNNTAPSDGTINVI

SEQ ID NO: 18951 - protein, 523 aa, Zea mays subsp. mays
  peptide (1)..(523): Ceres Seq. ID no. 12359116
MDVARATTMASNFFAALQMFSIPAAFLADSYIKRFYTVLIFGPIEILGYILLAVQAHVPSLHPPPCVPGQETSTCESVSGSNLSLLLLGLYLIPIGDGAARACLPALGGEQFDRSDPVEQRQESSFFNWYTFSVSTGGFVGLVFIVWVENSKGWDVGFAVCALSVLLGMLIWIAGLPLYRNQLPTSSPITRILQVLVAAFKKRNVALPANPSELKQISQGDAGSLEILHRTDGFRCLDKAAVDTGRTGGWILCSITQVEETKIILRMVPIFLSAVLGYIPVPLILNFTVQQGNTMDTRLGALHISPATLFIIPTLFQMVILVVYDRFIVPFLRRITGYVGGVTHLQRIGIGFLSTVVATGVAAIVEASRKKVVRDSCLVDATAGIPISVFWLTIQFFLLGIVDVTSFVGLLEFFYSEASTGMKSIGSSIFYCILGVSAWLGSLLIQVANRVTRHRDGTGGWLDGTNLNKGKLERFYWLLAVLELVSLLVYVFFASRYVYGNDQRVVADEDNNTAPSDGTINVI

SEQ ID NO: 18952 - protein, 515 aa, Zea mays subsp. mays
  peptide (1)..(515): Ceres Seq. ID no. 12359117
MASNFFAALQMFSIPAAFLADSYIKRFYTVLIFGPIEILGYILLAVQAHVPSLHPPPCVPGQETSTCESVSGSNLSLLLLGLYLIPIGDGAARACLPALGGEQFDRSDPVEQRQESSFFNWYTFSVSTGGFVGLVFIVWVENSKGWDVGFAVCALSVLLGMLIWIAGLPLYRNQLPTSSPITRILQVLVAAFKKRNVALPANPSELKQISQGDAGSLEILHRTDGFRCLDKAAVDTGRTGGWILCSITQVEETKIILRMVPIFLSAVLGYIPVPLILNFTVQQGNTMDTRLGALHISPATLFIIPTLFQMVILVVYDRFIVPFLRRITGYVGGVTHLQRIGIGFLSTVVATGVAAIVEASRKKVVRDSCLVDATAGIPISVFWLTIQFFLLGIVDVTSFVGLLEFFYSEASTGMKSIGSSIFYCILGVSAWLGSLLIQVANRVTRHRDGTGGWLDGTNLNKGKLERFYWLLAVLELVSLLVYVFFASRYVYGNDQRVVADEDNNTAPSDGTINVI

SEQ ID NO: 18953 - DNA, 759 bp, Zea mays subsp. mays
  misc_feature (1)..(759): Ceres Seq. ID no. 12483059
  misc_feature (1)..(759): Ortholog of  Ceres SEQ ID NO 15174240 as cited in SEQ ID NO 61866
  misc_feature (1)..(759): Ortholog of  Ceres SEQ ID NO 13596039 as cited in SEQ ID NO 62117
catacacacacagccccatcccgccgcccgcaaggaaccagcgccaccttaggttagggcggccgcgcggagaagtgcgcggttgccaagatgcagatcttcgtgaagaccctgacggggaagaccatcacgctggaggtggagtcctcggacaccatcgacaacgtgaaggccaagatccaggacaaggagggcatcccgccggaccagcagcgcctcatcttcgccggcaagcagctcgaggatggccgcaccctcgccgactacaacatccagaaggagtcgacgctgcacctggtcgtccgcctcaggggaggcgccaagaagccgaagaagaagacgtacaccaagcccaagaagatcaagcacaagcacaagaaggtgaagctcgccgtgctccagttctacaaggttgacgacgccaccggcaaggtcacccgcctccgcaaggattgccccaacgccgagtgccatgcgggggtcttcatggccaaccacttcgaccgccactactgcggtaagtgtggcctcacctacgtctacaaccagcaggcgtaggatgccccttctttctttcggtaaggaaactgggaagtcttgctaggtgataatcctttttgctttgttttgttttgttgcaatggtagtagtttcttggaacagaacacctgtatctcttttggcgacgcttaatttgggtttaattatatcatgtcgttatgggtcctgtcaagcactgttgaattcgaatggtttttg

SEQ ID NO: 18954 - protein, 155 aa, Zea mays subsp. mays
  peptide (1)..(155): Ceres Seq. ID no. 12483060
MQIFVKTLTGKTITLEVESSDTIDNVKAKIQDKEGIPPDQQRLIFAGKQLEDGRTLADYNIQKESTLHLVVRLRGGAKKPKKKTYTKPKKIKHKHKKVKLAVLQFYKVDDATGKVTRLRKDCPNAECHAGVFMANHFDRHYCGKCGLTYVYNQQA

SEQ ID NO: 18955 - protein, 137 aa, Zea mays subsp. mays
  peptide (1)..(137): Ceres Seq. ID no. 12483061
YTHSPIPPPARNQRHLRLGRPRGEVRGCQDADLREDPDGEDHHAGGGVLGHHRQREGQDPGQGGHPAGPAAPHLRRQAARGWPHPRRLQHPEGVDAAPGRPPQGRRQEAEEEDVHQAQEDQAQAQEGEARRAPVLQG

SEQ ID NO: 18956 - DNA, 1883 bp, Zea mays subsp. mays
  misc_feature (1)..(1883): Ceres Seq. ID no. 12418285
  misc_feature (1)..(1883): Ortholog of  Ceres SEQ ID NO 15176302 as cited in SEQ ID NO 58592
agtatctctagctagttggccggaatgaccgccaccacctccgacaggtcggtctcgaaagccctcacgaggttccctatgaacttgcgggtgactccggtgaggttggccaccttctgcctgtacgccctgaacgcatcgccgtcgacgggcgcggcctccccgccggcgccgaagagttccttcctctccagctcggcggaggcgtgcaggcactcgagccagcggttggcctggttctgcaggtcgtcgaacagcccgcgcttggtgacgtcgcgctccgggtccaggaagtagccgtacgcgtgcgcccaccgcaggatccgccgcccttcggccacctgccggtaggcctcggccacgaacccgagctccgtggccgggacgtccgccgccctcgccatccactccagctccccgcgctccagcgtcgccgtgtccctggccacgctctccagcgccgcgcggttcgacacccaccgctcgtagtggtacaggtacctctccagcgacgccctggccaaccgcctcgcctccttctcctcggcgccggcgccggcgacgcccgtctcggccggcggatgtgggcggaggtcgttgcaggcgtagtggttctcccctcccgccggctgcaggcagagccagcagaagcggtggccgcacggcggcgagcaccgcatgtggttgcagccctggttcttctcgatggggcggccgcatctggggcacggcttggtgtgcgccatcacccagttggccgtctccgccgagtcggagctgttcttgagcagccacgcgtgcaccgtggcgcacgacaccggccggtgcgcctcctcgccgcaggcccagcagactccgtaccgtacacgcagaacacgtccgccgccgcgtcaccgccgcccgacgactccagcgcgcgggcgcacccggggccgccgcaccaccgcaccctcccgccgctctcctccacgtacgaccggagccagaaccgcgcgtaccggcccacgtcgtccgccgccagcacctcgtccacgagctcccggacgacgggcgccgagcagcgcgggtccgggcaccgcagcgacaggcagcgcgggccgtcgcccaccgccgcgcggacgtacccgcgccagcacccgttgcagtagtagtgggagcagcccgcggacgccgtctgccccgcgggctgctcgtcgaagcagatggcgcagacgcgcggccgcaagccgcgcgccgcggggacgagctggcccgggggaaggccggcggcgccgcgcacgcgccgctcgtccgcgaaccactcctcctggacccgcccgacgcgccacttgaagtggcgcagcaggacggccgcgaagcccggcgggatggacagcacctcggcgaccctggcggtgtccgcctcttgccgcgcgcggacgtcgtcctcggtcagaacggcgtacctctgctccccgtcgcacgccgcggcgtcggcctgtgtctgctcggctcctccttcgcagtcgtcgtcgtcgtcgtcgtcgtactcgaacatgtaatcctcgtcgccggagctgctgccgtcgtcagccgtttcctgggcatgcccgcgagagccatcgccatcggcgctctctccgtcgtcgtcgtggtcgcggccggatctaggggctgcttcgcatgtcttgccgcggcggctcgtcccgcagctgtcgtcgtcgtggcccgtgcagctgctgacctgtcggtacctcttgttggagacagcgccgccgccagacgccatgccgccgagccgcggtttcttggcgagggatttggactacatccttctctaacagcgttctggtccgttgatatgtactggtggatagtggtaatccatcggacgtttcggccgg

SEQ ID NO: 18957 - protein, 217 aa, Zea mays subsp. mays
  peptide (1)..(217): Ceres Seq. ID no. 12418286
MWLQPWFFSMGRPHLGHGLVCAITQLAVSAESELFLSSHACTVAHDTGRCASSPQAQQTPYRTRRTRPPPRHRRPTTPARGRTRGRRTTAPSRRSPPRTTGARTARTGPRRPPPAPRPRAPGRRAPSSAGPGTAATGSAGRRPPPRGRTRASTRCSSSGSSPRTPSAPRAARRSRWRRRAAASRAPRGRAGPGEGRRRRARAARPRTTPPGPARRAT

SEQ ID NO: 18958 - protein, 208 aa, Zea mays subsp. mays
  peptide (1)..(208): Ceres Seq. ID no. 12418287
MGRPHLGHGLVCAITQLAVSAESELFLSSHACTVAHDTGRCASSPQAQQTPYRTRRTRPPPRHRRPTTPARGRTRGRRTTAPSRRSPPRTTGARTARTGPRRPPPAPRPRAPGRRAPSSAGPGTAATGSAGRRPPPRGRTRASTRCSSSGSSPRTPSAPRAARRSRWRRRAAASRAPRGRAGPGEGRRRRARAARPRTTPPGPARRAT

SEQ ID NO: 18959 - protein, 188 aa, Zea mays subsp. mays
  peptide (1)..(188): Ceres Seq. ID no. 12418288
MWAEVVAGVVVLPSRRLQAEPAEAVAARRRAPHVVAALVLLDGAAASGARLGVRHHPVGRLRRVGAVLEQPRVHRGARHRPVRLLAAGPADSVPYTQNTSAAASPPPDDSSARAHPGPPHHRTLPPLSSTYDRSQNRAYRPTSSAASTSSTSSRTTGAEQRGSGHRSDRQRGPSPTAARTYPRQHPLQ

SEQ ID NO: 18960 - DNA, 1764 bp, Zea mays subsp. mays
  misc_feature (1)..(1764): Ceres Seq. ID no. 12375648
  misc_feature (1)..(1764): Ortholog of  Ceres SEQ ID NO 15179007 as cited in SEQ ID NO 1038
  misc_feature (1)..(1764): Ortholog of  Ceres SEQ ID NO 15226449 as cited in SEQ ID NO 58879
  misc_feature (1)..(1764): Ortholog of  Ceres SEQ ID NO 13597146 as cited in SEQ ID NO 63311
atcacgcacggccacacctgccctccattccatccagcacctagaaaaaactaatcgcaattagttgacgcataatattttgagggaggagaaggggggaattgactagttgaccaatcgcgagtggcgatgatgatgcagttgggggccaggagtttggtgaggaggttctcccgtctcgccgcggcgggggccccggccgagacgacgtcggctggcgtgccgcgaatgccggcgttcgaccacgtcccgctgccctacgacgggccgagcgccgccgacatcgcccgcaagcgcgccgagtacctcagcccgtccctcttccacttctactccaagcctctgaacatcgtggagggcaagaggcagtacttgtacgacgagcacggccggcgctacctggacgcgttcgccggcatcgccaccgtgtgctgcggccactgccaccccgacgtcgtggacgcgatcaccaggcaggccaagcgcctgcagcactccaccgtgctctacctcaaccacgtcatcgccgatttcgccgaggcgctggcatccaagctgcccggcgacctcaaggtcgtcttcttcaccaactccggcacggaggcgaacgagctggccatcctgatggcgcggctgtacaccggctcccacgacatcatctccctccgcaactcgtaccacggcaacgcggccgggaccatgggagccaccgcgcagaagaactggaagttcaacgtcatccagagtggcgtgcaccacgcggtgaacccggacccctacagaggcgccttcggctccgacgccgagaagtacgtgcgggacgtgcaggagatcatcgagttcggcaccaccggccaggtcgccggcttcatatccgaggccatccagggcgtgggcggaatcgtggaggtgtcgccgggctacctgccgctggcgtacgacaaggtccggaaggccggcgggctctgcatcgccgacgaggtccaggcgggtttcgcccgcgtcggcagccacttctggggcttcgagacccacggcgtcgtccccgacatagtgaccatggcaaagggcatcggcaacggcatcccgctgggcgccgtggtgacgacgccggaggtcgcgcaggtgctgacccggcgctgctacttcaacacgttcggcggcaacccgctgtgcaccgccggcgggctcgccgtcctcgaggtgctcgagaaggagaggctccaggagaacgccttcgtcgtcggctcctacctcaaggaccgcctccgcggtctccaggagaagcacgagatcatcggcgacgtgaggggaacgggtttcatgctcggcatcgagctggtcaccgatcggcagctcaagacgccggcgaaagatgagatctgccacgccatggaatacatgaaagatatgggcgtcttggtcggcaaaggcgggttctatgggaacgtcttcaggatcactccccctctatgcttcaccaaggaagatgctgatttcttcgtcgaggtgatggacattgcgctgtcgaagctctgagctgtggccgtcaggcggaggggcggtgtgtctgtctgtatatataatcctcgcccgagtttagcagctgcgtcggagttgtactatctcactcaagagaatggcgaaaaaaccttggcagtttgtgactcaaggggaaaaaactaaaccatgcagacgaatttggcttatcgcaacgctagcttttaattcagctttcgtctggagatgacgtgccttgtaacg

SEQ ID NO: 18961 - protein, 469 aa, Zea mays subsp. mays
  peptide (1)..(469): Ceres Seq. ID no. 12375649
MMMQLGARSLVRRFSRLAAAGAPAETTSAGVPRMPAFDHVPLPYDGPSAADIARKRAEYLSPSLFHFYSKPLNIVEGKRQYLYDEHGRRYLDAFAGIATVCCGHCHPDVVDAITRQAKRLQHSTVLYLNHVIADFAEALASKLPGDLKVVFFTNSGTEANELAILMARLYTGSHDIISLRNSYHGNAAGTMGATAQKNWKFNVIQSGVHHAVNPDPYRGAFGSDAEKYVRDVQEIIEFGTTGQVAGFISEAIQGVGGIVEVSPGYLPLAYDKVRKAGGLCIADEVQAGFARVGSHFWGFETHGVVPDIVTMAKGIGNGIPLGAVVTTPEVAQVLTRRCYFNTFGGNPLCTAGGLAVLEVLEKERLQENAFVVGSYLKDRLRGLQEKHEIIGDVRGTGFMLGIELVTDRQLKTPAKDEICHAMEYMKDMGVLVGKGGFYGNVFRITPPLCFTKEDADFFVEVMDIALSKL

SEQ ID NO: 18962 - protein, 468 aa, Zea mays subsp. mays
  peptide (1)..(468): Ceres Seq. ID no. 12375650
MMQLGARSLVRRFSRLAAAGAPAETTSAGVPRMPAFDHVPLPYDGPSAADIARKRAEYLSPSLFHFYSKPLNIVEGKRQYLYDEHGRRYLDAFAGIATVCCGHCHPDVVDAITRQAKRLQHSTVLYLNHVIADFAEALASKLPGDLKVVFFTNSGTEANELAILMARLYTGSHDIISLRNSYHGNAAGTMGATAQKNWKFNVIQSGVHHAVNPDPYRGAFGSDAEKYVRDVQEIIEFGTTGQVAGFISEAIQGVGGIVEVSPGYLPLAYDKVRKAGGLCIADEVQAGFARVGSHFWGFETHGVVPDIVTMAKGIGNGIPLGAVVTTPEVAQVLTRRCYFNTFGGNPLCTAGGLAVLEVLEKERLQENAFVVGSYLKDRLRGLQEKHEIIGDVRGTGFMLGIELVTDRQLKTPAKDEICHAMEYMKDMGVLVGKGGFYGNVFRITPPLCFTKEDADFFVEVMDIALSKL

SEQ ID NO: 18963 - protein, 467 aa, Zea mays subsp. mays
  peptide (1)..(467): Ceres Seq. ID no. 12375651
MQLGARSLVRRFSRLAAAGAPAETTSAGVPRMPAFDHVPLPYDGPSAADIARKRAEYLSPSLFHFYSKPLNIVEGKRQYLYDEHGRRYLDAFAGIATVCCGHCHPDVVDAITRQAKRLQHSTVLYLNHVIADFAEALASKLPGDLKVVFFTNSGTEANELAILMARLYTGSHDIISLRNSYHGNAAGTMGATAQKNWKFNVIQSGVHHAVNPDPYRGAFGSDAEKYVRDVQEIIEFGTTGQVAGFISEAIQGVGGIVEVSPGYLPLAYDKVRKAGGLCIADEVQAGFARVGSHFWGFETHGVVPDIVTMAKGIGNGIPLGAVVTTPEVAQVLTRRCYFNTFGGNPLCTAGGLAVLEVLEKERLQENAFVVGSYLKDRLRGLQEKHEIIGDVRGTGFMLGIELVTDRQLKTPAKDEICHAMEYMKDMGVLVGKGGFYGNVFRITPPLCFTKEDADFFVEVMDIALSKL

SEQ ID NO: 18964 - DNA, 1834 bp, Zea mays subsp. mays
  misc_feature (1)..(1834): Ceres Seq. ID no. 13589535
  misc_feature (1)..(1834): Ortholog of  Ceres SEQ ID NO 14315138 as cited in SEQ ID NO 53488
ctaatcgaaaaccacttgatcccatgttcaacagacctttgttccctagaactttgggcaacccttttgcccttttggatccaggttttgctgacataactgctggtgatatatttggacgtggaccccgagttacacaacctagggacgtgaggcagatacctattgaagttaaggacagcaatactcaaacaggcagttctggtcagggtcccattattgaggatgttactggacgtgaatctttctatggtccagaggtccatgggaccgttatagttgacgaagatgatgaagacttgccattaacactatctgctcaggatcctaagatcccaagcagtgctttgcacccaaaccatttcatgcctagtgcgcctccagtggttgatgttagtgaccataacaatgatatagaagaggagatgattaaggcagcaattgaagcttcaaaaagggaagctgacgggatgaaaaatgttctaagtagtggtcaatctgaaaacatgtcacgtggcagaggtgatcatgagcttgctcgggcggtttctttgtccttggagacagcagagcgagagagagctctgcgccaagagggaatgtatgtagcagatcactctcctgacttatctgataaagaaggcggtcaaggaggaagtgggataagcgaaaggcgaggactaactacaggagaagtgggaacttctgagcaaacagtagatgaagagaacttccaagaggacaatgaagatggtgaagaacaacctttagttaggactcgttctaggcgacttcgaggcagaactattgagccagcagaaactgttcaaagggctgacagcccgccctcaagtccccaacctcatgttcaaattggtcatcagcgtaatgtggggtttccttcagtagagtggggtggtatttcttctgaagagcgtgatgaagctcttatgcttgaggctgcaatgtttggtgggattcctgaaggagcaccatatccattttccttcccagcccatggcaggtcgactcactatcccctagtagcacgtcctccatcaccatcattaacggcacagcggttgttaagggagcagcaggatgatgagtatcttgctgctctccaagctgatcgagaaaaagagttgaaggctgtgcaggaggctgaacttcgcagggtagaggaagctgcagcaagagaggctgctcttgaacgtcaaaagaaagaagaggaggagaagctaaagaaacaacgtgaggaagaggagttggaatccaagcttgcagccaaacaagcatcactacctaaggagccactacaaaatgacgagggggctgtcacagtggtagtccgcatgcctgatggtagtcgtcgaggacggcgctttctcaaatctgacaggcttcagtatctttttgatttcatagacatcagccggactttcaaaccaggaacttatagactggcgaggtcttatcccaggcgtgccttcactgaattggagagccagatgtcactgagcgatctcggtctcactagcaagcaggaagctctgttcctagaaaaactgtctgcgtagagtacaaggttctggagttatggtcgagtagtatatgcacttataaaatcggtcatttagatcgtgcctggcgtgtgttcatgaaaatactgcagcggttgaatgattactgatctctagagatcccgtcgccatcttctgtgctctgaaacggaggtgtttcgatctgactgtgcagatgggcagttctacattcagatttcagaacaactgtagctcttgcggttttaagacttgagtatggtttactttgg

SEQ ID NO: 18965 - protein, 525 aa, Zea mays subsp. mays
  peptide (1)..(525): Ceres Seq. ID no. 13589536
NRKPLDPMFNRPLFPRTLGNPFALLDPGFADITAGDIFGRGPRVTQPRDVRQIPIEVKDSNTQTGSSGQGPIIEDVTGRESFYGPEVHGTVIVDEDDEDLPLTLSAQDPKIPSSALHPNHFMPSAPPVVDVSDHNNDIEEEMIKAAIEASKREADGMKNVLSSGQSENMSRGRGDHELARAVSLSLETAERERALRQEGMYVADHSPDLSDKEGGQGGSGISERRGLTTGEVGTSEQTVDEENFQEDNEDGEEQPLVRTRSRRLRGRTIEPAETVQRADSPPSSPQPHVQIGHQRNVGFPSVEWGGISSEERDEALMLEAAMFGGIPEGAPYPFSFPAHGRSTHYPLVARPPSPSLTAQRLLREQQDDEYLAALQADREKELKAVQEAELRRVEEAAAREAALERQKKEEEEKLKKQREEEELESKLAAKQASLPKEPLQNDEGAVTVVVRMPDGSRRGRRFLKSDRLQYLFDFIDISRTFKPGTYRLARSYPRRAFTELESQMSLSDLGLTSKQEALFLEKLSA

SEQ ID NO: 18966 - protein, 518 aa, Zea mays subsp. mays
  peptide (1)..(518): Ceres Seq. ID no. 13589537
MFNRPLFPRTLGNPFALLDPGFADITAGDIFGRGPRVTQPRDVRQIPIEVKDSNTQTGSSGQGPIIEDVTGRESFYGPEVHGTVIVDEDDEDLPLTLSAQDPKIPSSALHPNHFMPSAPPVVDVSDHNNDIEEEMIKAAIEASKREADGMKNVLSSGQSENMSRGRGDHELARAVSLSLETAERERALRQEGMYVADHSPDLSDKEGGQGGSGISERRGLTTGEVGTSEQTVDEENFQEDNEDGEEQPLVRTRSRRLRGRTIEPAETVQRADSPPSSPQPHVQIGHQRNVGFPSVEWGGISSEERDEALMLEAAMFGGIPEGAPYPFSFPAHGRSTHYPLVARPPSPSLTAQRLLREQQDDEYLAALQADREKELKAVQEAELRRVEEAAAREAALERQKKEEEEKLKKQREEEELESKLAAKQASLPKEPLQNDEGAVTVVVRMPDGSRRGRRFLKSDRLQYLFDFIDISRTFKPGTYRLARSYPRRAFTELESQMSLSDLGLTSKQEALFLEKLSA

SEQ ID NO: 18967 - protein, 404 aa, Zea mays subsp. mays
  peptide (1)..(404): Ceres Seq. ID no. 13589538
MPSAPPVVDVSDHNNDIEEEMIKAAIEASKREADGMKNVLSSGQSENMSRGRGDHELARAVSLSLETAERERALRQEGMYVADHSPDLSDKEGGQGGSGISERRGLTTGEVGTSEQTVDEENFQEDNEDGEEQPLVRTRSRRLRGRTIEPAETVQRADSPPSSPQPHVQIGHQRNVGFPSVEWGGISSEERDEALMLEAAMFGGIPEGAPYPFSFPAHGRSTHYPLVARPPSPSLTAQRLLREQQDDEYLAALQADREKELKAVQEAELRRVEEAAAREAALERQKKEEEEKLKKQREEEELESKLAAKQASLPKEPLQNDEGAVTVVVRMPDGSRRGRRFLKSDRLQYLFDFIDISRTFKPGTYRLARSYPRRAFTELESQMSLSDLGLTSKQEALFLEKLSA

SEQ ID NO: 18968 - DNA, 1306 bp, Zea mays subsp. mays
  misc_feature (1)..(1306): Ceres Seq. ID no. 12419040
  misc_feature (1)..(1306): Ortholog of  Ceres SEQ ID NO 14311596 as cited in SEQ ID NO 51728
  misc_feature (1)..(1306): Ortholog of  Ceres SEQ ID NO 12617197 as cited in SEQ ID NO 63406
  misc_feature (1)..(1306): Ortholog of  Ceres SEQ ID NO 13597804 as cited in SEQ ID NO 64182
  misc_feature (1)..(1306): Ortholog of  Ceres SEQ ID NO 14302768 as cited in SEQ ID NO 64889
  misc_feature (1)..(1306): Ortholog of  Ceres SEQ ID NO 13598565 as cited in SEQ ID NO 65250
  misc_feature (1)..(1306): Ortholog of  Ceres SEQ ID NO 13598597 as cited in SEQ ID NO 65496
caaaaaatttttgctcagcccgctctcggacgaacccattcacccgtccggccgtccgtgcgcggcgcacccacccggcaccggcaccagcaccaccgcccgcccggcgcccgtcacgctcgagaggaggaggaagaagaagggactggtgcgacagcgcgcgatggccgccgtcgtgtgcgtcaccggcgccggcggcttcatcggctcgtggatcgtcaagatcctcctcgcccgcgggtacgccgtccggggcacctcccgccgcgaagctgctgaccccaagaacgcgcacctgtgggcgctcgacggcgcggcggagcgcctcaccatgctgcaggtggacctgctcgaccgcgccagcctccgcgccgccttccgcggctgcgacggcgtcatccacaccgcctcgccgatgcacgacaaccccgaggagatcatcgagccgattatcgccgggacgcggaacgtcgtggaggcggcggcggacgccggcgtgcggcgcctggtgctgtcctccaccatcggcaccatgtacatggacccgcgccgcgaccccgacgccccgctcggcgactccagctggagcgacctcgagtactgcaagagcaccgagaactggtactgctacgcaaagacggtggcggagcagggcgcgtgggaggcggcgcgggcgcgggggctggacctggcggtggtcatcccggtggtggtgctcggcgagctgctgcagcccagcatgaacaccagcaccctgcacatcctcaagtacctcacgggacagacaaaggagtacgtcaacgagtcgcacgcctacgtgcacgtcatggacgccgncnaggcgcacgtaagggtgctggaggcgcccggcgccggcggccggcggtacgtctgcgccgagcgcaccctgcaccgcggcgagctctgccgcatcctcgccggactcttcccggagtaccctattccgacaaggtgcaaggatcaggtgaacccaccgaagaagggctacaagtttacgaaccaacctctgaaggaccttggcgtcaagttcactccagtgcatgggtacctgtacnaagcagtgaagtccctgcaagacaagggcttcctcccgaagacctctggcgccaaggtgcctgaacgacgcanctacctgcctcaaacgacatcacagncaccacccgaaatcgtntcgaaactttgaggtggatctgcacacgtgctcaaactggccatgttttttttttgtnagaacaagccgttcatttgattggttattaaaagattttgggcagtctgttcttac

SEQ ID NO: 18969 - protein, 400 aa, Zea mays subsp. mays
  peptide (1)..(400): Ceres Seq. ID no. 12419041
  misc_feature (279)..(279): Xaa is any aa, unknown or other
  misc_feature (280)..(280): Xaa is any aa, unknown or other
  misc_feature (359)..(359): Xaa is any aa, unknown or other
  misc_feature (383)..(383): Xaa is any aa, unknown or other
  misc_feature (392)..(392): Xaa is any aa, unknown or other
  misc_feature (397)..(397): Xaa is any aa, unknown or other
KKFLLSPLSDEPIHPSGRPCAAHPPGTGTSTTARPAPVTLERRRKKKGLVRQRAMAAVVCVTGAGGFIGSWIVKILLARGYAVRGTSRREAADPKNAHLWALDGAAERLTMLQVDLLDRASLRAAFRGCDGVIHTASPMHDNPEEIIEPIIAGTRNVVEAAADAGVRRLVLSSTIGTMYMDPRRDPDAPLGDSSWSDLEYCKSTENWYCYAKTVAEQGAWEAARARGLDLAVVIPVVVLGELLQPSMNTSTLHILKYLTGQTKEYVNESHAYVHVMDAXXAHVRVLEAPGAGGRRYVCAERTLHRGELCRILAGLFPEYPIPTRCKDQVNPPKKGYKFTNQPLKDLGVKFTPVHGYLYXAVKSLQDKGFLPKTSGAKVPERRXYLPQTTSQXPPEIXSKL

SEQ ID NO: 18970 - protein, 346 aa, Zea mays subsp. mays
  peptide (1)..(346): Ceres Seq. ID no. 12419042
  misc_feature (225)..(225): Xaa is any aa, unknown or other
  misc_feature (226)..(226): Xaa is any aa, unknown or other
  misc_feature (305)..(305): Xaa is any aa, unknown or other
  misc_feature (329)..(329): Xaa is any aa, unknown or other
  misc_feature (338)..(338): Xaa is any aa, unknown or other
  misc_feature (343)..(343): Xaa is any aa, unknown or other
MAAVVCVTGAGGFIGSWIVKILLARGYAVRGTSRREAADPKNAHLWALDGAAERLTMLQVDLLDRASLRAAFRGCDGVIHTASPMHDNPEEIIEPIIAGTRNVVEAAADAGVRRLVLSSTIGTMYMDPRRDPDAPLGDSSWSDLEYCKSTENWYCYAKTVAEQGAWEAARARGLDLAVVIPVVVLGELLQPSMNTSTLHILKYLTGQTKEYVNESHAYVHVMDAXXAHVRVLEAPGAGGRRYVCAERTLHRGELCRILAGLFPEYPIPTRCKDQVNPPKKGYKFTNQPLKDLGVKFTPVHGYLYXAVKSLQDKGFLPKTSGAKVPERRXYLPQTTSQXPPEIXSKL

SEQ ID NO: 18971 - protein, 290 aa, Zea mays subsp. mays
  peptide (1)..(290): Ceres Seq. ID no. 12419043
  misc_feature (169)..(169): Xaa is any aa, unknown or other
  misc_feature (170)..(170): Xaa is any aa, unknown or other
  misc_feature (249)..(249): Xaa is any aa, unknown or other
  misc_feature (273)..(273): Xaa is any aa, unknown or other
  misc_feature (282)..(282): Xaa is any aa, unknown or other
  misc_feature (287)..(287): Xaa is any aa, unknown or other
MLQVDLLDRASLRAAFRGCDGVIHTASPMHDNPEEIIEPIIAGTRNVVEAAADAGVRRLVLSSTIGTMYMDPRRDPDAPLGDSSWSDLEYCKSTENWYCYAKTVAEQGAWEAARARGLDLAVVIPVVVLGELLQPSMNTSTLHILKYLTGQTKEYVNESHAYVHVMDAXXAHVRVLEAPGAGGRRYVCAERTLHRGELCRILAGLFPEYPIPTRCKDQVNPPKKGYKFTNQPLKDLGVKFTPVHGYLYXAVKSLQDKGFLPKTSGAKVPERRXYLPQTTSQXPPEIXSKL

SEQ ID NO: 18972 - DNA, 1900 bp, Zea mays subsp. mays; identical to SEQ ID NO: 3280
  misc_feature (1)..(1900): Ceres Seq. ID no. 13493214
  misc_feature (1)..(1900): Ortholog of  Ceres SEQ ID NO 13664362 as cited in SEQ ID NO 66523

SEQ ID NO: 18973 - protein, 393 aa, Zea mays subsp. mays; identical to SEQ ID NO: 3281
  peptide (1)..(393): Ceres Seq. ID no. 13493215

SEQ ID NO: 18974 - protein, 235 aa, Zea mays subsp. mays; identical to SEQ ID NO: 3282
  peptide (1)..(235): Ceres Seq. ID no. 13493216

SEQ ID NO: 18975 - protein, 221 aa, Zea mays subsp. mays; identical to SEQ ID NO: 3283
  peptide (1)..(221): Ceres Seq. ID no. 13493217

SEQ ID NO: 18976 - DNA, 1522 bp, Zea mays subsp. mays
  misc_feature (1)..(1522): Ceres Seq. ID no. 12359886
  misc_feature (1)..(1522): Ortholog of  Ceres SEQ ID NO 15177854 as cited in SEQ ID NO 51851
  misc_feature (1)..(1522): Ortholog of  Ceres SEQ ID NO 15177087 as cited in SEQ ID NO 51932
  misc_feature (1)..(1522): Ortholog of  Ceres SEQ ID NO 13662937 as cited in SEQ ID NO 64415
  misc_feature (1)..(1522): Ortholog of  Ceres SEQ ID NO 13595984 as cited in SEQ ID NO 68340
  misc_feature (1)..(1522): Ortholog of  Ceres SEQ ID NO 12635014 as cited in SEQ ID NO 0
ataaccgaatagaaatagctttggtgcaaacaagcaagcagcagagcagatcaagtaaaggtagcaatttgagtagtgtgcaagctaagatggggcaacaagaaaaggaagtgatcccgctgatgaccccgtacaagatgggacagctggagctctcccaccgcgtggtgctggcgccgatgacgcggtgccgcgccatcggggacgtgccgcagccgcacgccgccgtgtactactcgcagcgcgccagcaggggcggcgtgctcatcaccgagggcacgggggtgtccgccaccgcgcagggcttcccggggtcccccggcatctggacgcaggagcaggtggcggcgtggaagccccatcgtcgacgccgtccaccgcaagggcgcgctcttcttctgccagatcgcgcacgtcggaagggcatccaccaacgatttccagccggacggccaggcgccggtctcgagcacggacgcgcagctcccacccgacgccgagtccggcacggtgttctccaggccacgccggctgcgggccgacgagatcccggggatcgtcgacgacttcaggcgcgccgcgcgcaacgcgatcgaggccgggttcgacggcgtggagatccacggagcgcacgggttcctcctggagcagttcatgaaggacggcgccaacgaccgcgccgacgagtacggcggcagcgtcgagaaccggtgccgcttcgtggtcgaggtcgtggacgctctggtccgtgaagtcggcgcgagccgggttggcatcaggctctccccgttcgcggactacttggactgtgcggattccaaccccttggcgctaggtcactacatggtggaacagctcaacaggcacgaggggtttctgtactgccacatggtggagcctcgaatggccatcgtcgacgaccgcaggcagattccgcatcgactcctgccgttcaaggcggcgttcaatggcaccttcatcgcccgcgggcgggtacgacagggaggaagggaacaaggtggtcgccgaaggctacgcggaccttgtcgcatacggaaggctgttcttggccaacccagacctgcctaaaaggttcgaggtagacgagatcctgaacaagtatgatcgttccaccttttatacacaagaccctgttgttggctatacagattaccctttccttagggaggacagcgaagacttagctgctcaagcttaatggcgtggatgatcgatgtaatcacggttactgcacgatcgagatcgatactacatccatttgaatatatatatgtctaagatgcattgtttttgttttaagttagttttttttatatttgaccaaatttatgtaaaagatatatgtgctaaactagttgagtataccggtgtgttgcaacgacaaacgctagtctgtatcaaatgattttattaaactttactatagccagacttacaacaccatatcttgtacatgtgtgtatttgttcaagtaaaaatatataatggtggacttggaggc

SEQ ID NO: 18977 - protein, 249 aa, Zea mays subsp. mays
  peptide (1)..(249): Ceres Seq. ID no. 12359887
NRIEIALVQTSKQQSRSSKGSNLSSVQAKMGQQEKEVIPLMTPYKMGQLELSHRVVLAPMTRCRAIGDVPQPHAAVYYSQRASRGGVLITEGTGVSATAQGFPGSPGIWTQEQVAAWKPHRRRRPPQGRALLLPDRARRKGIHQRFPAGRPGAGLEHGRAAPTRRRVRHGVLQATPAAGRRDPGDRRRLQARRAQRDRGRVRRRGDPRSARVPPGAVHEGRRQRPRRRVRRQRREPVPLRGRGRGRSGP

SEQ ID NO: 18978 - protein, 220 aa, Zea mays subsp. mays
  peptide (1)..(220): Ceres Seq. ID no. 12359888
MGQQEKEVIPLMTPYKMGQLELSHRVVLAPMTRCRAIGDVPQPHAAVYYSQRASRGGVLITEGTGVSATAQGFPGSPGIWTQEQVAAWKPHRRRRPPQGRALLLPDRARRKGIHQRFPAGRPGAGLEHGRAAPTRRRVRHGVLQATPAAGRRDPGDRRRLQARRAQRDRGRVRRRGDPRSARVPPGAVHEGRRQRPRRRVRRQRREPVPLRGRGRGRSGP

SEQ ID NO: 18979 - protein, 209 aa, Zea mays subsp. mays
  peptide (1)..(209): Ceres Seq. ID no. 12359889
MTPYKMGQLELSHRVVLAPMTRCRAIGDVPQPHAAVYYSQRASRGGVLITEGTGVSATAQGFPGSPGIWTQEQVAAWKPHRRRRPPQGRALLLPDRARRKGIHQRFPAGRPGAGLEHGRAAPTRRRVRHGVLQATPAAGRRDPGDRRRLQARRAQRDRGRVRRRGDPRSARVPPGAVHEGRRQRPRRRVRRQRREPVPLRGRGRGRSGP

SEQ ID NO: 18980 - DNA, 901 bp, Zea mays subsp. mays
  misc_feature (1)..(901): Ceres Seq. ID no. 12436121
  misc_feature (1)..(901): Ortholog of  Ceres SEQ ID NO 13595376 as cited in SEQ ID NO 56084
  misc_feature (1)..(901): Ortholog of  Ceres SEQ ID NO 12593187 as cited in SEQ ID NO 60652
  misc_feature (1)..(901): Ortholog of  Ceres SEQ ID NO 12590378 as cited in SEQ ID NO 0
aaaacaaaccctagccgccaggcgcaggcggtcagggagcgagtaccgagcgccccagttcacacggtttatatcctaatctacgcagtcaatcctccttagcggtttcgttaatttgtttgtttccagcggccgttgcttcggtgattttgcttagctacgctttggaccggcgttccttcgctgctagctagtaccttttggaagtcaaggagtgctgtctttcgcctgatctacctagacgccttttcttgaatcagcgacttctattttggttaattagcaccggtagcccccctgctctcttgagtgagatgtcagaatacaagaacgtcgttggggggaggctaaagctgaagggtaaggcactggatgtgaaggaaggtggagtcaagaagaaaaaaaagaagcatcagcttgaagagtcgtctcagattgagcacgatgagctccacaaaggtagctgtccgtgtggagctcggttcatctttcgaacaacatgtttcgttttacatataaattggaccacttttgtgtgtggggaaactctggcttaccagctgatcacaacaatgagcttattgaagctggcaaggtgggagatgaagaaaggaatctacatccagactacgaccacctcacaccggcggagcgacgctatatagatcagaagcagaagatcgacatgcaaaagctggccaaagttgctaacaagtcacacagggaccgtatccaggacttcaaccagtatctggcgaacctcagcgagcactatgacatccctaaagttggccctggctaacaaacatagccaaactgctgtgtacgcacaaacaattgtatgctcggtgggcttcaagaacattaaaaatatataaatgtatgttgggtgattgggtct

SEQ ID NO: 18981 - protein, 116 aa, Zea mays subsp. mays
  peptide (1)..(116): Ceres Seq. ID no. 12436122
MSEYKNVVGGRLKLKGKALDVKEGGVKKKKKKHQLEESSQIEHDELHKGSCPCGARFIFRTTCFVLHINWTTFVCGETLAYQLITTMSLLKLARWEMKKGIYIQTTTTSHRRSDAI

SEQ ID NO: 18982 - protein, 100 aa, Zea mays subsp. mays
  peptide (1)..(100): Ceres Seq. ID no. 12436123
MFRFTYKLDHFCVWGNSGLPADHNNELIEAGKVGDEERNLHPDYDHLTPAERRYIDQKQKIDMQKLAKVANKSHRDRIQDFNQYLANLSEHYDIPKVGPG

SEQ ID NO: 18983 - DNA, 1581 bp, Zea mays subsp. mays
  misc_feature (1)..(1581): Ceres Seq. ID no. 12418879
  misc_feature (1)..(1581): Ortholog of  Ceres SEQ ID NO 14302216 as cited in SEQ ID NO 66456
ctccattcctgcatcccatctcttcttcgcctcctccgcctcgccggcgtcaccgtccggtcccgcctctcccccccgctcgaagctcgatctcttctcccgttctccgcccacgcaatccctgccaccgccgaatgcggaacactccctttggtgaccgactgacctaccctgcttctgccgggttagttgagtgtccgcgccgcgtccggatctcgaatgcgccgccgccgccgtcgcgcgatctagcggctgcgcgctgccccgcaggagggtagagctccaggggcccggtgtggtcaggcggcagatatggcaacggaggcgtccacctctgcggcgggcgggatctgggtggaggggatgtccgcggacaacataaaggggctggtgctcgcgctctcctccagcttcttcatcggggccagcttcatcgtcaagaagaaggggcttaagaaggccggtgcgtccggcgtccgcgcaggtgttggtggttactcttacttgtatgaaccattatggtgggcaggaatgattacaatgattgttggagaagtggctaactttgcagcatatgcttttgctcctgctatcttggtcacaccacttggtgcccttagcatcataattagtgctgctcttgcagacattatgttgaaggaaaagctgcatatatttggtatacttgggtgtgttctttgtgttgtgggttcaacaactattgtacttcatgcccctcaggagcgcacaattgaatctgtagcagaagtgtgggatcttgctactgaaccagcctttctatcttatgctgccattgttcttgctgcaacatttgtcctcatatactactttattccacgatatggtcagacacacatcatggtctatattggtgtttgttcccttgtaggatctctgtcggtcatttgtgaaagctcttggaatagccttgaaactgaccttttctggcatgaatcagctaatttatccacaaacatggttgttcaccattgttgttgttgcatgtatagtaacacagatgaactacctgaacaaggctcttgatactttcaacacagcagttgtatcaccgatatactatacaatgttcacgtcactaaccattttggctagcgtgataatgttcaaggactgggatcgtcaaaatccaactcaaattgtaacagagatgtgtggttttgttaccattctttcggggacgtttcttctccacaagacaaaagacatggttgatggcctcccgccaactctacctgtccggattcctaaacatgaggacgatgcagctgaaggaatccctctcaggtctgctgaaggcatcccgctcagatcaccgagggcaacggaatcgtttcgatcaacgctataatggttggtgatccttcttcaaaggccatgctcagccattctttcatttgatacacacctttgtagattgtattttaggattccaaaaggtaaaggcaccgctccccatgtaatttttttgagacaccggtgtagagtatcgggggaacttatgttatacatctcgaaatgcccagaatgggcttagatccg

SEQ ID NO: 18984 - protein, 250 aa, Zea mays subsp. mays
  peptide (1)..(250): Ceres Seq. ID no. 12418880
MATEASTSAAGGIWVEGMSADNIKGLVLALSSSFFIGASFIVKKKGLKKAGASGVRAGVGGYSYLYEPLWWAGMITMIVGEVANFAAYAFAPAILVTPLGALSIIISAALADIMLKEKLHIFGILGCVLCVVGSTTIVLHAPQERTIESVAEVWDLATEPAFLSYAAIVLAATFVLIYYFIPRYGQTHIMVYIGVCSLVGSLSVICESSWNSLETDLFWHESANLSTNMVVHHCCCCMYSNTDELPEQGS

SEQ ID NO: 18985 - protein, 233 aa, Zea mays subsp. mays
  peptide (1)..(233): Ceres Seq. ID no. 12418881
MSADNIKGLVLALSSSFFIGASFIVKKKGLKKAGASGVRAGVGGYSYLYEPLWWAGMITMIVGEVANFAAYAFAPAILVTPLGALSIIISAALADIMLKEKLHIFGILGCVLCVVGSTTIVLHAPQERTIESVAEVWDLATEPAFLSYAAIVLAATFVLIYYFIPRYGQTHIMVYIGVCSLVGSLSVICESSWNSLETDLFWHESANLSTNMVVHHCCCCMYSNTDELPEQGS

SEQ ID NO: 18986 - protein, 177 aa, Zea mays subsp. mays
  peptide (1)..(177): Ceres Seq. ID no. 12418882
MITMIVGEVANFAAYAFAPAILVTPLGALSIIISAALADIMLKEKLHIFGILGCVLCVVGSTTIVLHAPQERTIESVAEVWDLATEPAFLSYAAIVLAATFVLIYYFIPRYGQTHIMVYIGVCSLVGSLSVICESSWNSLETDLFWHESANLSTNMVVHHCCCCMYSNTDELPEQGS

SEQ ID NO: 18987 - DNA, 1625 bp, Zea mays subsp. mays; identical to SEQ ID NO: 1790
  misc_feature (1)..(1625): Ceres Seq. ID no. 13494770
  misc_feature (1)..(1625): Ortholog of  Ceres SEQ ID NO 15176444 as cited in SEQ ID NO 53249

SEQ ID NO: 18988 - protein, 368 aa, Zea mays subsp. mays; identical to SEQ ID NO: 1791
  peptide (1)..(368): Ceres Seq. ID no. 13494771

SEQ ID NO: 18989 - protein, 291 aa, Zea mays subsp. mays; identical to SEQ ID NO: 1792
  peptide (1)..(291): Ceres Seq. ID no. 13494772

SEQ ID NO: 18990 - protein, 239 aa, Zea mays subsp. mays; identical to SEQ ID NO: 1793
  peptide (1)..(239): Ceres Seq. ID no. 13494773

SEQ ID NO: 18991 - DNA, 1915 bp, Zea mays subsp. mays
  misc_feature (1)..(1915): Ceres Seq. ID no. 12369726
  misc_feature (1)..(1915): Ortholog of  Ceres SEQ ID NO 15176532 as cited in SEQ ID NO 58184
  misc_feature (1)..(1915): Ortholog of  Ceres SEQ ID NO 14303627 as cited in SEQ ID NO 62070
  misc_feature (1)..(1915): Ortholog of  Ceres SEQ ID NO 13597546 as cited in SEQ ID NO 65017
  misc_feature (1)..(1915): Ortholog of  Ceres SEQ ID NO 14308015 as cited in SEQ ID NO 65798
  misc_feature (1)..(1915): Ortholog of  Ceres SEQ ID NO 14307912 as cited in SEQ ID NO 66380
  misc_feature (1)..(1915): Ortholog of  Ceres SEQ ID NO 15176077 as cited in SEQ ID NO 66728
  misc_feature (1)..(1915): Ortholog of  Ceres SEQ ID NO 14307908 as cited in SEQ ID NO 67189
  misc_feature (1)..(1915): Ortholog of  Ceres SEQ ID NO 14308045 as cited in SEQ ID NO 67444
  misc_feature (1)..(1915): Ortholog of  Ceres SEQ ID NO 13654353 as cited in SEQ ID NO 68318
gcacgagaccattacctagaacatcctaatcgaaaagagagaagggagaggcgagggagctcaccaggagagaggggcctgtgtgagcattgagcaaagcaaacgaagcagtacatacatctctcgctcgcagaggcccggccggccggctccatgcaacaagggacgacgagcggtggcggtgggcgatgatgatgatgatggcgggggagcacgtgctggccgctctggccaccctgcttctggcctcgctcctgaccctggtgctgaaccacttcctgcccttgcttctgaaccccaaggcccccaggggaagcttcgggtggccgctcctcggcgagacgctcaggttcctcacgccgcacgcctccaacacgctgggcggcttcctcgaggatcactgctccaggtatgggcgggtgttcaagtcccacctgttctgcaccccgacggtggtgtcctgcgaccaggacctcaaccacttcatcctgcagaacgaggagcggctgttccagtgcagctacccgaggccgatccatggcatcctgggcaagtcctccatgctcgtcgtcctgggcgaggaccacaagcgcctcaggaacctcgccctcgccctcgtcacctccaccaagctcaagcccagctaccttggcgacatcgagaagatcgcgctgcacgtcgtcggcgcatggcgacggcacggcggcgtcagggtcgtcgcattctgcgaggaggcaagaaagttcgcattcagtgtgatagtgaagcaggtgctggggctgtcgccagaggagccggtcactgcaaggatactcgaggacttcctggccttcatgaagggcctcatctccttccccctctacatcccagggaccccatatgccaaggctgtccgggcgagagagaggatatccagcactgtgaagggcatcatcaaggagcggaggagcgctgggtcatggaacaagcagggcgacttccttgacgtgctgctgtcaagcaacgagctatctgacgaggagaaagtgagctttgtgctggactccctgctgggagggtatgagaccacctcgctcctcatctccatggtcgtttatttccttggccagtctgctcaagatctggacctggttaagagggagcacgacagcataagatccaacaaaggcaaggaggagtgcttgacttcagaagactacaagaagatggaatatacccaacaagtcatcaacgaggcgctgagatgcggcaacatcgtcaagttcgtccaccggaaggcgctgaaagacgtcaaatacaaagagtatctgattccatctggctggaaggtcctaccggtcttcactgccgttcatctgaacccctcacttcatggagacgcgcagcagtttcagccctgtaggtgggagggcacaagccaagggacaagcaagaggtttacaccgttcggtggtggcccccggctctgcccaggatcagagctcgctaaagtggagactgctttcttcctccatcaccttgtcctcaattatagatggagaattgatggcgatgacattccaatggcatacccgtatgtggagtttcagagaggtctgccaatagaaatcgagccaacgtcccctgaatcttgactgtcctggagctacagccatcagttatcacaccagagagaaaaggggaaggtgcatggagtatacatgaatggtcagtgacagatctcacaagtgaaggaacactgagggcgcgtgctagtagctagcatatgaggcagctgagactgtaatttaatgtacatggtgtagatatattttgtccatggcaattgcttgaagtggctgattcacttcaccctgtaaaacattctccagtggtttcaactgctatcctataaaaaagaagggcccctgtgttt

SEQ ID NO: 18992 - protein, 481 aa, Zea mays subsp. mays
  peptide (1)..(481): Ceres Seq. ID no. 12369727
MMMMMAGEHVLAALATLLLASLLTLVLNHFLPLLLNPKAPRGSFGWPLLGETLRFLTPHASNTLGGFLEDHCSRYGRVFKSHLFCTPTVVSCDQDLNHFILQNEERLFQCSYPRPIHGILGKSSMLVVLGEDHKRLRNLALALVTSTKLKPSYLGDIEKIALHVVGAWRRHGGVRVVAFCEEARKFAFSVIVKQVLGLSPEEPVTARILEDFLAFMKGLISFPLYIPGTPYAKAVRARERISSTVKGIIKERRSAGSWNKQGDFLDVLLSSNELSDEEKVSFVLDSLLGGYETTSLLISMVVYFLGQSAQDLDLVKREHDSIRSNKGKEECLTSEDYKKMEYTQQVINEALRCGNIVKFVHRKALKDVKYKEYLIPSGWKVLPVFTAVHLNPSLHGDAQQFQPCRWEGTSQGTSKRFTPFGGGPRLCPGSELAKVETAFFLHHLVLNYRWRIDGDDIPMAYPYVEFQRGLPIEIEPTSPES

SEQ ID NO: 18993 - protein, 480 aa, Zea mays subsp. mays
  peptide (1)..(480): Ceres Seq. ID no. 12369728
MMMMAGEHVLAALATLLLASLLTLVLNHFLPLLLNPKAPRGSFGWPLLGETLRFLTPHASNTLGGFLEDHCSRYGRVFKSHLFCTPTVVSCDQDLNHFILQNEERLFQCSYPRPIHGILGKSSMLVVLGEDHKRLRNLALALVTSTKLKPSYLGDIEKIALHVVGAWRRHGGVRVVAFCEEARKFAFSVIVKQVLGLSPEEPVTARILEDFLAFMKGLISFPLYIPGTPYAKAVRARERISSTVKGIIKERRSAGSWNKQGDFLDVLLSSNELSDEEKVSFVLDSLLGGYETTSLLISMVVYFLGQSAQDLDLVKREHDSIRSNKGKEECLTSEDYKKMEYTQQVINEALRCGNIVKFVHRKALKDVKYKEYLIPSGWKVLPVFTAVHLNPSLHGDAQQFQPCRWEGTSQGTSKRFTPFGGGPRLCPGSELAKVETAFFLHHLVLNYRWRIDGDDIPMAYPYVEFQRGLPIEIEPTSPES

SEQ ID NO: 18994 - protein, 479 aa, Zea mays subsp. mays
  peptide (1)..(479): Ceres Seq. ID no. 12369729
MMMAGEHVLAALATLLLASLLTLVLNHFLPLLLNPKAPRGSFGWPLLGETLRFLTPHASNTLGGFLEDHCSRYGRVFKSHLFCTPTVVSCDQDLNHFILQNEERLFQCSYPRPIHGILGKSSMLVVLGEDHKRLRNLALALVTSTKLKPSYLGDIEKIALHVVGAWRRHGGVRVVAFCEEARKFAFSVIVKQVLGLSPEEPVTARILEDFLAFMKGLISFPLYIPGTPYAKAVRARERISSTVKGIIKERRSAGSWNKQGDFLDVLLSSNELSDEEKVSFVLDSLLGGYETTSLLISMVVYFLGQSAQDLDLVKREHDSIRSNKGKEECLTSEDYKKMEYTQQVINEALRCGNIVKFVHRKALKDVKYKEYLIPSGWKVLPVFTAVHLNPSLHGDAQQFQPCRWEGTSQGTSKRFTPFGGGPRLCPGSELAKVETAFFLHHLVLNYRWRIDGDDIPMAYPYVEFQRGLPIEIEPTSPES

SEQ ID NO: 18995 - DNA, 468 bp, Zea mays subsp. mays
  misc_feature (1)..(468): Ceres Seq. ID no. 1847474
  misc_feature (1)..(468): Ortholog of  Ceres SEQ ID NO 13598557 as cited in SEQ ID NO 65168
gttgttttgttcttgcggagacgagacgagacgaggcgacgcgassnyaggagtcgaggaggatcggggctcaggtggtacaaacaaaggagcgtcaggggttgagggggaggggcaagatgaacaggaagccaggagactgggactgcagggcgtgccagcacctcaacttcagccgccgagacatatgccagcgctgcagcgagccacgtggagttgctgatcgtggcggcggaggaggaggaggcgactacgcaagcttcggtggccgcggtggctcctccttcggcggcggctttggcgctgctggctctgacgtccggcctggtgactggtactgctcctgcggcgcgcacaacttcgccagccgctccagctgcttcaagtgctccgcctacaaggaggaggccgctgtgaacagtggcgctggcggctttgacggcgacatgtcacgctcacggggctacg

SEQ ID NO: 18996 - protein, 155 aa, Zea mays subsp. mays
  peptide (1)..(155): Ceres Seq. ID no. 1847475
  misc_feature (15)..(15): Xaa is any aa, unknown or other
  misc_feature (16)..(16): Xaa is any aa, unknown or other
CFVLAETRRDEATRXXESRRIGAQVVQTKERQGLRGRGKMNRKPGDWDCRACQHLNFSRRDICQRCSEPRGVADRGGGGGGGDYASFGGRGGSSFGGGFGAAGSDVRPGDWYCSCGAHNFASRSSCFKCSAYKEEAAVNSGAGGFDGDMSRSRGY

SEQ ID NO: 18997 - protein, 116 aa, Zea mays subsp. mays
  peptide (1)..(116): Ceres Seq. ID no. 1847476
MNRKPGDWDCRACQHLNFSRRDICQRCSEPRGVADRGGGGGGGDYASFGGRGGSSFGGGFGAAGSDVRPGDWYCSCGAHNFASRSSCFKCSAYKEEAAVNSGAGGFDGDMSRSRGY

SEQ ID NO: 18998 - DNA, 1008 bp, Zea mays subsp. mays
  misc_feature (1)..(1008): Ceres Seq. ID no. 12384340
  misc_feature (1)..(1008): Ortholog of  Ceres SEQ ID NO 14306565 as cited in SEQ ID NO 53000
  misc_feature (1)..(1008): Ortholog of  Ceres SEQ ID NO 14312192 as cited in SEQ ID NO 59249
gaagacacaaagctgaaggcgagcgaagcaaagtagtagtagtagtactgccgttcccgtccccgacgcgcctcccgcccgagcccgcacaaccgcgccgcgtcaatcctcatgtggccgtcctgggtgaaggcgcacagctctgacagcgccgccgcctccacctccaccgccctcgtccccgccgcaggcgccggggcgtccccgcgcctctccatccccaacccgtctctcaaggacctccggtcgctgctcgcgccggactccgccgccacagccccgccctccgcctccccgtcgccgcgcgtcttgcaccgcatccgcgtcgccgcctccgcgctccgggccctccgcacgctccaccagcccccgtcccggcctccggcggcgcccgctggcaaggagccggtgccgggcggcgggcgggtggtgctgtacttcacgtccctccgcgtcgtccgcggcacctacgaggactgccgcgcggtgcgcgccatcctgcgcgggctccgcgcggccgtcgacgagcgcgacctctccatggaccccggccacctgcccgagctcgccgcgctcctcccccgcgtggcgctgccccaggtcttcgtcggcggccgccacctcggcggcgccgacgaggtccggcgcctccacgagtccggggagctccgccgcatcgtcgcccccgctcccggccccgcgttctacggcagctgcgcccgctgcggcggcgagcgatacctgctttgcggcgcctgcgacggcagccacaagcggtacagcctcaagggcggcggcgggttccgcgcctgcgccgagtgcaacgagaacgggctcgtccggtgccccgcctgctgcgtacccgtacccgtcgcctgatctagatccacgatccacctggtactggttttctgttttaattattattcaaactctactagctgtactctgtacacaaactgctaaggagcttgatgaggactggaggagaaagctaccactccgtcc

SEQ ID NO: 18999 - protein, 255 aa, Zea mays subsp. mays
  peptide (1)..(255): Ceres Seq. ID no. 12384341
MWPSWVKAHSSDSAAASTSTALVPAAGAGASPRLSIPNPSLKDLRSLLAPDSAATAPPSASPSPRVLHRIRVAASALRALRTLHQPPSRPPAAPAGKEPVPGGGRVVLYFTSLRVVRGTYEDCRAVRAILRGLRAAVDERDLSMDPGHLPELAALLPRVALPQVFVGGRHLGGADEVRRLHESGELRRIVAPAPGPAFYGSCARCGGERYLLCGACDGSHKRYSLKGGGGFRACAECNENGLVRCPACCVPVPVA

SEQ ID NO: 19000 - DNA, 1681 bp, Zea mays subsp. mays
  misc_feature (1)..(1681): Ceres Seq. ID no. 12381795
  misc_feature (1)..(1681): Ortholog of  Ceres SEQ ID NO 13666169 as cited in SEQ ID NO 0
taataaaggaggcacatcgataggttctttatctggaagtagcagcataagtaattcttccggtcctggtggggatgattcacatctttggcctcagttgccagcttgggagatactggaggctgttccatttgtggttgatgctgctcttactgcttgttcccatggaagactatttccacgtgaactggccacaggcctgaaggatctggctgatttcctccctgcatctcttgctacaatagtaagctacttttccgctgaggtgacgcggggtgtctggaagcctgcatccatgaatggatcagattggcctagcccctctgtgaacctatccatggttgatgagcacatcaagaaaatcgtagctgctaccggtgttgatgttccaaagctagttacaggaggaagctcttcaggtacacttccgttaccattggctgctttcgtgagcctcacaatcacatacaagcttgacaaggcatcagagtgtttcctcaaccttgctggtccagctctagagaacctggctgcaagctgcccttggccaagcatggcaatcgttgcagcactgtggacccagaaggtgaagcgatggagcgatttcctaatattttcagcttcgcgcactgtgttccaccacaacaacgacgcagtcgtccagctcctccgaagctgcttcgccgctacccttggcatgtcttcgacatcagtatgcagctgtggaggtgtcgccagccttctgggcccacgggtactgccctggtggtttctcgccagttgcgccaggaatcctctacctccggatattccggtgcatcaaggactgctccatactcgccgaggacatactctcccttctgatgctctcagtgaaggatatcgcagaaacaactgtgcccagacaaaggtcagacaagctaaagaagaccaagtacgggatgaggcatggccaggtatctctttccgctgcaatgacgcaggtgaaggtggcggcatcgctgggggcgacactcgtctggctatccggcggcacggctctcgtccagtccctgatccaggagatgctgccgtcttggttcctgtccgcgcagaacctggatcagggcggggctagcggaggcgtggtgtacaagctgggcgggcacgcgttggcctacttcgcggtgtactcggggatgttggcctggggcatcgaccagacgcccgtgtcccggcgccgcgagagggtcatgcggtcgcacctggggttcctggcgagcgcgctggccgggaagatcttcctcggctgcgacctctccctgtggcgagcctacgtctctgggttcctaggactggtggttgaatgcaccccgtgctgggtgcaggaggtggacctgagggtgctcaagcgcctgagcagcggcctccggcactggggcgaggatgagctcgcggtggcgctcctccgccgcgccggtcccgaggctatgggcacagccgcggagatgatcttgggcagggagttgtgacgccgatgcgcgcgcgcgccgcgcggcgtatgctgttcgtcagcgatgatgcagtttttgtatataatcggttaaaatctggccatgtgtatgctcacgggtaatatttgaatgattttatctgtaaaactgttaagacgttttgatctctnnaatactaaccttcatcg

SEQ ID NO: 19001 - protein, 371 aa, Zea mays subsp. mays
  peptide (1)..(371): Ceres Seq. ID no. 12381796
NKGGTSIGSLSGSSSISNSSGPGGDDSHLWPQLPAWEILEAVPFVVDAALTACSHGRLFPRELATGLKDLADFLPASLATIVSYFSAEVTRGVWKPASMNGSDWPSPSVNLSMVDEHIKKIVAATGVDVPKLVTGGSSSGTLPLPLAAFVSLTITYKLDKASECFLNLAGPALENLAASCPWPSMAIVAALWTQKVKRWSDFLIFSASRTVFHHNNDAVVQLLRSCFAATLGMSSTSVCSCGGVASLLGPRVLPWWFLASCARNPLPPDIPVHQGLLHTRRGHTLPSDALSEGYRRNNCAQTKVRQAKEDQVRDEAWPGISFRCNDAGEGGGIAGGDTRLAIRRHGSRPVPDPGDAAVLVPVRAEPGSGRG

SEQ ID NO: 19002 - protein, 273 aa, Zea mays subsp. mays
  peptide (1)..(273): Ceres Seq. ID no. 12381797
MNGSDWPSPSVNLSMVDEHIKKIVAATGVDVPKLVTGGSSSGTLPLPLAAFVSLTITYKLDKASECFLNLAGPALENLAASCPWPSMAIVAALWTQKVKRWSDFLIFSASRTVFHHNNDAVVQLLRSCFAATLGMSSTSVCSCGGVASLLGPRVLPWWFLASCARNPLPPDIPVHQGLLHTRRGHTLPSDALSEGYRRNNCAQTKVRQAKEDQVRDEAWPGISFRCNDAGEGGGIAGGDTRLAIRRHGSRPVPDPGDAAVLVPVRAEPGSGRG

SEQ ID NO: 19003 - protein, 259 aa, Zea mays subsp. mays
  peptide (1)..(259): Ceres Seq. ID no. 12381798
MVDEHIKKIVAATGVDVPKLVTGGSSSGTLPLPLAAFVSLTITYKLDKASECFLNLAGPALENLAASCPWPSMAIVAALWTQKVKRWSDFLIFSASRTVFHHNNDAVVQLLRSCFAATLGMSSTSVCSCGGVASLLGPRVLPWWFLASCARNPLPPDIPVHQGLLHTRRGHTLPSDALSEGYRRNNCAQTKVRQAKEDQVRDEAWPGISFRCNDAGEGGGIAGGDTRLAIRRHGSRPVPDPGDAAVLVPVRAEPGSGRG

SEQ ID NO: 19004 - DNA, 2573 bp, Zea mays subsp. mays
  misc_feature (1)..(2573): Ceres Seq. ID no. 12387940
  misc_feature (1)..(2573): Ortholog of  Ceres SEQ ID NO 14313963 as cited in SEQ ID NO 59547
gcacgagaccattacctagaacatcctaatcaaaaagtgctagggtttcccccgtcttatcgcttcctcgttcccgcagccgccgcccaaaccctagcaaacccgtcctccgccatggccgacgaccactactcgtccaagcggaagtacgacgacccctcgccgccgccgcggcgcacggggttctcttctggcccgccgcctgcctcgccgcccgctggcggcgccccgtcgtacaacagcgttgcgccgccccccgatgagatccagctcgcgaagcagcgtgcgcaggagatcgcggcgcggatctttaacgccgcagaggccaagcgccctcgcgtcgacaacggcgacgatgacgtcggcggcttcggtggaggaagttccctgggtggcagcggtggtggtggtggtggccgcatcgggggcgcaggacttggcttctcgtcctctgccggtggtgggcatggggcttctatcccaccgttatcttctcagagcagtgcaccacagtactcatatggtggacatcagggtacaagcaaaaagattgaaattccaaatggaagggttggtgttattattggaaaagctggggaaactattaggtatatccaacttcaatcaggagcaaagattcaagttacgagagaccatgaagctgaacctggtgcactgacaaggcaagttgagctttctggcaatcctgagcagataagcaaagctgaacagttgatcaaagaagttatagcagaggctgatgctgggtcatccggtgctgtatctggtggccggaaatacaatgcaccacagccaggcgctgagacattccagatgaaaattgctaataataaggtgggattgattattgggaagggtggtgagaccataaagtctatgcaggccaaatctggagcccgcattcaggttattcctttgcatctgcctgctggtgatacttcaactgaaagaactgtgcatattgatggcactcaagaacaaattgaacatgcaaagcagctggtggctgaggttaccagtgagaatcgtgccaggaatccaatgtctggtggctattctcagcagggctatcaccctcctcgtcctcagtcaaactggggcccgccttctgcgccaccccagcagtctggttatggttatatgcagcctggggcttatcctggggcaccgccacagtatggtgcacctcagcaaccttatggtagctatcccccaacatctggtggctatcagactgggtgggatcagtctcaaaaccagcaatctcatacaactccccctggtactgggtatgattattatagccagcagcagcaacctcaacaacaacaatctgcccctgggactgctgcttctactgatgccactagctacaattatggccagccttcaacatatgcttcacaaggatatgattctacctatactcagcatagtggtgggcagcaagcatatggacatgatggctactctggttaccagacccaaggccagcagcagggctactctcagcagactggttatgaccagcagggatatggtgcatctgcttatggatcagctgcgaactcgacccaggatgggtccagctatggtggtcctggtggggccacccaggcatctccggggcagcaaacttcaaccccagctgctggaagccaccctggctatgccagtcaaccgcctactagtgctgcagcaagctatccagttcaaggttcagctccatctggatatggtgctccaccaccccagcctggctatggcacccaacctccacagcaaggtggatatggtccgggcgcttatgggcagccttctccacacggcgagaaacctcctgcatcttcaccttatggacaagctccgcctcctggatctgctcagggtgttatgtgcagtatggttacagccaacctgcatacggtgcaccaccagcttaccctggtgcacccactgcaagccacccgggctatggccaacagcagtcttatggcgatgcttatggtagtggaagctatgggcagcctacagcctacactactgaagcagcagctcctgctgcatcccaggatcactctgccgcacctgccgcggcccctggaacaacagctgcgccagctcctgacaacaatgggggtgccaaaacttctgcggaaacttgatcttcaacagctaattgggaacaaactttttacaagcctctgttgtgtcgtttcctccactgttgcttaatattacacatctagtttaggctccacatctacaggttatatctttctgcctgttgttttgaccccatgaatcgctctttccgtgctgttgattagtactttgttgtttttttattgctggttagatgtttggactggtgatatatgtgtttgtgcggttactcttgttggactctaatgggtacctaccggcttggtctggacatatactgtcctatatttgtttttagcctccttttacattggttattatgtgtgctgtacaactgtcggacgtttccataagnnggtgatagttatggatgaaaatttggttcc

SEQ ID NO: 19005 - protein, 751 aa, Zea mays subsp. mays
  peptide (1)..(751): Ceres Seq. ID no. 12387941
ARDHYLEHPNQKVLGFPPSYRFLVPAAAAQTLANPSSAMADDHYSSKRKYDDPSPPPRRTGFSSGPPPASPPAGGAPSYNSVAPPPDEIQLAKQRAQEIAARIFNAAEAKRPRVDNGDDDVGGFGGGSSLGGSGGGGGGRIGGAGLGFSSSAGGGHGASIPPLSSQSSAPQYSYGGHQGTSKKIEIPNGRVGVIIGKAGETIRYIQLQSGAKIQVTRDHEAEPGALTRQVELSGNPEQISKAEQLIKEVIAEADAGSSGAVSGGRKYNAPQPGAETFQMKIANNKVGLIIGKGGETIKSMQAKSGARIQVIPLHLPAGDTSTERTVHIDGTQEQIEHAKQLVAEVTSENRARNPMSGGYSQQGYHPPRPQSNWGPPSAPPQQSGYGYMQPGAYPGAPPQYGAPQQPYGSYPPTSGGYQTGWDQSQNQQSHTTPPGTGYDYYSQQQQPQQQQSAPGTAASTDATSYNYGQPSTYASQGYDSTYTQHSGGQQAYGHDGYSGYQTQGQQQGYSQQTGYDQQGYGASAYGSAANSTQDGSSYGGPGGATQASPGQQTSTPAAGSHPGYASQPPTSAAASYPVQGSAPSGYGAPPPQPGYGTQPPQQGGYGPGAYGQPSPHGEKPPASSPYGQAPPPGSAQGVMCSMVTANLHTVHHQLTLVHPLQATRAMANSSLMAMLMVVEAMGSLQPTLLKQQLLLHPRITLPHLPRPLEQQLRQLLTTMGVPKLLRKLDLQQLIGNKLFTSLCCVVSSTVA

SEQ ID NO: 19006 - protein, 713 aa, Zea mays subsp. mays
  peptide (1)..(713): Ceres Seq. ID no. 12387942
MADDHYSSKRKYDDPSPPPRRTGFSSGPPPASPPAGGAPSYNSVAPPPDEIQLAKQRAQEIAARIFNAAEAKRPRVDNGDDDVGGFGGGSSLGGSGGGGGGRIGGAGLGFSSSAGGGHGASIPPLSSQSSAPQYSYGGHQGTSKKIEIPNGRVGVIIGKAGETIRYIQLQSGAKIQVTRDHEAEPGALTRQVELSGNPEQISKAEQLIKEVIAEADAGSSGAVSGGRKYNAPQPGAETFQMKIANNKVGLIIGKGGETIKSMQAKSGARIQVIPLHLPAGDTSTERTVHIDGTQEQIEHAKQLVAEVTSENRARNPMSGGYSQQGYHPPRPQSNWGPPSAPPQQSGYGYMQPGAYPGAPPQYGAPQQPYGSYPPTSGGYQTGWDQSQNQQSHTTPPGTGYDYYSQQQQPQQQQSAPGTAASTDATSYNYGQPSTYASQGYDSTYTQHSGGQQAYGHDGYSGYQTQGQQQGYSQQTGYDQQGYGASAYGSAANSTQDGSSYGGPGGATQASPGQQTSTPAAGSHPGYASQPPTSAAASYPVQGSAPSGYGAPPPQPGYGTQPPQQGGYGPGAYGQPSPHGEKPPASSPYGQAPPPGSAQGVMCSMVTANLHTVHHQLTLVHPLQATRAMANSSLMAMLMVVEAMGSLQPTLLKQQLLLHPRITLPHLPRPLEQQLRQLLTTMGVPKLLRKLDLQQLIGNKLFTSLCCVVSSTVA

SEQ ID NO: 19007 - protein, 473 aa, Zea mays subsp. mays
  peptide (1)..(473): Ceres Seq. ID no. 12387943
MKIANNKVGLIIGKGGETIKSMQAKSGARIQVIPLHLPAGDTSTERTVHIDGTQEQIEHAKQLVAEVTSENRARNPMSGGYSQQGYHPPRPQSNWGPPSAPPQQSGYGYMQPGAYPGAPPQYGAPQQPYGSYPPTSGGYQTGWDQSQNQQSHTTPPGTGYDYYSQQQQPQQQQSAPGTAASTDATSYNYGQPSTYASQGYDSTYTQHSGGQQAYGHDGYSGYQTQGQQQGYSQQTGYDQQGYGASAYGSAANSTQDGSSYGGPGGATQASPGQQTSTPAAGSHPGYASQPPTSAAASYPVQGSAPSGYGAPPPQPGYGTQPPQQGGYGPGAYGQPSPHGEKPPASSPYGQAPPPGSAQGVMCSMVTANLHTVHHQLTLVHPLQATRAMANSSLMAMLMVVEAMGSLQPTLLKQQLLLHPRITLPHLPRPLEQQLRQLLTTMGVPKLLRKLDLQQLIGNKLFTSLCCVVSSTVA

SEQ ID NO: 19008 - DNA, 1388 bp, Zea mays subsp. mays
  misc_feature (1)..(1388): Ceres Seq. ID no. 12420175
  misc_feature (1)..(1388): Ortholog of  Ceres SEQ ID NO 12620027 as cited in SEQ ID NO 65784
gcacgagaccattacctagaacatcctaatcgaaaaataggataggaggtggtaaagagagagagccagaagcgaacgaggaggattcgagatggaggtggtggtgcctgtcatggcgccaagtgcgccgtgcagcccaagaaccgcggccatcgccggcgaccacctcccggcctactgctacttctactccagcgcgccgacgagcccgtccagggcgagctgcgcggggggcgccgccacgacgacgacgccgggctcgggcgacgaggccacgttcgacttcacgctcggcttcagcgggcagctgcaggaggccacgccgaccctcgcggccgccgacgagctcttcgagggcggcaggatccggccgctgaacacgccgcacccgagcattccgctggccgacgacgcctcgagctcctcctattccggtggccctcggtggtccccgagaagagccggcggcgcggatcgtcgggcggaggcgccgttggagagaggcaggtcgggctacagacccgccgcctcgacggcggcggcggcggcggcggcctcgtcgaggagtaggagggccacgcggtctctgtccccgttcagggtcaggggcggcggcggaggaggaggaggcgtggacgacgacgaggagtcccctccgtctccccgaacctntatgatgcggggctgcggcagcggcagcaagaagtggcggctcaaggacctgttcctgttccgcagcgcgtcggagggccgcgccaccaccggcggcggcagcaaggacccgctgttcaagtacaccatgctgtcgtcgtcccagacgctgcggaccggcggcgacggcagcgcgtccatgcgcaaggggagaggctccgcggcgtccgccagcgacatgccgatgccgtacgccgtgccccggggggcggcggcggccgaggacgcgcggcgccggacgacggccaccacgccgctgccgttccaccgcaacagcctcttcggctacctgcgctccaacccggcgatccacagcatcagcaggaagctcgggggcgggggcgggggcggcagcggcagcagcaaccatcccgtaccacccgccgcctccaactccagtagtcgtggcaggccgacatgatccgtccgcataccgcaagcagtcccgaaaccttgacggcgatgcagctcgacgcagaagtggccgccggcggccgtttttatctccccaccccactcctttttgttcccttgtaatttaatttgatgcgtattctttcgtttcatgtgaaccaacaaggtactagtagttagtgtagatatgtacgtacgtacgtacacggcggtatgtatgtatccccaaggatttctttgaagaaagaaaagataattagcgt

SEQ ID NO: 19009 - protein, 346 aa, Zea mays subsp. mays
  peptide (1)..(346): Ceres Seq. ID no. 12420176
  misc_feature (194)..(194): Xaa is any aa, unknown or other
MEVVVPVMAPSAPCSPRTAAIAGDHLPAYCYFYSSAPTSPSRASCAGGAATTTTPGSGDEATFDFTLGFSGQLQEATPTLAAADELFEGGRIRPLNTPHPSIPLADDASSSSYSGGPRWSPRRAGGADRRAEAPLERGRSGYRPAASTAAAAAAASSRSRRATRSLSPFRVRGGGGGGGGVDDDEESPPSPRTXMMRGCGSGSKKWRLKDLFLFRSASEGRATTGGGSKDPLFKYTMLSSSQTLRTGGDGSASMRKGRGSAASASDMPMPYAVPRGAAAAEDARRRTTATTPLPFHRNSLFGYLRSNPAIHSISRKLGGGGGGGSGSSNHPVPPAASNSSSRGRPT

SEQ ID NO: 19010 - protein, 339 aa, Zea mays subsp. mays
  peptide (1)..(339): Ceres Seq. ID no. 12420177
  misc_feature (187)..(187): Xaa is any aa, unknown or other
MAPSAPCSPRTAAIAGDHLPAYCYFYSSAPTSPSRASCAGGAATTTTPGSGDEATFDFTLGFSGQLQEATPTLAAADELFEGGRIRPLNTPHPSIPLADDASSSSYSGGPRWSPRRAGGADRRAEAPLERGRSGYRPAASTAAAAAAASSRSRRATRSLSPFRVRGGGGGGGGVDDDEESPPSPRTXMMRGCGSGSKKWRLKDLFLFRSASEGRATTGGGSKDPLFKYTMLSSSQTLRTGGDGSASMRKGRGSAASASDMPMPYAVPRGAAAAEDARRRTTATTPLPFHRNSLFGYLRSNPAIHSISRKLGGGGGGGSGSSNHPVPPAASNSSSRGRPT

SEQ ID NO: 19011 - DNA, 1865 bp, Zea mays subsp. mays
  misc_feature (1)..(1865): Ceres Seq. ID no. 12417373
  misc_feature (1)..(1865): Ortholog of  Ceres SEQ ID NO 15175923 as cited in SEQ ID NO 54037
  misc_feature (1)..(1865): Ortholog of  Ceres SEQ ID NO 14303366 as cited in SEQ ID NO 54418
  misc_feature (1)..(1865): Ortholog of  Ceres SEQ ID NO 13503610 as cited in SEQ ID NO 62416
  misc_feature (1)..(1865): Ortholog of  Ceres SEQ ID NO 13657610 as cited in SEQ ID NO 66165
  misc_feature (1)..(1865): Ortholog of  Ceres SEQ ID NO 13598312 as cited in SEQ ID NO 68448
  misc_feature (1)..(1865): Ortholog of  Ceres SEQ ID NO 13596100 as cited in SEQ ID NO 68573
gcacgagaccattacctagaacatcctaatcgaaaaactctcacgcacacactccacagtgccactcgtctcgctcgctcgcgccagctggtccggcagcagacagcatgggttcgtcggcggcgcttcagccgaagcagctgtaccagctcgtggtgaacaacttcgtcgccgtgctcgctgcgccgctggccgtggcggccgtcgtcaatgcggcgcgcgtcgggccggacgagctgctcggcaggctgcaggcgctccgggcggtgcacgtatttctggccgtgttcgtcgcggccgccacggcgatactgtacgtcctgctgcggccccgggccgtgtacctggtggactacgcctgcttccgcacgcggcccaactgccgcgtccccttcgccaccttcctggagcacgcgaagctggtgacgttcgtggagggggcctccatcgacgagcgcagcgtccggttcatgacgcggctgctggagcggtccggcctcggcgaggagacctgcctgcccccggcccaccactacatcccgccgtaccggaacatggaggcctcgcgcgcggaggtggagctcgtcatcttctcggccatcgacgacctgctcgcgaagacgggcatcagccccagcgccatcgacatcctggtggtgaactgcagcctcttcgcgcccgtcccgtccttcacggacatggtgatcaacaggtacgggatgcggccggacgtccgcaatgtgcacctgtccgggatggggtgcagcgccgggctcatctccgtggggctggcgcgcaacctgctgcaggtggcgggccggggcgcgcacgcgctggtggtgtcgacggagaccatcacccccaactactacgtgggcaaggagcgcgccatgctcctgcccaactgcctcttccgcatcggcggcgccgccgtgctgctgtccacgtcccggtccagggcccggttccgcctggcccgcgtggtgcgcacgctgacgggcgcccaggacagcgcgtaccggtgcgtgttccaggaggaggacggcgagggccaccgcgggatcaacctgtccaaggacctgatgaccatcgcgggcgacgcgctcaaggccaacatcaccgccatcgggccgctggtgctgccggcctcggagcagctgctgttcgcgctgtccttcatcgcgcggcgcgtgctgaaccggcgcgtgaagccgtacctcccggacttccgcacggcgttcgagcacttctgcatccacgcggggggccgcgcggtgatcgacgagctgcagcgcagcctgggcctgtcggacgaggacgtggaggcgtcgcgcatggcgcctgcaccggttcggcaacacgtcgagcagctcggtgtggtacgagctggcgtacatcgaggccaagggccggatgcgccgcggcgaccgcgtgtggatgatcggattcggctccgggttcaagtgcaacagcgcggcctgggagtgcatcgcgccggcgcgcaccgccgaggggccctgggcggagagcgtcagccgctaccccgtggacatccccgaggtgctcaagcactagccgctatcccgtggacatcaggccgggcatgcatgtgaccggccgacgacgtgacagcgtgttttggacttgcttgtggtgctggccgggccggacgcgttgaatgccgagcctgacgcgtccatgtgtgcggtgcgctccagcccggacaggtggttgcgagagggtacaccgtgttaaatccgggccatttacacacgtatagtactcgtgctcctctagatcgtgtaccccttccttctcttcttgttcttcttctttttaccttccttttcaacatttgttttccc

SEQ ID NO: 19012 - protein, 501 aa, Zea mays subsp. mays
  peptide (1)..(501): Ceres Seq. ID no. 12417374
MGSSAALQPKQLYQLVVNNFVAVLAAPLAVAAVVNAARVGPDELLGRLQALRAVHVFLAVFVAAATAILYVLLRPRAVYLVDYACFRTRPNCRVPFATFLEHAKLVTFVEGASIDERSVRFMTRLLERSGLGEETCLPPAHHYIPPYRNMEASRAEVELVIFSAIDDLLAKTGISPSAIDILVVNCSLFAPVPSFTDMVINRYGMRPDVRNVHLSGMGCSAGLISVGLARNLLQVAGRGAHALVVSTETITPNYYVGKERAMLLPNCLFRIGGAAVLLSTSRSRARFRLARVVRTLTGAQDSAYRCVFQEEDGEGHRGINLSKDLMTIAGDALKANITAIGPLVLPASEQLLFALSFIARRVLNRRVKPYLPDFRTAFEHFCIHAGGRAVIDELQRSLGLSDEDVEASRMAPAPVRQHVEQLGVVRAGVHRGQGPDAPRRPRVDDRIRLRVQVQQRGLGVHRAGAHRRGALGGERQPLPRGHPRGAQALAAIPWTSGRACM

SEQ ID NO: 19013 - protein, 380 aa, Zea mays subsp. mays
  peptide (1)..(380): Ceres Seq. ID no. 12417375
MTRLLERSGLGEETCLPPAHHYIPPYRNMEASRAEVELVIFSAIDDLLAKTGISPSAIDILVVNCSLFAPVPSFTDMVINRYGMRPDVRNVHLSGMGCSAGLISVGLARNLLQVAGRGAHALVVSTETITPNYYVGKERAMLLPNCLFRIGGAAVLLSTSRSRARFRLARVVRTLTGAQDSAYRCVFQEEDGEGHRGINLSKDLMTIAGDALKANITAIGPLVLPASEQLLFALSFIARRVLNRRVKPYLPDFRTAFEHFCIHAGGRAVIDELQRSLGLSDEDVEASRMAPAPVRQHVEQLGVVRAGVHRGQGPDAPRRPRVDDRIRLRVQVQQRGLGVHRAGAHRRGALGGERQPLPRGHPRGAQALAAIPWTSGRACM

SEQ ID NO: 19014 - protein, 352 aa, Zea mays subsp. mays
  peptide (1)..(352): Ceres Seq. ID no. 12417376
MEASRAEVELVIFSAIDDLLAKTGISPSAIDILVVNCSLFAPVPSFTDMVINRYGMRPDVRNVHLSGMGCSAGLISVGLARNLLQVAGRGAHALVVSTETITPNYYVGKERAMLLPNCLFRIGGAAVLLSTSRSRARFRLARVVRTLTGAQDSAYRCVFQEEDGEGHRGINLSKDLMTIAGDALKANITAIGPLVLPASEQLLFALSFIARRVLNRRVKPYLPDFRTAFEHFCIHAGGRAVIDELQRSLGLSDEDVEASRMAPAPVRQHVEQLGVVRAGVHRGQGPDAPRRPRVDDRIRLRVQVQQRGLGVHRAGAHRRGALGGERQPLPRGHPRGAQALAAIPWTSGRACM

SEQ ID NO: 19015 - DNA, 2782 bp, Zea mays subsp. mays
  misc_feature (1)..(2782): Ceres Seq. ID no. 12361524
  misc_feature (1)..(2782): Ortholog of  Ceres SEQ ID NO 15178157 as cited in SEQ ID NO 57481
  misc_feature (1)..(2782): Ortholog of  Ceres SEQ ID NO 13597407 as cited in SEQ ID NO 64106
  misc_feature (1)..(2782): Ortholog of  Ceres SEQ ID NO 14303309 as cited in SEQ ID NO 67739
gaaaaatcccaccccccctccactccactaccacggcggcacggcctgcctctgcagctctgccctgctccgcacccctcgctctccaaccccaacgcgcggcgttgctaaaattcaccgcagcgcttactccagtttggccacctcaccacccgccgccgctgtttaagaaggccccgcgcccgatcggggatcacgaaccttggccgccgctgccggagtgggggcgtagatttccggcggccatggggggcgccgtgatggtcgccatcgcggcctctatcggcaacttgctgcagggctgggacaatgcgacaattgctggagccgtcctgtacataaagaaggaattcaacctgcagagcgagcctctgatcgagggcctcatcgtcgccatgtccctcattggggcaacagtcatcacgacgttctccggggcagcggccgactgcgttggtaggaggcccatgctggtcgcctcggctgtcctctacttcgtcagtgggctggtgatgctttgggcgccaagtgtgtacatcttgctcctcgcaaggctcattgatgggttcggtatcggtttggcggtcacacttgttcctctctacatctccgagactgcaccgacagacattcgtgggctgttgaacacgttgccgcagttcagtgggtcaggagggatgttcctctcctactgcatggtgtttgggatgtccctcatgcccaaacctgattggaggctcatgcttggagttctgtcgatcccgtcacttatttactttggactgactgtcttctacttgcctgaatcaccaaggtggcttgtgagcaaaggaaggatggcggaggcgaagagagtgttgcaaaggctgcggggaagagaagatgtctcaggggagatggctcttctagttgaaggtttgggggtcggtaaagatacacgtattgaagaatacataattggtcccgatgatgaacttgctgatgaagggctggctccagatccagagaagatcaaactatatggacctgaagaaggcctatcttgggttgcccgacctgttcggggacaaagtgctcttggaagcgcgttaggtctcatctctcgtcatgggagtatggcggctagtcagggtaagcccctcgtggatcctatggtcactcttttcggaagtgttcatgaaaagatgcctgagatcatggggagcatgaggagcacattgtttcccaactttggcagcatgtttagtgttgccgaccagcagcaggtgaaagctgactgggacgccgagagtcaaagggaaggtgaagattatgcttcggatcatggtggcgatgacatcgaggataacctccaaagcccacttatttctcgtcaggcaacaagtgtggaaggaaaggagatcgctgcacctcatggtagcatattgggtgctgtgggaaggagcagtagcttgcagggaggggaggcagtaagcagcatgggcattggcggaggatggcagttggcgtggaaatggaccgagagagagggcgaagatgggcaaaaggaaggtggcttccagcgtatttacttgcatgaggagggcgtacaaggcaacaggggttctatattgtcattaccaggcggggatgttcctcctggtggtgagttcatccaggctgcagctcttgtgagccaaccagctctttactctaaggaactgctggagcaacgtgctgctggtcctgcgatgatgcatccatctgaagcagttactaaaggtccaagatgggccgacctatttgagcctggggtgaagcatgcactgtttgttggcataggaatacagatcctgcaacagtttgctggcatcaacggcgttctctactacactcctcaaattcttgagcaagcaggcgttggtgttcttctgtcgaacctcggccttaacgcttcttcggcatcaatcctcattagcgccctgacgaccttactgatgctcccaagcatcggcattgcgatgaggctcatggatatgtccggaaggaggtttctcctcctcgcgacgatcccagtcctaatagtcgcgctactcgtcctggtggtgtccaacatcgtggacgtgggggacgtggcgcacgcggcgctctccacggccagcgtcatagtctacttctgcttcttcgtcatggggttcgggcccgtccccaacatcctctgcgcagagatcttccccaccacggtccgcggtgtctgcatcgccatctgcgccctggccttctggctcggtgacatcatcgtgacgtacactctccccgtgatgctgaacgtcgtcgggctcgccggcgtctttggggtgtacgccgtcgtgtgcgtcctagccctcgcgttcgtgttcgtcaaggtgcccgagacgaagggcatgcctctcgaggtcatcaccgagttcttctccgttggggcaaagcaagccaaggaagaggaggaggaggaggccagggaaggttgatcacccggacggccggacccagttaccggcaccgcctgtggggatttttgtggtctgcacacttcactgtggttggtcctgtgatgatgtatttgtgaaaaaaaaaactttgggtagggggcagagatgatttggctgtacaatgtgaggcttgattctgccaaaggctggccttcagaactaggaagggtgtctgttatcttcttttgttgcttggagaccttgtgcttgtgttggttggaattttgttgcctatgtaactagtggtgtatgacagttatgctattggtttc

SEQ ID NO: 19016 - protein, 828 aa, Zea mays subsp. mays
  peptide (1)..(828): Ceres Seq. ID no. 12361525
KIPPPLHSTTTAARPASAALPCSAPLALQPQRAALLKFTAALTPVWPPHHPPPLFKKAPRPIGDHEPWPPLPEWGRRFPAAMGGAVMVAIAASIGNLLQGWDNATIAGAVLYIKKEFNLQSEPLIEGLIVAMSLIGATVITTFSGAAADCVGRRPMLVASAVLYFVSGLVMLWAPSVYILLLARLIDGFGIGLAVTLVPLYISETAPTDIRGLLNTLPQFSGSGGMFLSYCMVFGMSLMPKPDWRLMLGVLSIPSLIYFGLTVFYLPESPRWLVSKGRMAEAKRVLQRLRGREDVSGEMALLVEGLGVGKDTRIEEYIIGPDDELADEGLAPDPEKIKLYGPEEGLSWVARPVRGQSALGSALGLISRHGSMAASQGKPLVDPMVTLFGSVHEKMPEIMGSMRSTLFPNFGSMFSVADQQQVKADWDAESQREGEDYASDHGGDDIEDNLQSPLISRQATSVEGKEIAAPHGSILGAVGRSSSLQGGEAVSSMGIGGGWQLAWKWTEREGEDGQKEGGFQRIYLHEEGVQGNRGSILSLPGGDVPPGGEFIQAAALVSQPALYSKELLEQRAAGPAMMHPSEAVTKGPRWADLFEPGVKHALFVGIGIQILQQFAGINGVLYYTPQILEQAGVGVLLSNLGLNASSASILISALTTLLMLPSIGIAMRLMDMSGRRFLLLATIPVLIVALLVLVVSNIVDVGDVAHAALSTASVIVYFCFFVMGFGPVPNILCAEIFPTTVRGVCIAICALAFWLGDIIVTYTLPVMLNVVGLAGVFGVYAVVCVLALAFVFVKVPETKGMPLEVITEFFSVGAKQAKEEEEEEAREG

SEQ ID NO: 19017 - protein, 747 aa, Zea mays subsp. mays
  peptide (1)..(747): Ceres Seq. ID no. 12361526
MGGAVMVAIAASIGNLLQGWDNATIAGAVLYIKKEFNLQSEPLIEGLIVAMSLIGATVITTFSGAAADCVGRRPMLVASAVLYFVSGLVMLWAPSVYILLLARLIDGFGIGLAVTLVPLYISETAPTDIRGLLNTLPQFSGSGGMFLSYCMVFGMSLMPKPDWRLMLGVLSIPSLIYFGLTVFYLPESPRWLVSKGRMAEAKRVLQRLRGREDVSGEMALLVEGLGVGKDTRIEEYIIGPDDELADEGLAPDPEKIKLYGPEEGLSWVARPVRGQSALGSALGLISRHGSMAASQGKPLVDPMVTLFGSVHEKMPEIMGSMRSTLFPNFGSMFSVADQQQVKADWDAESQREGEDYASDHGGDDIEDNLQSPLISRQATSVEGKEIAAPHGSILGAVGRSSSLQGGEAVSSMGIGGGWQLAWKWTEREGEDGQKEGGFQRIYLHEEGVQGNRGSILSLPGGDVPPGGEFIQAAALVSQPALYSKELLEQRAAGPAMMHPSEAVTKGPRWADLFEPGVKHALFVGIGIQILQQFAGINGVLYYTPQILEQAGVGVLLSNLGLNASSASILISALTTLLMLPSIGIAMRLMDMSGRRFLLLATIPVLIVALLVLVVSNIVDVGDVAHAALSTASVIVYFCFFVMGFGPVPNILCAEIFPTTVRGVCIAICALAFWLGDIIVTYTLPVMLNVVGLAGVFGVYAVVCVLALAFVFVKVPETKGMPLEVITEFFSVGAKQAKEEEEEEAREG

SEQ ID NO: 19018 - protein, 742 aa, Zea mays subsp. mays
  peptide (1)..(742): Ceres Seq. ID no. 12361527
MVAIAASIGNLLQGWDNATIAGAVLYIKKEFNLQSEPLIEGLIVAMSLIGATVITTFSGAAADCVGRRPMLVASAVLYFVSGLVMLWAPSVYILLLARLIDGFGIGLAVTLVPLYISETAPTDIRGLLNTLPQFSGSGGMFLSYCMVFGMSLMPKPDWRLMLGVLSIPSLIYFGLTVFYLPESPRWLVSKGRMAEAKRVLQRLRGREDVSGEMALLVEGLGVGKDTRIEEYIIGPDDELADEGLAPDPEKIKLYGPEEGLSWVARPVRGQSALGSALGLISRHGSMAASQGKPLVDPMVTLFGSVHEKMPEIMGSMRSTLFPNFGSMFSVADQQQVKADWDAESQREGEDYASDHGGDDIEDNLQSPLISRQATSVEGKEIAAPHGSILGAVGRSSSLQGGEAVSSMGIGGGWQLAWKWTEREGEDGQKEGGFQRIYLHEEGVQGNRGSILSLPGGDVPPGGEFIQAAALVSQPALYSKELLEQRAAGPAMMHPSEAVTKGPRWADLFEPGVKHALFVGIGIQILQQFAGINGVLYYTPQILEQAGVGVLLSNLGLNASSASILISALTTLLMLPSIGIAMRLMDMSGRRFLLLATIPVLIVALLVLVVSNIVDVGDVAHAALSTASVIVYFCFFVMGFGPVPNILCAEIFPTTVRGVCIAICALAFWLGDIIVTYTLPVMLNVVGLAGVFGVYAVVCVLALAFVFVKVPETKGMPLEVITEFFSVGAKQAKEEEEEEAREG

SEQ ID NO: 19019 - DNA, 1315 bp, Zea mays subsp. mays
  misc_feature (1)..(1315): Ceres Seq. ID no. 13598890
  misc_feature (1)..(1315): Ortholog of  Ceres SEQ ID NO 15169092 as cited in SEQ ID NO 60430
  misc_feature (1)..(1315): Ortholog of  Ceres SEQ ID NO 14303680 as cited in SEQ ID NO 66019
  misc_feature (1)..(1315): Ortholog of  Ceres SEQ ID NO 15224940 as cited in SEQ ID NO 0
cacctggagttctctccgaggaaacaatcgagaagatggaatttgaggtcgagaggttaacaagactaaagaccagcagactgaaggaaatcgtcatgaaaaggagggcagagttagaagcgatctgccagaatgcacacatagaacctgatgtcagcacggcccctgaacagactgattctttgatcgattctggcctcatcgacccttctgagctcctggcgaatattgagtcacaaatattaaaagcgaaagaagagtctcttagtcggaaagatataatggacaggataaatagatggattgctgcttgcgatgaagaggcttggcttgaagaatataaccaggacccaaagaggtacagtgctggaaggggtgctcatataaaccttaaacgggcagaaaaggcacggattttggttagaaaaatcccaagtatggtggacgacttgataaaccgaacctttgcttgggaaaacgcaagaaataaaccctttctctatgatgggggacgcctaatatctgtactagaagagtacaggcttagccggcatcagaaagaagaggaaaatcgacggtaccgggaccagaagaagctggagagcatcctacttgcagagaaagaagcgatcttcggatctagaccaagcccaaggaagacgagcagcttaagtaggaaggcaaatgggtaccggccaaatgggaacaccaacggactcaagactccaactcctcgccgattgtctctcggcagtgctactcctgagcttttgacgcccagatcgtactctggccataatagatactttggcgatgtgaggcgtctatcgacttcccatctgaacttcggtgatgattcgctgtcaacgtttacatccatcagtggctctgaaccagaatccccctctattggatgaacaccgtactgctggatgactggatggtcagtattgcgtattgtaaatgggcaccatgttaccaagttcttgcactagcatgtacattcctgatgtcatatatttagctcatattggagtactaagtattggacgggttgacttggtttgggttgggtgtggagttgaattgtttcaagttgatggctttgtagattgacaattaggcggaaagatgtaggggagcgatctggatttgggcagtcagctgtaacatatcataacttatgtgtttggtttgtgtgtgcaaaaaaaaaaaaaaaaaaaaaaaaaaaaaaaaaaaaaaaaaaaaaaaaaaaaaaaaaaaaataaaaaaaaaaaaaaaaaatatcgataccgtcgacctcgagggggggccc

SEQ ID NO: 19020 - protein, 304 aa, Zea mays subsp. mays
  peptide (1)..(304): Ceres Seq. ID no. 13598891
PGVLSEETIEKMEFEVERLTRLKTSRLKEIVMKRRAELEAICQNAHIEPDVSTAPEQTDSLIDSGLIDPSELLANIESQILKAKEESLSRKDIMDRINRWIAACDEEAWLEEYNQDPKRYSAGRGAHINLKRAEKARILVRKIPSMVDDLINRTFAWENARNKPFLYDGGRLISVLEEYRLSRHQKEEENRRYRDQKKLESILLAEKEAIFGSRPSPRKTSSLSRKANGYRPNGNTNGLKTPTPRRLSLGSATPELLTPRSYSGHNRYFGDVRRLSTSHLNFGDDSLSTFTSISGSEPESPSIG

SEQ ID NO: 19021 - protein, 293 aa, Zea mays subsp. mays
  peptide (1)..(293): Ceres Seq. ID no. 13598892
MEFEVERLTRLKTSRLKEIVMKRRAELEAICQNAHIEPDVSTAPEQTDSLIDSGLIDPSELLANIESQILKAKEESLSRKDIMDRINRWIAACDEEAWLEEYNQDPKRYSAGRGAHINLKRAEKARILVRKIPSMVDDLINRTFAWENARNKPFLYDGGRLISVLEEYRLSRHQKEEENRRYRDQKKLESILLAEKEAIFGSRPSPRKTSSLSRKANGYRPNGNTNGLKTPTPRRLSLGSATPELLTPRSYSGHNRYFGDVRRLSTSHLNFGDDSLSTFTSISGSEPESPSIG

SEQ ID NO: 19022 - protein, 273 aa, Zea mays subsp. mays
  peptide (1)..(273): Ceres Seq. ID no. 13598893
MKRRAELEAICQNAHIEPDVSTAPEQTDSLIDSGLIDPSELLANIESQILKAKEESLSRKDIMDRINRWIAACDEEAWLEEYNQDPKRYSAGRGAHINLKRAEKARILVRKIPSMVDDLINRTFAWENARNKPFLYDGGRLISVLEEYRLSRHQKEEENRRYRDQKKLESILLAEKEAIFGSRPSPRKTSSLSRKANGYRPNGNTNGLKTPTPRRLSLGSATPELLTPRSYSGHNRYFGDVRRLSTSHLNFGDDSLSTFTSISGSEPESPSIG

SEQ ID NO: 19023 - DNA, 1101 bp, Zea mays subsp. mays
  misc_feature (1)..(1101): Ceres Seq. ID no. 12375844
  misc_feature (1)..(1101): Ortholog of  Ceres SEQ ID NO 14315862 as cited in SEQ ID NO 60207
  misc_feature (1)..(1101): Ortholog of  Ceres SEQ ID NO 13660129 as cited in SEQ ID NO 67547
gcacgagaccattacctagaacatcctaatcgaaaaacatccctcaaccggtatgtgtttcgtgccaactgctgtaggaagtaggatccagcagtctgcaaggtgtccaaagaaaacaacacggcaggagtgaagatctctgataggatgacttcagtgtctgaatcaacacttgtgctggcttcaggtgcatcaatgttaccgcatcctgcgaaggtacggacaggtggtgaagatgcatattttatagcttgtgatggctggtttggtgtagcagatggagttggtcagtggtcatttgaagggatcaatgccggactttatgccagagaactaatggatggctgcaaaaagatcgtggaagagacccaaggagctccggggatgagaaccgaggaagttcttgccaaggctgcagatgaagcacggtcccctggttcttccactgttttagttgctcactttgatggcaaggtccttcacgcatcaaacatcggagattctggattcctcgtgattaggaacggaggggtccataagaaatcaaacccaatgacttacggtttcaatttcccgttgcagattgagaagggcgacgaccctctaaaacttgtacagaaatacgccatctgtctacaagaaggcgacgtcgttgtaacagcgtcagacggtcttttcgacaacgtctacgaggaagaagtagcaggcatcgtctccaaatcattagaagctgatctgaagcccacggaaatggccgatttactggttgcccgagcgaaggaggtggggcggtgtgggtttggaaggagcccgttctcggactcggctctcgcggctgggtacctgggctactccggcggcaagctggatgatgtaacggttgttgtatcgattgttcggaaatctgaagtttaataaactagaaacgaactctcaaagttgagcgcacttcttatttttttcttcttctttttctcttcttgcaacagctgcactcgctggcaaaatgcccgtgagcatttcgcacgtccctggcctacgcgcccaggcgcattgcgaaacgtgtattgtgtacacttgatacatactataaggttgtat

SEQ ID NO: 19024 - protein, 255 aa, Zea mays subsp. mays
  peptide (1)..(255): Ceres Seq. ID no. 12375845
MTSVSESTLVLASGASMLPHPAKVRTGGEDAYFIACDGWFGVADGVGQWSFEGINAGLYARELMDGCKKIVEETQGAPGMRTEEVLAKAADEARSPGSSTVLVAHFDGKVLHASNIGDSGFLVIRNGGVHKKSNPMTYGFNFPLQIEKGDDPLKLVQKYAICLQEGDVVVTASDGLFDNVYEEEVAGIVSKSLEADLKPTEMADLLVARAKEVGRCGFGRSPFSDSALAAGYLGYSGGKLDDVTVVVSIVRKSEV

SEQ ID NO: 19025 - protein, 239 aa, Zea mays subsp. mays
  peptide (1)..(239): Ceres Seq. ID no. 12375846
MLPHPAKVRTGGEDAYFIACDGWFGVADGVGQWSFEGINAGLYARELMDGCKKIVEETQGAPGMRTEEVLAKAADEARSPGSSTVLVAHFDGKVLHASNIGDSGFLVIRNGGVHKKSNPMTYGFNFPLQIEKGDDPLKLVQKYAICLQEGDVVVTASDGLFDNVYEEEVAGIVSKSLEADLKPTEMADLLVARAKEVGRCGFGRSPFSDSALAAGYLGYSGGKLDDVTVVVSIVRKSEV

SEQ ID NO: 19026 - protein, 192 aa, Zea mays subsp. mays
  peptide (1)..(192): Ceres Seq. ID no. 12375847
MDGCKKIVEETQGAPGMRTEEVLAKAADEARSPGSSTVLVAHFDGKVLHASNIGDSGFLVIRNGGVHKKSNPMTYGFNFPLQIEKGDDPLKLVQKYAICLQEGDVVVTASDGLFDNVYEEEVAGIVSKSLEADLKPTEMADLLVARAKEVGRCGFGRSPFSDSALAAGYLGYSGGKLDDVTVVVSIVRKSEV

SEQ ID NO: 19027 - DNA, 1298 bp, Zea mays subsp. mays
  misc_feature (1)..(1298): Ceres Seq. ID no. 12384330
  misc_feature (1)..(1298): Ortholog of  Ceres SEQ ID NO 14309755 as cited in SEQ ID NO 20741
  misc_feature (1)..(1298): Ortholog of  Ceres SEQ ID NO 14310369 as cited in SEQ ID NO 54765
  misc_feature (1)..(1298): Ortholog of  Ceres SEQ ID NO 13638746 as cited in SEQ ID NO 59296
  misc_feature (1)..(1298): Ortholog of  Ceres SEQ ID NO 14314050 as cited in SEQ ID NO 59952
  misc_feature (1)..(1298): Ortholog of  Ceres SEQ ID NO 13596474 as cited in SEQ ID NO 62169
  misc_feature (1)..(1298): Ortholog of  Ceres SEQ ID NO 13598714 as cited in SEQ ID NO 62656
  misc_feature (1)..(1298): Ortholog of  Ceres SEQ ID NO 14302434 as cited in SEQ ID NO 63410
  misc_feature (1)..(1298): Ortholog of  Ceres SEQ ID NO 15225685 as cited in SEQ ID NO 63616
  misc_feature (1)..(1298): Ortholog of  Ceres SEQ ID NO 13584480 as cited in SEQ ID NO 64751
  misc_feature (1)..(1298): Ortholog of  Ceres SEQ ID NO 13597519 as cited in SEQ ID NO 64759
  misc_feature (1)..(1298): Ortholog of  Ceres SEQ ID NO 14302388 as cited in SEQ ID NO 65655
  misc_feature (1)..(1298): Ortholog of  Ceres SEQ ID NO 13587054 as cited in SEQ ID NO 0
gcacgagaccattacctagaacatcctaatcaaaaatctcattctacagggaagacgaaaacacactgcagctggagcagcactgatatcgaccatggctccagcagcacctgcatctgcgacaaaatgcagcagcggcatcgtcatctctgtgctcttgcccctcgcgctgctaatggcggccgccggcacctcgtcggcgcagctgtccacgggcttctactcttcctcgtgtcccggcgtgtacgacgccgtcaagtcggtggtgcagtccgccgtcgccagcgagcagcgcatgggcgcctccatcgtccgcctcttcttccacgactgcttcgtccagggctgcgacgcgtcgctgctgctggacgacacgcctagcttccagggagagaagatggccaaccctaacaacggctccgtgaggggattcgaggtcatcgacgccgtcaagtccgccgtcgagaaggtgtgccccggcgtcgtctcctgcgccgacatcctcgccatcgccgccagggacagcgtcgtcatcctgggtggtccgacctgggacgtgaaggtcgggcggcgggactccacgacggcgagcttcagcggcgccaacaacaacatcccgccgccgacgtcgggcctcgccaacctcacgtcgctcttcgccgcccaaggcctctcccaaaaggacatggtcgcgctctccggagctcacaccatcggccaagcacgctgcaccaacttcagagcccacgtgtacaacgacaccaacatcgacggcagcttcgcaagaacaaggcagtcaggctgccctagatcgtcctcaggctcatcaggcgacaacaacctggcgccattggaccttcaaaccccgaccgtcttcgacaacaactactacaagaaccttgtctgcaagaaggggctcctgcactccgaccaggagctcttcaatggcggagccaccgacgcgctggtccagtcctacgccagtggccagagcgagttcttctcggactttgtgacgggcatggtgaagatgggtgacatcactccgttaactggctcccggtgggcagattaggaagaactgcagaagggtcaattaattaaccaattaataacaaggtcggccggcggtgcacactatctaacagggggcttgctttcagtcgttaattaagtttgtaatctttctacttcgtccacaaaattgtgagatcatcatgcatgttgtaccagccaaccaaggtgttgagacgatgttgttcgtcgtttgaataagtaatccatcatttgttcttctt

SEQ ID NO: 19028 - protein, 326 aa, Zea mays subsp. mays
  peptide (1)..(326): Ceres Seq. ID no. 12384331
MAPAAPASATKCSSGIVISVLLPLALLMAAAGTSSAQLSTGFYSSSCPGVYDAVKSVVQSAVASEQRMGASIVRLFFHDCFVQGCDASLLLDDTPSFQGEKMANPNNGSVRGFEVIDAVKSAVEKVCPGVVSCADILAIAARDSVVILGGPTWDVKVGRRDSTTASFSGANNNIPPPTSGLANLTSLFAAQGLSQKDMVALSGAHTIGQARCTNFRAHVYNDTNIDGSFARTRQSGCPRSSSGSSGDNNLAPLDLQTPTVFDNNYYKNLVCKKGLLHSDQELFNGGATDALVQSYASGQSEFFSDFVTGMVKMGDITPLTGSRWAD

SEQ ID NO: 19029 - protein, 299 aa, Zea mays subsp. mays
  peptide (1)..(299): Ceres Seq. ID no. 12384332
MAAAGTSSAQLSTGFYSSSCPGVYDAVKSVVQSAVASEQRMGASIVRLFFHDCFVQGCDASLLLDDTPSFQGEKMANPNNGSVRGFEVIDAVKSAVEKVCPGVVSCADILAIAARDSVVILGGPTWDVKVGRRDSTTASFSGANNNIPPPTSGLANLTSLFAAQGLSQKDMVALSGAHTIGQARCTNFRAHVYNDTNIDGSFARTRQSGCPRSSSGSSGDNNLAPLDLQTPTVFDNNYYKNLVCKKGLLHSDQELFNGGATDALVQSYASGQSEFFSDFVTGMVKMGDITPLTGSRWAD

SEQ ID NO: 19030 - protein, 259 aa, Zea mays subsp. mays
  peptide (1)..(259): Ceres Seq. ID no. 12384333
MGASIVRLFFHDCFVQGCDASLLLDDTPSFQGEKMANPNNGSVRGFEVIDAVKSAVEKVCPGVVSCADILAIAARDSVVILGGPTWDVKVGRRDSTTASFSGANNNIPPPTSGLANLTSLFAAQGLSQKDMVALSGAHTIGQARCTNFRAHVYNDTNIDGSFARTRQSGCPRSSSGSSGDNNLAPLDLQTPTVFDNNYYKNLVCKKGLLHSDQELFNGGATDALVQSYASGQSEFFSDFVTGMVKMGDITPLTGSRWAD

SEQ ID NO: 19031 - DNA, 2440 bp, Zea mays subsp. mays
  misc_feature (1)..(2440): Ceres Seq. ID no. 12436117
  misc_feature (1)..(2440): Ortholog of  Ceres SEQ ID NO 15178310 as cited in SEQ ID NO 1089
  misc_feature (1)..(2440): Ortholog of  Ceres SEQ ID NO 15225226 as cited in SEQ ID NO 58693
  misc_feature (1)..(2440): Ortholog of  Ceres SEQ ID NO 15168378 as cited in SEQ ID NO 59129
  misc_feature (1)..(2440): Ortholog of  Ceres SEQ ID NO 13654989 as cited in SEQ ID NO 63117
  misc_feature (1)..(2440): Ortholog of  Ceres SEQ ID NO 13655640 as cited in SEQ ID NO 63844
  misc_feature (1)..(2440): Ortholog of  Ceres SEQ ID NO 13657138 as cited in SEQ ID NO 65923
  misc_feature (1)..(2440): Ortholog of  Ceres SEQ ID NO 14303173 as cited in SEQ ID NO 66550
  misc_feature (1)..(2440): Ortholog of  Ceres SEQ ID NO 13584744 as cited in SEQ ID NO 69137
  misc_feature (1)..(2440): Ortholog of  Ceres SEQ ID NO 15179672 as cited in SEQ ID NO 0
gcacgagaccattacctagaacatcctaatcgaaaaagctactctgtagattgacagagagacaagagcgctcttgctaccaatctcctcctcgtcgccgccgcggccgctctcgctcccacgatccggcgctgccacgagcttccagatccgccgcccgggcaatgctgtagctgcccgcgccgagatgggcggcgtcggcgccggctctctcgccctgctgcggctgctcctcctcctgctcctccgctccgaggcctccgctctccacggttgttctagttatatctgcaccgagccactgactgcaacaccaattggttccccttgtggctgtgtcgagcctattagtgttatcgttgatctggacttagctccttatctactgttcatgagcatagctgagttagaagttgaggttgcagctgggacatttcttaaacaaagccaggtgaagatcatggctgcagttgcaagtatccaggatgaccagaagacacgggtgaccatttatttggtgccgctaagagaacagttcgatacttatacggcatccctaatatctgataggttcatggagaaaaaggttcagataaattcatctatatttggagattataaagttatcaatatcagctatcatggattgcaatccccgccatcatctctgcctggaggatcggatccttcaggaactgaagaatatcctataactgcagaggtgcctgatcagaagaaaaagcacaataaatcagatattttggtcatcgtggtagtgttagggtcttctcttggacttctgatgacatgtgctgttgtgctgatcttactagtaagatggaagaaacttggacggcttcatgaggctatgacccctgcaactatcccagcagttaatagaagatatggcaccaggccaactttgtcaaccagcatggtgagctctgcgtcagcatcagtgttttcaacagtggctacttgcacaacatctgtaaagacattttcactagcccaacttcagaaggccacagatggttttgattcaagaagagttttgggtcaagggggctttgggcgtgtctaccatgggacgatagaggatggaaacgaaattgctgttaaattgcttacaagggaggacaggagtggtgaccgtgagtttattgcagaagtggaaatgctcagtcgattgcaccaccggaatcttgtcaaattgattggtatttgcattgagcggagtaaaaggtgtcttgtgtatgagctcatacgaaacggaagtgtggaatcccatcttcatggcgctgacaaggctaagggtaagctgaactgggatgttaggatgaaaattgctcttggcgctgctcgaggcttagcatatctgcatgaagattcaaaccctcatgtcatacaccgtgacttcaaggccagtaatatattattagaggaagatttcactcctaaagtgaccgattttggtttagcaagggaagcatccaatgcgactcaacctatatctaccagggtaatgggtactttcggttatgttgctccagaatatgcaatgacgggccatcttcttgttaaaagcgatgtttacagttatggggttgtcttgctggaacttatatcaggaaggaagcctgtaaacatctctgagtccaaggatcctgagaaccttgtaacttgggcccgtcctctgctaagccataaggagggcctggagaagttaattgatccgtctctggatggaaattttaacttcgacaatgtagcgaaggtggcatccatcgcttccatgtgtgtgcacacagatccatcgcagaggccgtttatgggtgaagttgtccaggcactgaagctgatctacaatgatccagatgaggcttgcgacgattcctacagtccaaggaattcatctgatcaagacggtgactacgaaggagacctggtctttgagagtggaagctggggctttggggcctctgggtgtctagactaccggaattccttaccgtttgtcactatggactacagttctggccgaatagaagggccgcacgaccctcgcgcggcattgtcagcgggatcccatgcccagtcaccagtgctgctgaatagatcaggccccttgcggatgaagaagaagctggcctccttctaccgctctagaggcagcattagtgagcatgggcacctgccgcgccattgatcagtcagtgaactagtgttaggctgttagcttcggttgactctgggattgaggctggcgggggttgtcactacctgattcgtgcctcatgttagtgtacagttcgtggtgacccttcacccttgggtatgggtgttttttttctctctttgccttctgcttcttccccggaagcaatgaggatggggttggcaggtgctctctaattttcgcaaattgcggttcatttct

SEQ ID NO: 19032 - protein, 673 aa, Zea mays subsp. mays
  peptide (1)..(673): Ceres Seq. ID no. 12436118
MGGVGAGSLALLRLLLLLLLRSEASALHGCSSYICTEPLTATPIGSPCGCVEPISVIVDLDLAPYLLFMSIAELEVEVAAGTFLKQSQVKIMAAVASIQDDQKTRVTIYLVPLREQFDTYTASLISDRFMEKKVQINSSIFGDYKVINISYHGLQSPPSSLPGGSDPSGTEEYPITAEVPDQKKKHNKSDILVIVVVLGSSLGLLMTCAVVLILLVRWKKLGRLHEAMTPATIPAVNRRYGTRPTLSTSMVSSASASVFSTVATCTTSVKTFSLAQLQKATDGFDSRRVLGQGGFGRVYHGTIEDGNEIAVKLLTREDRSGDREFIAEVEMLSRLHHRNLVKLIGICIERSKRCLVYELIRNGSVESHLHGADKAKGKLNWDVRMKIALGAARGLAYLHEDSNPHVIHRDFKASNILLEEDFTPKVTDFGLAREASNATQPISTRVMGTFGYVAPEYAMTGHLLVKSDVYSYGVVLLELISGRKPVNISESKDPENLVTWARPLLSHKEGLEKLIDPSLDGNFNFDNVAKVASIASMCVHTDPSQRPFMGEVVQALKLIYNDPDEACDDSYSPRNSSDQDGDYEGDLVFESGSWGFGASGCLDYRNSLPFVTMDYSSGRIEGPHDPRAALSAGSHAQSPVLLNRSGPLRMKKKLASFYRSRGSISEHGHLPRH

SEQ ID NO: 19033 - protein, 605 aa, Zea mays subsp. mays
  peptide (1)..(605): Ceres Seq. ID no. 12436119
MSIAELEVEVAAGTFLKQSQVKIMAAVASIQDDQKTRVTIYLVPLREQFDTYTASLISDRFMEKKVQINSSIFGDYKVINISYHGLQSPPSSLPGGSDPSGTEEYPITAEVPDQKKKHNKSDILVIVVVLGSSLGLLMTCAVVLILLVRWKKLGRLHEAMTPATIPAVNRRYGTRPTLSTSMVSSASASVFSTVATCTTSVKTFSLAQLQKATDGFDSRRVLGQGGFGRVYHGTIEDGNEIAVKLLTREDRSGDREFIAEVEMLSRLHHRNLVKLIGICIERSKRCLVYELIRNGSVESHLHGADKAKGKLNWDVRMKIALGAARGLAYLHEDSNPHVIHRDFKASNILLEEDFTPKVTDFGLAREASNATQPISTRVMGTFGYVAPEYAMTGHLLVKSDVYSYGVVLLELISGRKPVNISESKDPENLVTWARPLLSHKEGLEKLIDPSLDGNFNFDNVAKVASIASMCVHTDPSQRPFMGEVVQALKLIYNDPDEACDDSYSPRNSSDQDGDYEGDLVFESGSWGFGASGCLDYRNSLPFVTMDYSSGRIEGPHDPRAALSAGSHAQSPVLLNRSGPLRMKKKLASFYRSRGSISEHGHLPRH

SEQ ID NO: 19034 - protein, 582 aa, Zea mays subsp. mays
  peptide (1)..(582): Ceres Seq. ID no. 12436120
MAAVASIQDDQKTRVTIYLVPLREQFDTYTASLISDRFMEKKVQINSSIFGDYKVINISYHGLQSPPSSLPGGSDPSGTEEYPITAEVPDQKKKHNKSDILVIVVVLGSSLGLLMTCAVVLILLVRWKKLGRLHEAMTPATIPAVNRRYGTRPTLSTSMVSSASASVFSTVATCTTSVKTFSLAQLQKATDGFDSRRVLGQGGFGRVYHGTIEDGNEIAVKLLTREDRSGDREFIAEVEMLSRLHHRNLVKLIGICIERSKRCLVYELIRNGSVESHLHGADKAKGKLNWDVRMKIALGAARGLAYLHEDSNPHVIHRDFKASNILLEEDFTPKVTDFGLAREASNATQPISTRVMGTFGYVAPEYAMTGHLLVKSDVYSYGVVLLELISGRKPVNISESKDPENLVTWARPLLSHKEGLEKLIDPSLDGNFNFDNVAKVASIASMCVHTDPSQRPFMGEVVQALKLIYNDPDEACDDSYSPRNSSDQDGDYEGDLVFESGSWGFGASGCLDYRNSLPFVTMDYSSGRIEGPHDPRAALSAGSHAQSPVLLNRSGPLRMKKKLASFYRSRGSISEHGHLPRH

SEQ ID NO: 19035 - DNA, 1796 bp, Zea mays subsp. mays
  misc_feature (1)..(1796): Ceres Seq. ID no. 13586203
  misc_feature (1)..(1796): Ortholog of  Ceres SEQ ID NO 15176532 as cited in SEQ ID NO 58184
  misc_feature (1)..(1796): Ortholog of  Ceres SEQ ID NO 14303627 as cited in SEQ ID NO 62070
  misc_feature (1)..(1796): Ortholog of  Ceres SEQ ID NO 13597546 as cited in SEQ ID NO 65017
  misc_feature (1)..(1796): Ortholog of  Ceres SEQ ID NO 14308015 as cited in SEQ ID NO 65798
  misc_feature (1)..(1796): Ortholog of  Ceres SEQ ID NO 14307912 as cited in SEQ ID NO 66380
  misc_feature (1)..(1796): Ortholog of  Ceres SEQ ID NO 15176077 as cited in SEQ ID NO 66728
  misc_feature (1)..(1796): Ortholog of  Ceres SEQ ID NO 14307908 as cited in SEQ ID NO 67189
  misc_feature (1)..(1796): Ortholog of  Ceres SEQ ID NO 13654353 as cited in SEQ ID NO 68318
ggctggcggttgctctcctcctctcccctgccctcgcaaacgcacgcaccacagcatcgtccttcgttccattcccatccataccccctcgatcggccgggatgctgggtgtggggatggccgcggcggtgctgctcggggccgtggcgttgctgctcgcggacgccgctgcgaggagagcgcactggtggtacagggaggcggctgaggcggtgctggtcggcgccgtggctttggtggtggtggacgccgcggcgcggagggcgcacgggtggtacagggaagcggcgctgggcgcggcgcggcgggcgcggctgccgccgggggagatggggtggcccttggtcggcggcatgtgggccttcctccgcgccttcaagtccggcaagcccgacgccttcatcgcctccttcgtccggcggttcggtcgcacgggcgtgtaccgaagcttcatgttcagcagcccgactgtgctggtgacgacggcggaggggtgcaagcaggtgctgatggacgacgacgcgttcgtgacggggtggcccaaggcgacggttgcgctggtcgggccgcggtcgttcgtggcgatgccgtacgacgagcaccggcgcatccgcaagctgactgccgcgcccatcaacggcttcgacgcgctgacggggtacctgcccttcatcgaccgcaccgtcacgtcgtcgctgcgcgcgtgggcggaccacggcggcagcgtcgagttcctgacggagctgcggcgcatgacgttcaagatcatcgtgcagatcttcctgggcggcgcggaccaggccaccacgcgcgcgctggagcgcagctacacggagctcaactacggcatgcgcgccatggccatcaacctgcccggcttcgcgtaccgcggggcgctgcgcgcgcgccgccgcctcgtggccgtgctgcagggcgtgctggacgagcgccgcgccgccagggccaagggggtctcgggcggaggagtggacatgatggaccggctgatcgaggcccaggacgagcgcgggcggcacctggacgacgacgagatcatcgacgtgctcgtcatgtacctcaacgccggccacgagtcgtccggccacatcaccatgtgggccaccgtgttcctgcaggagaacccggacatgttcgcgagagcaaaggcggagcaggaggcgatcatgaggagcatcccgtcgtcgcagcgggggctgacgctcagggacttcaggaagatggagtacctgtcgcaggtgatcgacgagacgctgcggctcgtcaacatctccttcgtctccttccgtcaggccaccagagacgtcttcgtgaacggatacctcatccccaaggggtggaaggttcagctctggtaccggagcgtgcacatggacccacaggtgtaccctgaccccaccaagttcgacccgtcgagatgggagggccactcgccgagagccggcacgttcctggcgttcgggctgggcgccaggctctgccccggcaacgacctcgccaagctggagatttccgtcttcctccaccacttcctcctcggctacaagctggcgaggacgaaccctaggtgccgggtgaggtacctcccgcacccgaggccggtggacaactgcttggccaagatcaccagagtcggtagctagctgctagattgtgatggaagtacgaatgaaaaaaaagcccagcagaaactctagcggctgggccggctggaaattatgggccgggccattgtggttgccccccctgtctgtgcaaaaataaaacaagcagaaagg

SEQ ID NO: 19036 - protein, 552 aa, Zea mays subsp. mays
  peptide (1)..(552): Ceres Seq. ID no. 13586204
LAVALLLSPALANARTTASSFVPFPSIPPRSAGMLGVGMAAAVLLGAVALLLADAAARRAHWWYREAAEAVLVGAVALVVVDAAARRAHGWYREAALGAARRARLPPGEMGWPLVGGMWAFLRAFKSGKPDAFIASFVRRFGRTGVYRSFMFSSPTVLVTTAEGCKQVLMDDDAFVTGWPKATVALVGPRSFVAMPYDEHRRIRKLTAAPINGFDALTGYLPFIDRTVTSSLRAWADHGGSVEFLTELRRMTFKIIVQIFLGGADQATTRALERSYTELNYGMRAMAINLPGFAYRGALRARRRLVAVLQGVLDERRAARAKGVSGGGVDMMDRLIEAQDERGRHLDDDEIIDVLVMYLNAGHESSGHITMWATVFLQENPDMFARAKAEQEAIMRSIPSSQRGLTLRDFRKMEYLSQVIDETLRLVNISFVSFRQATRDVFVNGYLIPKGWKVQLWYRSVHMDPQVYPDPTKFDPSRWEGHSPRAGTFLAFGLGARLCPGNDLAKLEISVFLHHFLLGYKLARTNPRCRVRYLPHPRPVDNCLAKITRVGS

SEQ ID NO: 19037 - protein, 519 aa, Zea mays subsp. mays
  peptide (1)..(519): Ceres Seq. ID no. 13586205
MLGVGMAAAVLLGAVALLLADAAARRAHWWYREAAEAVLVGAVALVVVDAAARRAHGWYREAALGAARRARLPPGEMGWPLVGGMWAFLRAFKSGKPDAFIASFVRRFGRTGVYRSFMFSSPTVLVTTAEGCKQVLMDDDAFVTGWPKATVALVGPRSFVAMPYDEHRRIRKLTAAPINGFDALTGYLPFIDRTVTSSLRAWADHGGSVEFLTELRRMTFKIIVQIFLGGADQATTRALERSYTELNYGMRAMAINLPGFAYRGALRARRRLVAVLQGVLDERRAARAKGVSGGGVDMMDRLIEAQDERGRHLDDDEIIDVLVMYLNAGHESSGHITMWATVFLQENPDMFARAKAEQEAIMRSIPSSQRGLTLRDFRKMEYLSQVIDETLRLVNISFVSFRQATRDVFVNGYLIPKGWKVQLWYRSVHMDPQVYPDPTKFDPSRWEGHSPRAGTFLAFGLGARLCPGNDLAKLEISVFLHHFLLGYKLARTNPRCRVRYLPHPRPVDNCLAKITRVGS

SEQ ID NO: 19038 - protein, 514 aa, Zea mays subsp. mays
  peptide (1)..(514): Ceres Seq. ID no. 13586206
MAAAVLLGAVALLLADAAARRAHWWYREAAEAVLVGAVALVVVDAAARRAHGWYREAALGAARRARLPPGEMGWPLVGGMWAFLRAFKSGKPDAFIASFVRRFGRTGVYRSFMFSSPTVLVTTAEGCKQVLMDDDAFVTGWPKATVALVGPRSFVAMPYDEHRRIRKLTAAPINGFDALTGYLPFIDRTVTSSLRAWADHGGSVEFLTELRRMTFKIIVQIFLGGADQATTRALERSYTELNYGMRAMAINLPGFAYRGALRARRRLVAVLQGVLDERRAARAKGVSGGGVDMMDRLIEAQDERGRHLDDDEIIDVLVMYLNAGHESSGHITMWATVFLQENPDMFARAKAEQEAIMRSIPSSQRGLTLRDFRKMEYLSQVIDETLRLVNISFVSFRQATRDVFVNGYLIPKGWKVQLWYRSVHMDPQVYPDPTKFDPSRWEGHSPRAGTFLAFGLGARLCPGNDLAKLEISVFLHHFLLGYKLARTNPRCRVRYLPHPRPVDNCLAKITRVGS

SEQ ID NO: 19039 - DNA, 1980 bp, Zea mays subsp. mays; identical to SEQ ID NO: 7985
  misc_feature (1)..(1980): Ceres Seq. ID no. 13567373
  misc_feature (1)..(1980): Ortholog of  Ceres SEQ ID NO 14315241 as cited in SEQ ID NO 52516
  misc_feature (1)..(1980): Ortholog of  Ceres SEQ ID NO 15176457 as cited in SEQ ID NO 55547
  misc_feature (1)..(1980): Ortholog of  Ceres SEQ ID NO 13594349 as cited in SEQ ID NO 58161
  misc_feature (1)..(1980): Ortholog of  Ceres SEQ ID NO 13663419 as cited in SEQ ID NO 66561
  misc_feature (1)..(1980): Ortholog of  Ceres SEQ ID NO 15177892 as cited in SEQ ID NO 0

SEQ ID NO: 19040 - protein, 474 aa, Zea mays subsp. mays; identical to SEQ ID NO: 7986
  peptide (1)..(474): Ceres Seq. ID no. 13567374

SEQ ID NO: 19041 - protein, 257 aa, Zea mays subsp. mays; identical to SEQ ID NO: 7987
  peptide (1)..(257): Ceres Seq. ID no. 13567375

SEQ ID NO: 19042 - protein, 238 aa, Zea mays subsp. mays; identical to SEQ ID NO: 7988
  peptide (1)..(238): Ceres Seq. ID no. 13567376

SEQ ID NO: 19043 - DNA, 1853 bp, Zea mays subsp. mays
  misc_feature (1)..(1853): Ceres Seq. ID no. 12419992
  misc_feature (1)..(1853): Ortholog of  Ceres SEQ ID NO 15176862 as cited in SEQ ID NO 67415
atcgacgaacatttccacgaaaatctcgctgctctcgcgaaaaaaggacgccacccgcccttgcttgctctccagtttgcaccctggaggcaggtgcaggggcgctcctcgccagcgggcagtcaaccgcccgcgtcggccatggcggaggcggggaggcggacgcttgcgctggtgaacctggcggccatcatggagcgcgccgacgaggcgctgcngcccgcggtgtaccgggaggtgggcgcagcgctgggcgccacgcccgtggcactcggcgcgctcacgctctaccgctcagccgtgcaggccgcctgctacccgctggccgcctacgccgccgtgcgctacaaccgcgcccacgtagtcgccgttggggccgttctctgggccgccgccaccttcctcgtcgccgtctcagacacctttgcccagcaggtagcgatagctagatgtttgaatggtattggcctagcacttgtcaccccggcgatccaatctctggtggcagattgctctgatgacaacactcgaggcgccgcatttggatggcttcaacttacgggaaacattggttcaattattggtggtttgttttccctgatgcttgcacccaccacagtcatgggtattgccggctggcgtgttgcatttcacattgttgctgttataagcgttgtagtcggtgtgttggttggcctatttgcagtggaccctcatttcctccatgttgaaagtggcgagcagctgttacgcaagtctgcatgggcagagatgaaggatttggtgagagaagccaaggctgttgtgaagatctcatcgtttcagatcattgtggctcagggtgtcacaggctcgtttccatggtctgccctggcctttgccccaatgtggctggagttgatggggtttacgcacaacagaactgggctcctgatggtaacatttgcattggcaagctcacttggagggctgttaggtggaaagatgggggatcactttgctactcgcttcccgaattccggccgaatagtcctgtcgcagataagctcagcttctgctattccgttggctgctctgttgcttttggggctccctgataactcttctggttccttgcatggacttgtcatgtttatcatgggtctgagcatctcctggaatggtcctgcaactaacaacccgatatttgctgagattgtacctgagaggtcaaggacaagcatctatgcattggaccgttctttagagtcagttctagcttcattcgctccaccagttgttgggtttctagccgagcatgtctatgggtacaatcccgtcccctacggagctgcagataacaatgttggcagggataaatcaaatgctggcgccctagccaaagctctgtacacgtcgatcgccatccctatgctgctgtgctgcttcatctactccctgttgtaccggacgtacccacgagacagggagagggcaaggatggactctctgatcactccagagctccagcagattgaactggaaagatgtcatgggcaagcggattattattctggaaggaaggacaaggacggctctactgtcttcgatatggattacagaggaatcgacgcctatgatgacgagaagggattaatcgatcagcaggctaagcagagcggcaatgtcaagtggcacaggagtcattcacagaatttgtgacgtttttgccaaagtatcagtgctctcggatctgtacagaaaacgtgagtgagagtgagttacctctcgaaggacgattacatagggttgtttagatagactcagaagcatcagaacaattcggttatgttcagcattatatatatatatat

SEQ ID NO: 19044 - protein, 566 aa, Zea mays subsp. mays
  peptide (1)..(566): Ceres Seq. ID no. 12419993
  misc_feature (73)..(73): Xaa is any aa, unknown or other
IDEHFHENLAALAKKGRHPPLLALQFAPWRQVQGRSSPAGSQPPASAMAEAGRRTLALVNLAAIMERADEALXPAVYREVGAALGATPVALGALTLYRSAVQAACYPLAAYAAVRYNRAHVVAVGAVLWAAATFLVAVSDTFAQQVAIARCLNGIGLALVTPAIQSLVADCSDDNTRGAAFGWLQLTGNIGSIIGGLFSLMLAPTTVMGIAGWRVAFHIVAVISVVVGVLVGLFAVDPHFLHVESGEQLLRKSAWAEMKDLVREAKAVVKISSFQIIVAQGVTGSFPWSALAFAPMWLELMGFTHNRTGLLMVTFALASSLGGLLGGKMGDHFATRFPNSGRIVLSQISSASAIPLAALLLLGLPDNSSGSLHGLVMFIMGLSISWNGPATNNPIFAEIVPERSRTSIYALDRSLESVLASFAPPVVGFLAEHVYGYNPVPYGAADNNVGRDKSNAGALAKALYTSIAIPMLLCCFIYSLLYRTYPRDRERARMDSLITPELQQIELERCHGQADYYSGRKDKDGSTVFDMDYRGIDAYDDEKGLIDQQAKQSGNVKWHRSHSQNL

SEQ ID NO: 19045 - protein, 519 aa, Zea mays subsp. mays
  peptide (1)..(519): Ceres Seq. ID no. 12419994
  misc_feature (26)..(26): Xaa is any aa, unknown or other
MAEAGRRTLALVNLAAIMERADEALXPAVYREVGAALGATPVALGALTLYRSAVQAACYPLAAYAAVRYNRAHVVAVGAVLWAAATFLVAVSDTFAQQVAIARCLNGIGLALVTPAIQSLVADCSDDNTRGAAFGWLQLTGNIGSIIGGLFSLMLAPTTVMGIAGWRVAFHIVAVISVVVGVLVGLFAVDPHFLHVESGEQLLRKSAWAEMKDLVREAKAVVKISSFQIIVAQGVTGSFPWSALAFAPMWLELMGFTHNRTGLLMVTFALASSLGGLLGGKMGDHFATRFPNSGRIVLSQISSASAIPLAALLLLGLPDNSSGSLHGLVMFIMGLSISWNGPATNNPIFAEIVPERSRTSIYALDRSLESVLASFAPPVVGFLAEHVYGYNPVPYGAADNNVGRDKSNAGALAKALYTSIAIPMLLCCFIYSLLYRTYPRDRERARMDSLITPELQQIELERCHGQADYYSGRKDKDGSTVFDMDYRGIDAYDDEKGLIDQQAKQSGNVKWHRSHSQNL

SEQ ID NO: 19046 - protein, 502 aa, Zea mays subsp. mays
  peptide (1)..(502): Ceres Seq. ID no. 12419995
  misc_feature (9)..(9): Xaa is any aa, unknown or other
MERADEALXPAVYREVGAALGATPVALGALTLYRSAVQAACYPLAAYAAVRYNRAHVVAVGAVLWAAATFLVAVSDTFAQQVAIARCLNGIGLALVTPAIQSLVADCSDDNTRGAAFGWLQLTGNIGSIIGGLFSLMLAPTTVMGIAGWRVAFHIVAVISVVVGVLVGLFAVDPHFLHVESGEQLLRKSAWAEMKDLVREAKAVVKISSFQIIVAQGVTGSFPWSALAFAPMWLELMGFTHNRTGLLMVTFALASSLGGLLGGKMGDHFATRFPNSGRIVLSQISSASAIPLAALLLLGLPDNSSGSLHGLVMFIMGLSISWNGPATNNPIFAEIVPERSRTSIYALDRSLESVLASFAPPVVGFLAEHVYGYNPVPYGAADNNVGRDKSNAGALAKALYTSIAIPMLLCCFIYSLLYRTYPRDRERARMDSLITPELQQIELERCHGQADYYSGRKDKDGSTVFDMDYRGIDAYDDEKGLIDQQAKQSGNVKWHRSHSQNL

SEQ ID NO: 19047 - DNA, 454 bp, Zea mays subsp. mays
  misc_feature (1)..(454): Ceres Seq. ID no. 1851894
  misc_feature (1)..(454): Ortholog of  Ceres SEQ ID NO 13594189 as cited in SEQ ID NO 58890
cgtttccagctccgatccaacccagcatctgtaccgcgccgscgagcacgtccggcgccggtgcggcaggcgaaatccgagagcgaggggatccggtacaagaagaatgaagtcttcttggatgtagtggagagtgttaacattctagttaacagcaatggccagattgtgagatcagatgtggttggggcactgaagatgcgaacatatttgagtggaatgccggagtgcaaacttggcttgaatgatagggttcttttggaggctcaaggcagagcaactaaaggcaaagcgatagacctcgatgatatcaaatttcatcagtgtgtacgtttggctagatttgagaatgatagaactatatcgttcatacctcctgatggatcttttgatctaatgacatacaggcttagcactcaggtaaaacctcttatctgggtcgaagcacagattg

SEQ ID NO: 19048 - protein, 151 aa, Zea mays subsp. mays
  peptide (1)..(151): Ceres Seq. ID no. 1851895
  misc_feature (14)..(14): Xaa is any aa, unknown or other
RFQLRSNPASVPRXRARPAPVRQAKSESEGIRYKKNEVFLDVVESVNILVNSNGQIVRSDVVGALKMRTYLSGMPECKLGLNDRVLLEAQGRATKGKAIDLDDIKFHQCVRLARFENDRTISFIPPDGSFDLMTYRLSTQVKPLIWVEAQI

SEQ ID NO: 19049 - protein, 85 aa, Zea mays subsp. mays
  peptide (1)..(85): Ceres Seq. ID no. 1851896
MRTYLSGMPECKLGLNDRVLLEAQGRATKGKAIDLDDIKFHQCVRLARFENDRTISFIPPDGSFDLMTYRLSTQVKPLIWVEAQI

SEQ ID NO: 19050 - protein, 78 aa, Zea mays subsp. mays
  peptide (1)..(78): Ceres Seq. ID no. 1851897
MPECKLGLNDRVLLEAQGRATKGKAIDLDDIKFHQCVRLARFENDRTISFIPPDGSFDLMTYRLSTQVKPLIWVEAQI

SEQ ID NO: 19051 - DNA, 1707 bp, Zea mays subsp. mays
  misc_feature (1)..(1707): Ceres Seq. ID no. 12363479
  misc_feature (1)..(1707): Ortholog of  Ceres SEQ ID NO 15226529 as cited in SEQ ID NO 55005
  misc_feature (1)..(1707): Ortholog of  Ceres SEQ ID NO 12616225 as cited in SEQ ID NO 68930
gcacgagaccattacctagaacatcctaatcgaaaacacaagaggctcaggctgagctcatctgcggcagtagccaaggagtggagtgaggtagctcgctctgtgagcagaaaacaatggagacgatggcggcggctcccgcgccgcagcaaaggacggggggcatcgcgcggaggctggccaggctgctccgccgcaagagctccccggcaggtgcggggatggcgtactccgtcgccggggacgagttcgacgactcgcttgacagctcaatcaactcgctcagcaagctcaagctgtccggcaacctggctgctgcctacacgctggacgccatcttcaagaatgccacggagaagaaggcagcggcggcggcgccgcagacgcagaagcagccgtcgccggcgaaggacgccgcgaagcacgcgttcttggcgaccctattcgcgagggcgtccgcggtgaaggcggcctacgcgcagctgcagctctcgctgcatccctacgacgccgagtccatccaggccgccggacgccggcctggtggcagagcttaccaagctgacgagcctcaagcggcggtacacaagggacccggccgccgcggccaggggcgccggtgccctcgcggcgcacgccgacgagcagctccacctcctgcggacctacgagatcacggcgcgcaagctggaggcggagctccgtgcgcgggacgccgaggccgagcgcgcacgcgccgcgctggccgacgagctccgcgccgtgcggggcctggaggagcgcgaccacccgggccgccgcaccctggacggcctccacctctccggcctcaacgccacccacttcctcaccgcgctgcaacacgccgtgaagtccgtccgcgccttcgccagggcaatggtcgacgcgatgcggccggccggttgggatcccgcggcggcggcggcggcggccgtgcacccgggcgccaggctgtgggaccccgcaggcgacgccaggttcgcgctcgagtcctacgtggcgctgaggatgttcgcgggcttccaccgcaaggacttgggcctgagctccctgcacgggcggggctcccacgaccggcgccgcttcttccaggagttcgcggaggcgagggccgcggctgcggcggatcagctccaggacgcgagcgacgcgcggtgggatgcgctccgggagttcctgcgggacaggtacgtgtccgtggtgcacgagagcatggaggcggccttcttcgggcgcggcggggacgcgctgccgcgcgccgcgtggctccgcgagttcgcggagatggcgcgccgcgtgtggctgctgcactgcctgttctgggcgttcgacggcgccgcgtccgtcttccaggcgcgccctggggagcggttctcggaggtgttcatggtgagcgtccgcgacgcggacgccggcaggagcgggcacgtctccgtcgggttcaccgtggtgccggggttcaagctcggcgcgacggtgatacaatgccgggtatacctttcacacccggagcgccgtccctgaggaccgtcacacttgggcggccttgtcgcacaccggcacacgagggaggcggtggggtttaagggtggcaggcaggcagcaatgacccctgtgcaatttgttatgtttatgtatgtatggatggatccaagtatatgtatctagtatgagcattccatttcc

SEQ ID NO: 19052 - protein, 496 aa, Zea mays subsp. mays
  peptide (1)..(496): Ceres Seq. ID no. 12363480
METMAAAPAPQQRTGGIARRLARLLRRKSSPAGAGMAYSVAGDEFDDSLDSSINSLSKLKLSGNLAAAYTLDAIFKNATEKKAAAAAPQTQKQPSPAKDAAKHAFLATLFARASAVKAAYAQLQLSLHPYDAESIQAAGRRPGGRAYQADEPQAAVHKGPGRRGQGRRCPRGARRRAAPPPADLRDHGAQAGGGAPCAGRRGRARTRRAGRRAPRRAGPGGARPPGPPHPGRPPPLRPQRHPLPHRAATRREVRPRLRQGNGRRDAAGRLGSRGGGGGGRAPGRQAVGPRRRRQVRARVLRGAEDVRGLPPQGLGPELPARAGLPRPAPLLPGVRGGEGRGCGGSAPGRERRAVGCAPGVPAGQVRVRGAREHGGGLLRARRGRAAARRVAPRVRGDGAPRVAAALPVLGVRRRRVRLPGAPWGAVLGGVHGERPRRGRRQERARLRRVHRGAGVQARRDGDTMPGIPFTPGAPSLRTVTLGRPCRTPAHEGGGGV

SEQ ID NO: 19053 - protein, 493 aa, Zea mays subsp. mays
  peptide (1)..(493): Ceres Seq. ID no. 12363481
MAAAPAPQQRTGGIARRLARLLRRKSSPAGAGMAYSVAGDEFDDSLDSSINSLSKLKLSGNLAAAYTLDAIFKNATEKKAAAAAPQTQKQPSPAKDAAKHAFLATLFARASAVKAAYAQLQLSLHPYDAESIQAAGRRPGGRAYQADEPQAAVHKGPGRRGQGRRCPRGARRRAAPPPADLRDHGAQAGGGAPCAGRRGRARTRRAGRRAPRRAGPGGARPPGPPHPGRPPPLRPQRHPLPHRAATRREVRPRLRQGNGRRDAAGRLGSRGGGGGGRAPGRQAVGPRRRRQVRARVLRGAEDVRGLPPQGLGPELPARAGLPRPAPLLPGVRGGEGRGCGGSAPGRERRAVGCAPGVPAGQVRVRGAREHGGGLLRARRGRAAARRVAPRVRGDGAPRVAAALPVLGVRRRRVRLPGAPWGAVLGGVHGERPRRGRRQERARLRRVHRGAGVQARRDGDTMPGIPFTPGAPSLRTVTLGRPCRTPAHEGGGGV

SEQ ID NO: 19054 - protein, 461 aa, Zea mays subsp. mays
  peptide (1)..(461): Ceres Seq. ID no. 12363482
MAYSVAGDEFDDSLDSSINSLSKLKLSGNLAAAYTLDAIFKNATEKKAAAAAPQTQKQPSPAKDAAKHAFLATLFARASAVKAAYAQLQLSLHPYDAESIQAAGRRPGGRAYQADEPQAAVHKGPGRRGQGRRCPRGARRRAAPPPADLRDHGAQAGGGAPCAGRRGRARTRRAGRRAPRRAGPGGARPPGPPHPGRPPPLRPQRHPLPHRAATRREVRPRLRQGNGRRDAAGRLGSRGGGGGGRAPGRQAVGPRRRRQVRARVLRGAEDVRGLPPQGLGPELPARAGLPRPAPLLPGVRGGEGRGCGGSAPGRERRAVGCAPGVPAGQVRVRGAREHGGGLLRARRGRAAARRVAPRVRGDGAPRVAAALPVLGVRRRRVRLPGAPWGAVLGGVHGERPRRGRRQERARLRRVHRGAGVQARRDGDTMPGIPFTPGAPSLRTVTLGRPCRTPAHEGGGGV

SEQ ID NO: 19055 - DNA, 1424 bp, Zea mays subsp. mays
  misc_feature (1)..(1424): Ceres Seq. ID no. 12359128
  misc_feature (1)..(1424): Ortholog of  Ceres SEQ ID NO 15169013 as cited in SEQ ID NO 58380
ctcccgcgatcgccaccggggaaggggcaatagaataaagtgagggcagccaatgcaggccgccgtcaacaccaccactgtcggcgctcacccgcacccaacaaagtcctcgttcctccgtccgtcccctccttgccgcgtctacttccacgcttctccacgcccgaaccttagggcgatcgccatggccagcaagtcgcagctgcaggaccaactgatcatcactcgccccgacgactggcacctccatcttcgcgaaggcggtgtcctcgaggctgtagtgccacacagcgcgaggcattttgggagggccatcatcatgcccaacctgaagccgccggtgaccacaacggcacgggccgtggagtacagggaggagataatgagggcgctgccgccagggagtagcttcgagccgctcatgacactatacctcacagacaacacaagcccagaggagatcaagctcgcaagaaagagtggtataatttttgctgtgaagttgtatcctgctggagcaactaccaattcccaagatggtgtcactgatatatttgggaagtgcttgccggtcctcgaggagatggtcaggcaggaaatgccgttgcttgttcatggagaagtcacagatccacatgttgacacatttgaccgcgagaaggttttcattgacaaaatattagcaccacttgtacaaaaacttccgcagctgaaaattgtcatggaacatatcacaactatggatgcagtgaacttcatagaatcatgtgaagaaggtcatgttgctgcaacagtgactccccagcatctcctcctcaataggaatgctttatttcagggtggcttgcagccacacaattattgcttgccagtactgaaaagagagactcatagacaagctattgtgtctgctgtaacaaatgggagtagacggtacttccttggtactgacagcgctccccatgataaacggaacaaagagtgttcctgtggatgtgctggaatatatagcgctcctgttgccttgtctctttatgtgaaggtatttgaagaggctggtgcccttgataaactagaagcatttacaagcttcaatggccctgatttttatggcctcccaaggaacacttcaaagattatcttgagaaagaatgcctggaaagttcctgctacttataaacacagttcaggggagattgtgcctatgtttaatggcagcacccttgaatggcttccatctgatcagcctaaagagtaaacagtatacattattggacccagcacttgggggaatcaataggtggagttttctagttctttttcccgtttccactagaatcagcatagcgaaactattctgcttgttgaaagcaacggtggaggatctgcttgttgagttgttatatccatttgcattgcagtgc

SEQ ID NO: 19056 - protein, 401 aa, Zea mays subsp. mays
  peptide (1)..(401): Ceres Seq. ID no. 12359129
MQAAVNTTTVGAHPHPTKSSFLRPSPPCRVYFHASPRPNLRAIAMASKSQLQDQLIITRPDDWHLHLREGGVLEAVVPHSARHFGRAIIMPNLKPPVTTTARAVEYREEIMRALPPGSSFEPLMTLYLTDNTSPEEIKLARKSGIIFAVKLYPAGATTNSQDGVTDIFGKCLPVLEEMVRQEMPLLVHGEVTDPHVDTFDREKVFIDKILAPLVQKLPQLKIVMEHITTMDAVNFIESCEEGHVAATVTPQHLLLNRNALFQGGLQPHNYCLPVLKRETHRQAIVSAVTNGSRRYFLGTDSAPHDKRNKECSCGCAGIYSAPVALSLYVKVFEEAGALDKLEAFTSFNGPDFYGLPRNTSKIILRKNAWKVPATYKHSSGEIVPMFNGSTLEWLPSDQPKE

SEQ ID NO: 19057 - protein, 357 aa, Zea mays subsp. mays
  peptide (1)..(357): Ceres Seq. ID no. 12359130
MASKSQLQDQLIITRPDDWHLHLREGGVLEAVVPHSARHFGRAIIMPNLKPPVTTTARAVEYREEIMRALPPGSSFEPLMTLYLTDNTSPEEIKLARKSGIIFAVKLYPAGATTNSQDGVTDIFGKCLPVLEEMVRQEMPLLVHGEVTDPHVDTFDREKVFIDKILAPLVQKLPQLKIVMEHITTMDAVNFIESCEEGHVAATVTPQHLLLNRNALFQGGLQPHNYCLPVLKRETHRQAIVSAVTNGSRRYFLGTDSAPHDKRNKECSCGCAGIYSAPVALSLYVKVFEEAGALDKLEAFTSFNGPDFYGLPRNTSKIILRKNAWKVPATYKHSSGEIVPMFNGSTLEWLPSDQPKE

SEQ ID NO: 19058 - protein, 312 aa, Zea mays subsp. mays
  peptide (1)..(312): Ceres Seq. ID no. 12359131
MPNLKPPVTTTARAVEYREEIMRALPPGSSFEPLMTLYLTDNTSPEEIKLARKSGIIFAVKLYPAGATTNSQDGVTDIFGKCLPVLEEMVRQEMPLLVHGEVTDPHVDTFDREKVFIDKILAPLVQKLPQLKIVMEHITTMDAVNFIESCEEGHVAATVTPQHLLLNRNALFQGGLQPHNYCLPVLKRETHRQAIVSAVTNGSRRYFLGTDSAPHDKRNKECSCGCAGIYSAPVALSLYVKVFEEAGALDKLEAFTSFNGPDFYGLPRNTSKIILRKNAWKVPATYKHSSGEIVPMFNGSTLEWLPSDQPKE

SEQ ID NO: 19059 - DNA, 1364 bp, Zea mays subsp. mays
  misc_feature (1)..(1364): Ceres Seq. ID no. 12368136
  misc_feature (1)..(1364): Ortholog of  Ceres SEQ ID NO 13596762 as cited in SEQ ID NO 63019
atcctttgggaattaatagtaagtgtttgggacttgggagagggagaggcgtcatgtacctgaacccaagaatcgtaggctctggggagaggacactggttctctcccatggctatggaggcagccaggctatctgggacaaggtgctgccgcacctctcacggacgaacaaggtactactcttcgactgggacttctcgagtaccgccgccggagaggaggaggaggacgcggagcacagctgctacacgttctcgaggttcgccgaagagctggtggcgctcatggacaagatgaagctgagcggcgccgtgtacgtggggcactccatggccggcatggtcggctgcattgcgtccatcacgcgccccgacctcttcacccacctcgtcctcgtcggcgcatccccgaggtacatgaactcggaggactacgagggcgggttcgacgagcccgacatcaaggcgatgctgtcgaggatctcgtcggacttccgcggctgggccgagggcttcgtgccgctcgccatcggcggcagcgcggacgaccaaccctcggcggtggagctgctggcgcggagcttcttcgccatggacccgcgcgtggcgcacggcctggcgcgcatgatcttcctgggcgaccagcgcgagctgctgggtgacgtggccgtgccgtgcacgctggtgcacgtctccggcgacttcgcggcgcccccctgcgtcgggcgctacatgcaggcccgcatgcgcaccgcctccatgtataccatcgactcggtgggacacttcccgcagctcgtcacgcccgacgagatgctcaggatactcgaccgcattctcgtcggctccgctgcttcccaagaggaggagactaccgcggcggcggcggctgccgccaagaccgagacgacgagtagcgaggtcgtatcctctggtggtgttgccgatgcgctggagtccaagggccgtatcgacgtggcgacatagtgctcctgctgctctggtgcaacatccctctcgaagtctcgatctatcagccttggctggctcttgtgctggtctcagttgatttgcttcggtccacactccacacgtttaacttacattattgcgcttttggattttctaatgcgtagaaacattaccatggttcgttcggaatttttagccatcacgtcacccaaactgcgtgtattattggtttgatcatggattgaattaaatgaaacactgagtgttaaagcattgtaaatgacatgcatggtttgcagccttgcaggattctagcttcctagaattatttatttttttggaaaatatttcatggattgaattaaatgaaacacttgagtgttaaagcattgt

SEQ ID NO: 19060 - protein, 327 aa, Zea mays subsp. mays
  peptide (1)..(327): Ceres Seq. ID no. 12368137
PLGINSKCLGLGRGRGVMYLNPRIVGSGERTLVLSHGYGGSQAIWDKVLPHLSRTNKVLLFDWDFSSTAAGEEEEDAEHSCYTFSRFAEELVALMDKMKLSGAVYVGHSMAGMVGCIASITRPDLFTHLVLVGASPRYMNSEDYEGGFDEPDIKAMLSRISSDFRGWAEGFVPLAIGGSADDQPSAVELLARSFFAMDPRVAHGLARMIFLGDQRELLGDVAVPCTLVHVSGDFAAPPCVGRYMQARMRTASMYTIDSVGHFPQLVTPDEMLRILDRILVGSAASQEEETTAAAAAAAKTETTSSEVVSSGGVADALESKGRIDVAT

SEQ ID NO: 19061 - protein, 310 aa, Zea mays subsp. mays
  peptide (1)..(310): Ceres Seq. ID no. 12368138
MYLNPRIVGSGERTLVLSHGYGGSQAIWDKVLPHLSRTNKVLLFDWDFSSTAAGEEEEDAEHSCYTFSRFAEELVALMDKMKLSGAVYVGHSMAGMVGCIASITRPDLFTHLVLVGASPRYMNSEDYEGGFDEPDIKAMLSRISSDFRGWAEGFVPLAIGGSADDQPSAVELLARSFFAMDPRVAHGLARMIFLGDQRELLGDVAVPCTLVHVSGDFAAPPCVGRYMQARMRTASMYTIDSVGHFPQLVTPDEMLRILDRILVGSAASQEEETTAAAAAAAKTETTSSEVVSSGGVADALESKGRIDVAT

SEQ ID NO: 19062 - protein, 233 aa, Zea mays subsp. mays
  peptide (1)..(233): Ceres Seq. ID no. 12368139
MDKMKLSGAVYVGHSMAGMVGCIASITRPDLFTHLVLVGASPRYMNSEDYEGGFDEPDIKAMLSRISSDFRGWAEGFVPLAIGGSADDQPSAVELLARSFFAMDPRVAHGLARMIFLGDQRELLGDVAVPCTLVHVSGDFAAPPCVGRYMQARMRTASMYTIDSVGHFPQLVTPDEMLRILDRILVGSAASQEEETTAAAAAAAKTETTSSEVVSSGGVADALESKGRIDVAT

SEQ ID NO: 19063 - DNA, 2090 bp, Zea mays subsp. mays
  misc_feature (1)..(2090): Ceres Seq. ID no. 12387564
  misc_feature (1)..(2090): Ortholog of  Ceres SEQ ID NO 12581696 as cited in SEQ ID NO 55411
tcgcaccacaaccacctcctaccccttctcttcttcttctccccccttgcgaatcggagaccaagtgcaattgcccacccaagccccggaaccgggggccaagagcagtacagggggttggtttctgcgacggcgaggacgcgaagcggattcggatcgcgccgccatgccgctcgacgagctcgccgacaaagggccgtcgtcctccgaggaagttcagctcgcgccgtcggattccaagttccggagcctcagtccttcgccgattccgctcccaactcttccgagcatcagatcattggtccactcggtttctgacgagagtgtaaatgtagatgtcgcggcctcacatcaaagtgaaaatggatctatctctactgttagttcactagaatcagagagggcagcatatgaatttcttgctcaaactcctgtcaggtcaactgatgcacatcttcttgagttttcggaggctatgagaactgttgcaaaagccttacgacgagtggctgaagggaaggctgctgctcaagcagaggcagcggagtggaaacgtaagtatgaattagagacagcgcacaagcatcggagtaaaatcaaaggctacagcagttgtatcaataatgacttagacaaactggtcagccaactaaccctggagacacctacatctgatcaattaggatgttgcggaaagcatggtatatgtgcacatgagattctccaggacgaagttcctgggcctatcccaagatctaatcacaaggtggtggggagaaaggcatcatttaaactttcatggggatgtaatggggataaaaatggacaacataagcatgattttgtgtcctttgaaaaaggtgatataacaaccgcagaacgaagcaataagcagatcttactgaaatgggaatcgccaccacaaacagtgcttttcataaccaaaccgaattccaactctgttcgtgttctttgtgctgaaatgatcagatggcttagggagcataaaaatataaacatctttgttgagccacgtgttagcaaggaacttctaacagaggattcttactacaacttcgtccaaacatgggataatgatgaggagataaagatgctgcgcacaaaggttgatttaattataactcttggtggtgatggaactgttctgtgggctgcatcattgttcaaaggacctgttcctccggttgttgcatttgccctgggatcactgggcttcatgacgcctttcccaagcgagcaataccgtgagttgttggacaatgtgctgaatgggccatttagcatcacgctgagaaaccgcatacagtgtcatgtaatacgtgacgaggcaaaggatgaaatcgtgtctgaggagccattcttagtgttgaacgaagttacaatcgaccgaggaatatcatcctaccttaccaacctggaagtctactgtgacagctcttttgttacttgcgtacaaggggatggactaatcatatcaactacatctggaagtacagcatattcattagcagctggagggtccatggttcatcctcaggtcccagggatccttttcaccccaatctgcccgcactctctgtcattcagacctttgattctgcctgaatacgtgaccctccgcgttcaagtgccgttcaacagcaggggcaatgcctgggcatccttcgacggcaaagaccgacagcagctgtcgcccggtgacgccctgatctgcagcatttctccctggcccgtgcccacagcctgcctggtggactcgacgaccgatttcctccgcagcatccatgagggtctccactggaacttgaggaaatcccagtcatttgacggcccgcgtgattgatgcaacagctgttcagttatatttcagcccggtgccagaattcaagctgggaattctcaacaggaataactgtagctactccagggtgctctcacctttaccgttccatacttgcctatatacaaaggttgcgtgcgttagatgtgaggtatagatagatgtatagaatatggatggatgataacgactggacatgttgaataatacaacgccaacgtatgcacgc

SEQ ID NO: 19064 - protein, 620 aa, Zea mays subsp. mays
  peptide (1)..(620): Ceres Seq. ID no. 12387565
RTTTTSYPFSSSSPPLRIGDQVQLPTQAPEPGAKSSTGGWFLRRRGREADSDRAAMPLDELADKGPSSSEEVQLAPSDSKFRSLSPSPIPLPTLPSIRSLVHSVSDESVNVDVAASHQSENGSISTVSSLESERAAYEFLAQTPVRSTDAHLLEFSEAMRTVAKALRRVAEGKAAAQAEAAEWKRKYELETAHKHRSKIKGYSSCINNDLDKLVSQLTLETPTSDQLGCCGKHGICAHEILQDEVPGPIPRSNHKVVGRKASFKLSWGCNGDKNGQHKHDFVSFEKGDITTAERSNKQILLKWESPPQTVLFITKPNSNSVRVLCAEMIRWLREHKNINIFVEPRVSKELLTEDSYYNFVQTWDNDEEIKMLRTKVDLIITLGGDGTVLWAASLFKGPVPPVVAFALGSLGFMTPFPSEQYRELLDNVLNGPFSITLRNRIQCHVIRDEAKDEIVSEEPFLVLNEVTIDRGISSYLTNLEVYCDSSFVTCVQGDGLIISTTSGSTAYSLAAGGSMVHPQVPGILFTPICPHSLSFRPLILPEYVTLRVQVPFNSRGNAWASFDGKDRQQLSPGDALICSISPWPVPTACLVDSTTDFLRSIHEGLHWNLRKSQSFDGPRD

SEQ ID NO: 19065 - protein, 565 aa, Zea mays subsp. mays
  peptide (1)..(565): Ceres Seq. ID no. 12387566
MPLDELADKGPSSSEEVQLAPSDSKFRSLSPSPIPLPTLPSIRSLVHSVSDESVNVDVAASHQSENGSISTVSSLESERAAYEFLAQTPVRSTDAHLLEFSEAMRTVAKALRRVAEGKAAAQAEAAEWKRKYELETAHKHRSKIKGYSSCINNDLDKLVSQLTLETPTSDQLGCCGKHGICAHEILQDEVPGPIPRSNHKVVGRKASFKLSWGCNGDKNGQHKHDFVSFEKGDITTAERSNKQILLKWESPPQTVLFITKPNSNSVRVLCAEMIRWLREHKNINIFVEPRVSKELLTEDSYYNFVQTWDNDEEIKMLRTKVDLIITLGGDGTVLWAASLFKGPVPPVVAFALGSLGFMTPFPSEQYRELLDNVLNGPFSITLRNRIQCHVIRDEAKDEIVSEEPFLVLNEVTIDRGISSYLTNLEVYCDSSFVTCVQGDGLIISTTSGSTAYSLAAGGSMVHPQVPGILFTPICPHSLSFRPLILPEYVTLRVQVPFNSRGNAWASFDGKDRQQLSPGDALICSISPWPVPTACLVDSTTDFLRSIHEGLHWNLRKSQSFDGPRD

SEQ ID NO: 19066 - protein, 462 aa, Zea mays subsp. mays
  peptide (1)..(462): Ceres Seq. ID no. 12387567
MRTVAKALRRVAEGKAAAQAEAAEWKRKYELETAHKHRSKIKGYSSCINNDLDKLVSQLTLETPTSDQLGCCGKHGICAHEILQDEVPGPIPRSNHKVVGRKASFKLSWGCNGDKNGQHKHDFVSFEKGDITTAERSNKQILLKWESPPQTVLFITKPNSNSVRVLCAEMIRWLREHKNINIFVEPRVSKELLTEDSYYNFVQTWDNDEEIKMLRTKVDLIITLGGDGTVLWAASLFKGPVPPVVAFALGSLGFMTPFPSEQYRELLDNVLNGPFSITLRNRIQCHVIRDEAKDEIVSEEPFLVLNEVTIDRGISSYLTNLEVYCDSSFVTCVQGDGLIISTTSGSTAYSLAAGGSMVHPQVPGILFTPICPHSLSFRPLILPEYVTLRVQVPFNSRGNAWASFDGKDRQQLSPGDALICSISPWPVPTACLVDSTTDFLRSIHEGLHWNLRKSQSFDGPRD

SEQ ID NO: 19067 - DNA, 1917 bp, Zea mays subsp. mays
  misc_feature (1)..(1917): Ceres Seq. ID no. 13493155
  misc_feature (1)..(1917): Ortholog of  Ceres SEQ ID NO 15175923 as cited in SEQ ID NO 54037
  misc_feature (1)..(1917): Ortholog of  Ceres SEQ ID NO 14303366 as cited in SEQ ID NO 54418
  misc_feature (1)..(1917): Ortholog of  Ceres SEQ ID NO 13503610 as cited in SEQ ID NO 62416
  misc_feature (1)..(1917): Ortholog of  Ceres SEQ ID NO 13657610 as cited in SEQ ID NO 66165
  misc_feature (1)..(1917): Ortholog of  Ceres SEQ ID NO 13598312 as cited in SEQ ID NO 68448
  misc_feature (1)..(1917): Ortholog of  Ceres SEQ ID NO 13596100 as cited in SEQ ID NO 68573
tagaacatcctaatcaaaaacacataagaggcgacatcacatcgcgttccgccgcctcacacgctagttggagctgtagtattagccaaccagccagcctccgatctccatccatatggaggaggctgcgcccgcggcggtcatggagcgggagcgcctcacggccgagatggccttccgcggcgcggacgaagctcggcgggaaggcggcgacccggcgcccagcatcgtcatcaagatccgccgccggctcccggacttcgcccgcaacatcaagctcaagtacgtgaagctcgggatccgccacggcggcagccccacgtcgctgctgccggcgctctgcgtgccggcggtcgccgccgccgcctactcgttcgtccgcctcgacgtcatctactactccgtcgacctgctcacctgcgtcgcctggctcggcaccgcgctgctgctgctcaccgtctactacctcaagcggccccgccccgtgtacctcgtcgagttcgcgtgctacaagccggaggagcggctcaagatctccaagtcggccttcctcgagatgaccgagagcaccggctccttcaatgaggcggctctggacttccagaccaagatcaccagccgctccgcgctcggggacgagacgtacctgcccccgggcgtccaggcgcgcccgcccaggctaaacatggcggaggcgcggaaggaggccgaggcggtcatgttcgggtgcctggacgcgctgttcgagtccacggggatcgacccgcgccgcgacgtgcgcatcctcatcgtcaactgcagcctcttcaacccgacgccgtcgctggcgtccatggtcatcaaccactacaggatgagggaggacgtcaagtcgttcaacctcggcggcatggggtgcagcgccggcctcatcgccgtcgacctcgccaaggacatgctccaggcgaaccccggatcgtacgccgtggtgctcagcaccgagaacatcaccctcaactggtacttcggcaacgaccgctccatgctcctctccaactgcatcttccgcatgggcggggccgcggcgctgctgtccaacaggcgcgcggacgccgggcgcgccaagtaccggctgctccacacggtgcgcacccacaaggcgccaccgacgagtgcttcaactgcgtgtaccagcgcgaggacgaggccggcaaggcgggcgtctcgctggcgcgggagctcatggcggtggccggcgacgcgctcaagaccaacatcacgacgctggggcccctggtgctgcccctgagcgagcagctcaagttcctcaggtcgctgatgatgcgccgcgtgttccgcgtcaggggcgtgcgcccctacatcccggacttccggcgcgcgttcgagcacttctgcgtgcacgccggcgggcgcgcggtgctggaggaggtgcagcgcagcctgagcctgcgggacacggacatggagcccagcaagtgctccctccaccggttcggcaacaccagcagcagctcgctgtggtacgagctggcgtacgccgaggccaagggccgggtaaggcgcggccaccgcgtgtggcagatcggcttcggctcggggttcaagtgcaacagcgccgtgtggcgcgctctacgcgacgtgccgccgctgccgtcgtcgcccggcgccgcggcggggccgggggccaggaagggcgcgccgcagagctgctgcaatccctgggtggacgacgtggacaggtaccctcccaaggcgtacgtctgatgggccacgtcacgtggccacaacaattgcatgatcccaatcccattcggatttcctcacgacgaattaatgaagaagggcgtgtgagtgtgagggagaaagttatacttgtatgtattttttttttcagttttattttgtcgtttcgttttc

SEQ ID NO: 19068 - protein, 390 aa, Zea mays subsp. mays
  peptide (1)..(390): Ceres Seq. ID no. 13493156
MEEAAPAAVMERERLTAEMAFRGADEARREGGDPAPSIVIKIRRRLPDFARNIKLKYVKLGIRHGGSPTSLLPALCVPAVAAAAYSFVRLDVIYYSVDLLTCVAWLGTALLLLTVYYLKRPRPVYLVEFACYKPEERLKISKSAFLEMTESTGSFNEAALDFQTKITSRSALGDETYLPPGVQARPPRLNMAEARKEAEAVMFGCLDALFESTGIDPRRDVRILIVNCSLFNPTPSLASMVINHYRMREDVKSFNLGGMGCSAGLIAVDLAKDMLQANPGSYAVVLSTENITLNWYFGNDRSMLLSNCIFRMGGAAALLSNRRADAGRAKYRLLHTVRTHKAPPTSASTACTSARTRPARRASRWRGSSWRWPATRSRPTSRRWGPWCCP

SEQ ID NO: 19069 - protein, 381 aa, Zea mays subsp. mays
  peptide (1)..(381): Ceres Seq. ID no. 13493157
MERERLTAEMAFRGADEARREGGDPAPSIVIKIRRRLPDFARNIKLKYVKLGIRHGGSPTSLLPALCVPAVAAAAYSFVRLDVIYYSVDLLTCVAWLGTALLLLTVYYLKRPRPVYLVEFACYKPEERLKISKSAFLEMTESTGSFNEAALDFQTKITSRSALGDETYLPPGVQARPPRLNMAEARKEAEAVMFGCLDALFESTGIDPRRDVRILIVNCSLFNPTPSLASMVINHYRMREDVKSFNLGGMGCSAGLIAVDLAKDMLQANPGSYAVVLSTENITLNWYFGNDRSMLLSNCIFRMGGAAALLSNRRADAGRAKYRLLHTVRTHKAPPTSASTACTSARTRPARRASRWRGSSWRWPATRSRPTSRRWGPWCCP

SEQ ID NO: 19070 - protein, 372 aa, Zea mays subsp. mays
  peptide (1)..(372): Ceres Seq. ID no. 13493158
MAFRGADEARREGGDPAPSIVIKIRRRLPDFARNIKLKYVKLGIRHGGSPTSLLPALCVPAVAAAAYSFVRLDVIYYSVDLLTCVAWLGTALLLLTVYYLKRPRPVYLVEFACYKPEERLKISKSAFLEMTESTGSFNEAALDFQTKITSRSALGDETYLPPGVQARPPRLNMAEARKEAEAVMFGCLDALFESTGIDPRRDVRILIVNCSLFNPTPSLASMVINHYRMREDVKSFNLGGMGCSAGLIAVDLAKDMLQANPGSYAVVLSTENITLNWYFGNDRSMLLSNCIFRMGGAAALLSNRRADAGRAKYRLLHTVRTHKAPPTSASTACTSARTRPARRASRWRGSSWRWPATRSRPTSRRWGPWCCP

SEQ ID NO: 19071 - DNA, 1297 bp, Zea mays subsp. mays
  misc_feature (1)..(1297): Ceres Seq. ID no. 12418944
  misc_feature (1)..(1297): Ortholog of  Ceres SEQ ID NO 12609394 as cited in SEQ ID NO 52095
gcacgagaccattacctagaacatcctaatcgacttttcccaccaacacctccaaacctcctctctatttccaatttccacgccgccgccaacatgaccacctcagccgccgcctccgccaccgccgcgttgtccaccccatcctccgtcaatccccatcgatcgtcttctgcgctcaggctcccagcgtccctccgccgatcccatcccaacagattcttatcgtcgtcaccctcgcgctctccactcgtgccggtctccgccatggcctctcccgccgccgccggtgagacgtcctccaggaagaaactcatcatattcgatgcggaggacgacctcgcggcgtcactggccaagtacacgtctgagctgtcggcgaagttcgcggctgagaggggcgccttcaccgtcgtgctctccggcggctccctcgtcaaggccctcaggaaactagcggagccgccgtacctagaggcggtggattggagtaaatggcatgtgttctgggtggatgagagggtggtgcccaaggatcacgcggatagcaactacaggctcgcctcagatcagttcctctctaaggtgccgattcctgctgaccaagttcatgccatcaatgacgaactgtcatccgagggggctgcaggggactacgaaactcgtttaaagcagcttgttaagaacggtgtgatcgaactgtcgccggtgtccgggttccccaagtttgaccttatgcttatggggatggggcctgatggccacgttgcctcactcttccctggccaccctgttgtcaatgaataccagaagtgggtcacctttgtcaaggactccccgaagccgccgccggagagaataacgttcactttcccagtgatcaactcgtccgcacacatcgcacttgtggtcaccggtgctggcaaagctggtgctgtgcataaagcactttcagaagggcaaagtacatcagatttgctgcctgtcgagatggtttctcttcagaacggagagctcgtttggttcactgacaagccagcggtgtcaatgttgtcgagcatctgaagcccacgattgtataaatttgaagcttcaatttgatgggattcatacacgattgggtcttgttcggttgcatggtgattggaggggattagggatgattaaatctctttctattcaattttaaatggtaagagacttaatctcctctaattctcctcaatctagttttaaccgaacaagtccttgatggaaatctattcggttcgacatagaactccgagtgaatagattcggc

SEQ ID NO: 19072 - protein, 322 aa, Zea mays subsp. mays
  peptide (1)..(322): Ceres Seq. ID no. 12418945
MTTSAAASATAALSTPSSVNPHRSSSALRLPASLRRSHPNRFLSSSPSRSPLVPVSAMASPAAAGETSSRKKLIIFDAEDDLAASLAKYTSELSAKFAAERGAFTVVLSGGSLVKALRKLAEPPYLEAVDWSKWHVFWVDERVVPKDHADSNYRLASDQFLSKVPIPADQVHAINDELSSEGAAGDYETRLKQLVKNGVIELSPVSGFPKFDLMLMGMGPDGHVASLFPGHPVVNEYQKWVTFVKDSPKPPPERITFTFPVINSSAHIALVVTGAGKAGAVHKALSEGQSTSDLLPVEMVSLQNGELVWFTDKPAVSMLSSI

SEQ ID NO: 19073 - protein, 265 aa, Zea mays subsp. mays
  peptide (1)..(265): Ceres Seq. ID no. 12418946
MASPAAAGETSSRKKLIIFDAEDDLAASLAKYTSELSAKFAAERGAFTVVLSGGSLVKALRKLAEPPYLEAVDWSKWHVFWVDERVVPKDHADSNYRLASDQFLSKVPIPADQVHAINDELSSEGAAGDYETRLKQLVKNGVIELSPVSGFPKFDLMLMGMGPDGHVASLFPGHPVVNEYQKWVTFVKDSPKPPPERITFTFPVINSSAHIALVVTGAGKAGAVHKALSEGQSTSDLLPVEMVSLQNGELVWFTDKPAVSMLSSI

SEQ ID NO: 19074 - protein, 353 aa, Zea mays subsp. mays
  peptide (1)..(353): Ceres Seq. ID no. 12418947
ARDHYLEHPNRLFPPTPPNLLSISNFHAAANMTTSAAASATAALSTPSSVNPHRSSSALRLPASLRRSHPNRFLSSSPSRSPLVPVSAMASPAAAGETSSRKKLIIFDAEDDLAASLAKYTSELSAKFAAERGAFTVVLSGGSLVKALRKLAEPPYLEAVDWSKWHVFWVDERVVPKDHADSNYRLASDQFLSKVPIPADQVHAINDELSSEGAAGDYETRLKQLVKNGVIELSPVSGFPKFDLMLMGMGPDGHVASLFPGHPVVNEYQKWVTFVKDSPKPPPERITFTFPVINSSAHIALVVTGAGKAGAVHKALSEGQSTSDLLPVEMVSLQNGELVWFTDKPAVSMLSSI

SEQ ID NO: 19075 - DNA, 503 bp, Zea mays subsp. mays
  misc_feature (1)..(503): Ceres Seq. ID no. 11414974
  misc_feature (1)..(503): Ortholog of  Ceres SEQ ID NO 14313284 as cited in SEQ ID NO 67146
  misc_feature (1)..(503): Ortholog of  Ceres SEQ ID NO 14308925 as cited in SEQ ID NO 0
actgctcctttcttggaaaagctggttcagaaagatattgaggttctttacctcattgagccaattgatgaggttgccattcagaatttacagacatacaaagagaagaagtttgtagatattagcaaagaggatttggaattgggtgatgaagatgaggacaaggagaaagaaagcaagcaggagtatactcttctatgcgactggataaagcagcagcttggcgataaagtcgccaaggtccagatctcgaagcgactcagctcttctccatgtgttcttgtttctggtaaatttggctggtcagccaacatggaaaggctcatgaaggcacagacccttggtgacacatcaagcctggagttcatgagaggtagacgaatttttgagatcaaccctgaccatcctatcatcaaggacctgaacgctgcttgcaaaaacgagcctgaaagtactgaagccaagagggcggctgagtttgctatacgaggctgcgctgatct

SEQ ID NO: 19076 - protein, 167 aa, Zea mays subsp. mays
  peptide (1)..(167): Ceres Seq. ID no. 11414975
TAPFLEKLVQKDIEVLYLIEPIDEVAIQNLQTYKEKKFVDISKEDLELGDEDEDKEKESKQEYTLLCDWIKQQLGDKVAKVQISKRLSSSPCVLVSGKFGWSANMERLMKAQTLGDTSSLEFMRGRRIFEINPDHPIIKDLNAACKNEPESTEAKRAAEFAIRGCAD

SEQ ID NO: 19077 - DNA, 1298 bp, Zea mays subsp. mays
  misc_feature (1)..(1298): Ceres Seq. ID no. 12361214
  misc_feature (1)..(1298): Ortholog of  Ceres SEQ ID NO 15171549 as cited in SEQ ID NO 59640
aatagcgacggctcagcatagagacaagtccagcgctcaagagagagagagcaagcctttcggcctcgcgtgatgcagcagcagcagccgtccgtccgcgccgtcaccatccccttcgccgaccttaaggatcggggcaaggacctgggcggcttcatcgaggaaggcttcgggcctcaggggctcggcatcgtctccatcgccggcgtacccggttacccagagctcaggaaaaggctgctgcgcttggcgccaaggatcgtcagccttcctgatgatgtgaagaaacaactggaggacccagatagcagataccactttggttggagtcgtgtagaagagaaattcgagtctgaaagatgggacacagccaaaggctcctacttggccaacccagtttttgatgtcccaacaactgatgatgagcttgtaactagatacccatcatactgccgaccaaacatatggccaaaggatcatcttcctgagcttgaaatagcattcaaaggtcttggaaaactgatgttggaagttggcttgatgttggctcatcattgtgatcgctatgtaatacagcgaggggtgggacagtacattggtgaaagccttgagaagacacttgctaggtcaaggtgtcccaagggtcgtctgctgtactacttccccaaatcgtttagcaaacaggacgaagtttcgtcatggtgtggatggcatactgactatggatttttgacaggacttacatgtggcttgttcacgagaaaatcagaggaggtcccctgtcctgatattggaactgggctgtatgttcggactcgtgataatcaagtcgtcaaggtcacacttgtggatgatgagttggtctaccaaattggggagactgctgaaatactatcaagagggcatctatgtgcaaccccacactgtgtgaaggctcccagcagcgaagatgcttctgacgttggtcgctcaactttcgttctgtttattcagccaaactgggatgagccgctgaagcttcctagtgaaatacgctatcaccaggagtgcattccaccaaccaggacacttgcgtacggcgagtactccgaaagagtcttggcgagttttagcggcaagagcgtggaacaaaccttgatgccacagtaagaggctccagccagatgaatactccctctgtttctttttatttgtcgctggatagttcaattttatactatccagcgacaattaaaacgaaacggagggagtatatcatatgtatgataccataccattcaagctacagataagtggac

SEQ ID NO: 19078 - protein, 358 aa, Zea mays subsp. mays
  peptide (1)..(358): Ceres Seq. ID no. 12361215
MQQQQPSVRAVTIPFADLKDRGKDLGGFIEEGFGPQGLGIVSIAGVPGYPELRKRLLRLAPRIVSLPDDVKKQLEDPDSRYHFGWSRVEEKFESERWDTAKGSYLANPVFDVPTTDDELVTRYPSYCRPNIWPKDHLPELEIAFKGLGKLMLEVGLMLAHHCDRYVIQRGVGQYIGESLEKTLARSRCPKGRLLYYFPKSFSKQDEVSSWCGWHTDYGFLTGLTCGLFTRKSEEVPCPDIGTGLYVRTRDNQVVKVTLVDDELVYQIGETAEILSRGHLCATPHCVKAPSSEDASDVGRSTFVLFIQPNWDEPLKLPSEIRYHQECIPPTRTLAYGEYSERVLASFSGKSVEQTLMPQ

SEQ ID NO: 19079 - protein, 208 aa, Zea mays subsp. mays
  peptide (1)..(208): Ceres Seq. ID no. 12361216
MLEVGLMLAHHCDRYVIQRGVGQYIGESLEKTLARSRCPKGRLLYYFPKSFSKQDEVSSWCGWHTDYGFLTGLTCGLFTRKSEEVPCPDIGTGLYVRTRDNQVVKVTLVDDELVYQIGETAEILSRGHLCATPHCVKAPSSEDASDVGRSTFVLFIQPNWDEPLKLPSEIRYHQECIPPTRTLAYGEYSERVLASFSGKSVEQTLMPQ

SEQ ID NO: 19080 - protein, 202 aa, Zea mays subsp. mays
  peptide (1)..(202): Ceres Seq. ID no. 12361217
MLAHHCDRYVIQRGVGQYIGESLEKTLARSRCPKGRLLYYFPKSFSKQDEVSSWCGWHTDYGFLTGLTCGLFTRKSEEVPCPDIGTGLYVRTRDNQVVKVTLVDDELVYQIGETAEILSRGHLCATPHCVKAPSSEDASDVGRSTFVLFIQPNWDEPLKLPSEIRYHQECIPPTRTLAYGEYSERVLASFSGKSVEQTLMPQ

SEQ ID NO: 19081 - DNA, 920 bp, Zea mays subsp. mays; identical to SEQ ID NO: 8916
  misc_feature (1)..(920): Ceres Seq. ID no. 12436141
  misc_feature (1)..(920): Ortholog of  Ceres SEQ ID NO 14301738 as cited in SEQ ID NO 61201

SEQ ID NO: 19082 - protein, 145 aa, Zea mays subsp. mays; identical to SEQ ID NO: 8917
  peptide (1)..(145): Ceres Seq. ID no. 12436142

SEQ ID NO: 19083 - protein, 132 aa, Zea mays subsp. mays; identical to SEQ ID NO: 8918
  peptide (1)..(132): Ceres Seq. ID no. 12436143

SEQ ID NO: 19084 - protein, 129 aa, Zea mays subsp. mays; identical to SEQ ID NO: 8919
  peptide (1)..(129): Ceres Seq. ID no. 12436144

SEQ ID NO: 19085 - DNA, 475 bp, Zea mays subsp. mays
  misc_feature (1)..(475): Ceres Seq. ID no. 1847866
  misc_feature (1)..(475): Ortholog of  Ceres SEQ ID NO 15178236 as cited in SEQ ID NO 67053
aaactccatctcccgtctctctctctctctacgaactccacctcgcgaacagccgctgcttgcctgccgcgttggagagaacggaaganaagcgagcgagggagagggacagcaactccctcggtcgctttcgacggcctggatctccccgcacgcggtatcgtacgaccggcacgctgttgtcgctttccaccgcttgggcaagtggtgctctcgatccagaacggagctcatctgctgatcgtgtttcgtcagtcaagaggggtgtatttgcgatgattgctgtttttttggcttactcttttcttcaggcgccttcaactgtactcattagaccacatcctgccatttggaggctagttcatgggatggcagttgtttaccttgtcgccctcactttcttgcttttccagactcgtgatgatgctaggcaattcatgaagtatcttcatcctgatcttggtgtcgaatttac

SEQ ID NO: 19086 - protein, 92 aa, Zea mays subsp. mays
  peptide (1)..(92): Ceres Seq. ID no. 1847867
  misc_feature (30)..(30): Xaa is any aa, unknown or other
KLHLPSLSLSTNSTSRTAAACLPRWRERKXSERGRGTATPSVAFDGLDLPARGIVRPARCCRFPPLGQVVLSIQNGAHLLIVFRQSRGVYLR

SEQ ID NO: 19087 - protein, 79 aa, Zea mays subsp. mays
  peptide (1)..(79): Ceres Seq. ID no. 1847868
  misc_feature (30)..(30): Xaa is any aa, unknown or other
NSISRLSLSLRTPPREQPLLACRVGENGRXASEGEGQQLPRSLSTAWISPHAVSYDRHAVVAFHRLGKWCSRSRTELIC

SEQ ID NO: 19088 - protein, 157 aa, Zea mays subsp. mays
  peptide (1)..(157): Ceres Seq. ID no. 1847869
  misc_feature (29)..(29): Xaa is any aa, unknown or other
TPSPVSLSLYELHLANSRCLPAALERTEXKRARERDSNSLGRFRRPGSPRTRYRTTGTLLSLSTAWASGALDPERSSSADRVSSVKRGVFAMIAVFLAYSFLQAPSTVLIRPHPAIWRLVHGMAVVYLVALTFLLFQTRDDARQFMKYLHPDLGVEF

SEQ ID NO: 19089 - protein, 66 aa, Zea mays subsp. mays
  peptide (1)..(66): Ceres Seq. ID no. 4902255
MIAVFLAYSFLQAPSTVLIRPHPAIWRLVHGMAVVYLVALTFLLFQTRDDARQFMKYLHPDLGVEF

SEQ ID NO: 19090 - DNA, 562 bp, Zea mays subsp. mays
  misc_feature (1)..(562): Ceres Seq. ID no. 13503118
  misc_feature (1)..(562): Ortholog of  Ceres SEQ ID NO 13598373 as cited in SEQ ID NO 62185
  misc_feature (1)..(562): Ortholog of  Ceres SEQ ID NO 12584664 as cited in SEQ ID NO 62232
  misc_feature (1)..(562): Ortholog of  Ceres SEQ ID NO 15169537 as cited in SEQ ID NO 64197
atcgtctgctggcatcgttccattctcctctaaaccctagccgcctagcgcctcgatctgagcagcctgtctcgcggaggtagttctggttgatttggtcctagatggcggaggaaaaagtggggcggatcttcgtcggcgggctgtcgtggaacaccacggagcgcacgctcgagcgcaccttcggtcagtacggcaaggtcatcgaggctcaggttgtagtggaaagggagacaggccgctctaggggatttggatttgtcacattttcagaacctcgggctgtggatgctgccattcggggaatgcataacggagaactggatggccgcaatatttctgtgaacaaagctgaacctaggaactctgatggctatggatatggtggtggtggtggtggtggttactcgtccggtggtagaggtggatatcgtagtggagctgatgtagttccagcagccagtgatgattgtttcaaatgtggccgtcctggacattgggctcgtgaatgcccttattcagatggaagtggtagaactggaaggtattctcccggttcaag

SEQ ID NO: 19091 - protein, 152 aa, Zea mays subsp. mays
  peptide (1)..(152): Ceres Seq. ID no. 13503119
MAEEKVGRIFVGGLSWNTTERTLERTFGQYGKVIEAQVVVERETGRSRGFGFVTFSEPRAVDAAIRGMHNGELDGRNISVNKAEPRNSDGYGYGGGGGGGYSSGGRGGYRSGADVVPAASDDCFKCGRPGHWARECPYSDGSGRTGRYSPGS

SEQ ID NO: 19092 - protein, 85 aa, Zea mays subsp. mays
  peptide (1)..(85): Ceres Seq. ID no. 13503120
MHNGELDGRNISVNKAEPRNSDGYGYGGGGGGGYSSGGRGGYRSGADVVPAASDDCFKCGRPGHWARECPYSDGSGRTGRYSPGS

SEQ ID NO: 19093 - DNA, 1429 bp, Zea mays subsp. mays
  misc_feature (1)..(1429): Ceres Seq. ID no. 12368140
  misc_feature (1)..(1429): Ortholog of  Ceres SEQ ID NO 12636774 as cited in SEQ ID NO 372
  misc_feature (1)..(1429): Ortholog of  Ceres SEQ ID NO 13582350 as cited in SEQ ID NO 56734
  misc_feature (1)..(1429): Ortholog of  Ceres SEQ ID NO 15175861 as cited in SEQ ID NO 59381
  misc_feature (1)..(1429): Ortholog of  Ceres SEQ ID NO 14314080 as cited in SEQ ID NO 63105
  misc_feature (1)..(1429): Ortholog of  Ceres SEQ ID NO 13597295 as cited in SEQ ID NO 63743
  misc_feature (1)..(1429): Ortholog of  Ceres SEQ ID NO 12617090 as cited in SEQ ID NO 64005
  misc_feature (1)..(1429): Ortholog of  Ceres SEQ ID NO 13597439 as cited in SEQ ID NO 64081
  misc_feature (1)..(1429): Ortholog of  Ceres SEQ ID NO 13597233 as cited in SEQ ID NO 64370
  misc_feature (1)..(1429): Ortholog of  Ceres SEQ ID NO 13598327 as cited in SEQ ID NO 68040
  misc_feature (1)..(1429): Ortholog of  Ceres SEQ ID NO 13599438 as cited in SEQ ID NO 0
acaaggagtcgctggagttaggaggtgcagttatagcagacgcagagcaatggaggccgccgaggctcctaactatgacagtattgtcaacagggatgagatcaccgacgctgcagctgcagcgttcgccaacccggagcaggtcccggagaagtacgtccggacggaggaggtccttgacggcgtcgtcgtcggcgcggacgagagctacgagctgccggtcgtcgacatggccaggctcctcgacccggagctggcgccgtcggaggtcgccaagctcggcgacgcctgccgaaactggggtttctttcaggtcgtcccgtggcccgcccggattccttcagttctaaacttctagtagccagctgctagtatctgtttagaatcgattaattaatcacatttgtcccgtctgcatgcatgtctacagctgacaaaccatggagtggacgaagcggtggtgcagcggatgaaagacgccacggtgcagttcttcagctccccgctggacagcaaggccaaggtggcggtccgagggaacggcttcgaaggattcgggcaccactacagcagagcgtccagcggcaagctggactgggcagagagcatgattctcatcacgcagccagtcaaggacaggaacatggagatgtggcctacaaatccacccacgttcaggtctgcagtacgcatatcctggcctctctctgtctctactagtcaatcatctgacacgtacgtacgtctcccatgcacgcacgcacgcacggactctgtttgttaatcagggacgcgctcgacgtctactcggtagagatgatcggcctcgcaatgcggctcctggggttcatggcggccgacctcggggtggagccggaggcgctgcaggacgccttcacggggaagcggcagagcatggcggtccaccactacccgccctgccgccagcgggagaaggtgatgggcatcacgccgcacacggacgggctgggcctcacgctgctgctgcacgtggacgacacgcccggcctgcagatccgcaggggcggcaggtggttccccgtgcgcccgctgccgggcgccttcgtcgtcaacgtcgccgacatcctggacgtgctcaccaacggcgcctacgccagcgtcgagcaccgagtgctcccggacgccgagagggctcggaccaccgtcgtcgtgttccaggaggcgtccgtcgggggcctggtggcgccgctgccggggctcctcgaccagcagggcgcgcgcgcgcgctacaggtccattgagatcgaggagtacatcaagggcaacttcaacgcgctggagcaagggacacggttcatccagagcctcaggatatagctatctagttgctccttccatcaaaaaataattacccaacatatcgataaatcaatcaatctcaatcttc

SEQ ID NO: 19094 - protein, 202 aa, Zea mays subsp. mays
  peptide (1)..(202): Ceres Seq. ID no. 12368141
MHARTHGLCLLIRDALDVYSVEMIGLAMRLLGFMAADLGVEPEALQDAFTGKRQSMAVHHYPPCRQREKVMGITPHTDGLGLTLLLHVDDTPGLQIRRGGRWFPVRPLPGAFVVNVADILDVLTNGAYASVEHRVLPDAERARTTVVVFQEASVGGLVAPLPGLLDQQGARARYRSIEIEEYIKGNFNALEQGTRFIQSLRI

SEQ ID NO: 19095 - protein, 180 aa, Zea mays subsp. mays
  peptide (1)..(180): Ceres Seq. ID no. 12368142
MIGLAMRLLGFMAADLGVEPEALQDAFTGKRQSMAVHHYPPCRQREKVMGITPHTDGLGLTLLLHVDDTPGLQIRRGGRWFPVRPLPGAFVVNVADILDVLTNGAYASVEHRVLPDAERARTTVVVFQEASVGGLVAPLPGLLDQQGARARYRSIEIEEYIKGNFNALEQGTRFIQSLRI

SEQ ID NO: 19096 - protein, 175 aa, Zea mays subsp. mays
  peptide (1)..(175): Ceres Seq. ID no. 12368143
MRLLGFMAADLGVEPEALQDAFTGKRQSMAVHHYPPCRQREKVMGITPHTDGLGLTLLLHVDDTPGLQIRRGGRWFPVRPLPGAFVVNVADILDVLTNGAYASVEHRVLPDAERARTTVVVFQEASVGGLVAPLPGLLDQQGARARYRSIEIEEYIKGNFNALEQGTRFIQSLRI

SEQ ID NO: 19097 - DNA, 1221 bp, Zea mays subsp. mays
  misc_feature (1)..(1221): Ceres Seq. ID no. 12420021
  misc_feature (1)..(1221): Ortholog of  Ceres SEQ ID NO 14316095 as cited in SEQ ID NO 52477
ccaagcagaagagaagagaggcagacaggctcactagtgggagatggtgactactacgatcgaggacctccacggcgacgtgctgggctgcgcgctgcggcggctggacgggcggtcgcttgcggcggccagctgcgccacggtcgcgctccgggcgctggccacggacccggagacgtggcgcgcgctctgcntcnccgagtggccgtcgctggcgctggcgctggcggcgcancgccggctgctcgcggcggtcccgccgnagcggctnttcgccgacgcgcacccgttcccgtccgcggacaccgggggagccggaggtccnnaccccgaccccgtccccnncggggagctggtctccgcggtggacgtcctactacaggggcgcgcccctgctgtcccgcgtggtgnagacgcccgcgtcctcgccgtggttcctcggctcgccgttccgcgtggaggccgtggagcggaagaggccggcctccgccgccgcggtgccctcgccggcggagctcgagctgagctgggtggtcgtggacccggcccgcgnccgcgcggtcaacgtctccagccggcgccccgtggcggtggcccggcactggtacacgggcgagacgctggcgcggttcgccgtggtgctgggagggtgcaagttcgaggccaccgtcgcctgctccgaaggggcggatgggcacgtcagcgaggtcagcctggccgtggaggacgccgacggcgccgccgtcagcggcgagggcacgctgcggctcctcgccgcggcgatggaggccccccggaagggaggggcgcgggagccggaggaggcccggaggcggtacctcgacttcgtgaagcgcaagaaggggaggaaggagagcaaggcgcgccgcgaggcgctcgtggacctgtgcntgctccgctgccagcgccgtngtcnngctcacctgcctngccnctgtcgcgctccggtgaccggcgcctgctgcctgctgcccggacgnacgagcgcgtgtagtgggcactaggcaaggcagctgcacacagnacgtgtcgtaacatctcgggtagcacttgagtattagcgtacaacgtcgggtggcgatcttttctccaacgctctttttctctctctcttcttcttcccggtaacagttaggaacagcacatcatcatgtcctgcactggtgtgcatcgttttcctatcctataacaaacgacgtg

SEQ ID NO: 19098 - protein, 323 aa, Zea mays subsp. mays
  peptide (1)..(323): Ceres Seq. ID no. 12420022
  misc_feature (51)..(51): Xaa is any aa, unknown or other
  misc_feature (52)..(52): Xaa is any aa, unknown or other
  misc_feature (64)..(64): Xaa is any aa, unknown or other
  misc_feature (74)..(74): Xaa is any aa, unknown or other
  misc_feature (76)..(76): Xaa is any aa, unknown or other
  misc_feature (94)..(94): Xaa is any aa, unknown or other
  misc_feature (95)..(95): Xaa is any aa, unknown or other
  misc_feature (101)..(101): Xaa is any aa, unknown or other
  misc_feature (123)..(123): Xaa is any aa, unknown or other
  misc_feature (170)..(170): Xaa is any aa, unknown or other
  misc_feature (290)..(290): Xaa is any aa, unknown or other
  misc_feature (297)..(297): Xaa is any aa, unknown or other
  misc_feature (298)..(298): Xaa is any aa, unknown or other
  misc_feature (299)..(299): Xaa is any aa, unknown or other
  misc_feature (303)..(303): Xaa is any aa, unknown or other
  misc_feature (304)..(304): Xaa is any aa, unknown or other
  misc_feature (320)..(320): Xaa is any aa, unknown or other
MVTTTIEDLHGDVLGCALRRLDGRSLAAASCATVALRALATDPETWRALCXXEWPSLALALAAXRRLLAAVPPXRXFADAHPFPSADTGGAGGXXPDPVPXGELVSAVDVLLQGRAPAVPRGXDARVLAVVPRLAVPRGGRGAEEAGLRRRGALAGGARAELGGRGPGPXPRGQRLQPAPRGGGPALVHGRDAGAVRRGAGRVQVRGHRRLLRRGGWARQRGQPGRGGRRRRRRQRRGHAAAPRRGDGGPPEGRGAGAGGGPEAVPRLREAQEGEEGEQGAPRGARGPVXAPLPAPXXXSPAXXLSRSGDRRLLPAARTXERV

SEQ ID NO: 19099 - protein, 174 aa, Zea mays subsp. mays
  peptide (1)..(174): Ceres Seq. ID no. 12420023
  misc_feature (65)..(65): Xaa is any aa, unknown or other
  misc_feature (66)..(66): Xaa is any aa, unknown or other
  misc_feature (79)..(79): Xaa is any aa, unknown or other
  misc_feature (88)..(88): Xaa is any aa, unknown or other
  misc_feature (91)..(91): Xaa is any aa, unknown or other
  misc_feature (109)..(109): Xaa is any aa, unknown or other
  misc_feature (115)..(115): Xaa is any aa, unknown or other
  misc_feature (137)..(137): Xaa is any aa, unknown or other
PSRREERQTGSLVGDGDYYDRGPPRRRAGLRAAAAGRAVACGGQLRHGRAPGAGHGPGDVARALXXRVAVAGAGAGGAXPAARGGPAXAAXRRRAPVPVRGHRGSRRSXPRPRPXRGAGLRGGRPTTGARPCCPAWXRRPRPRRGSSARRSAWRPWSGRGRPPPPRCPRRRSSS

SEQ ID NO: 19100 - DNA, 1619 bp, Zea mays subsp. mays
  misc_feature (1)..(1619): Ceres Seq. ID no. 13499381
  misc_feature (1)..(1619): Ortholog of  Ceres SEQ ID NO 14315422 as cited in SEQ ID NO 59255
gcacgagaccattacctagaacatcctaatcgaaaaagtcctcacccattcattcgtccatcccacctaccatggccaccgcctccggcactgacgccggtgcccagccgcgcgacgaccccagcctcctccccttcgcgtccttctcgctcggcctctccatccgcgcgccggccacccccacactcgcctccgtcccctccaccctccacctccccactcaaatctctacactcgccgtctgcctccacccctccgccgcgcagccctcctcccgccgcaccacccgcctcaattccgccacctcctccgtcatcgccccgctgccctcctcaacgcccggcctctcccgctccttcccttcgggcgcgcccgccgcagcagggcgccgccgcacgctcgtctggttccgcgccgacctccgcctccacgaccatgagccgtttcacgccgcagcgggggcgtcgtcctccctcctccccgttttcgtcttcgatccgcgggacttcggcaagtccccctcggggttcgaccggacgggcccgtaccgcgccaacttcctgctcgattcggtcgccgacctgcgccggagcctccgcgcccgcggtggggacctggtggtgcgcgtgggtatgcccgaagtggtcattcccgagctcgcgcgggcggcgggcgcggaggccgtgtacgctcacggggaggtatcgcgggacgaggtccgcgccgaggagagggtgcaaaaggctgtggagaaggagggtatcaacgtgaagtacttctggggtagcacgctataccacgtggaagaccttcccttccgcctcgaggacatgccgtccaactatggcggcttcagggaggccgtgaaggggttggaggtcagaaaggtgctggaggctcccgaggaggtcaagtgcgtgcccatgaagaatgtgctcgagcccggtgacatccccacgcttgctgagctcgggctcactgcgccaccagccatgtcacaggactcaaaacctgctgttggctctactctcattggtggtgagacagaagctctggagaggttgaagaagtttgctgcagaatgctctatgcagccaaacaaagtagacaaaagcaatacccaagatagcatatatggtgctaatttctcttgcaaaatttctccatggcttgctacaggttgcctctctccacggttcatgtatgaggagttgaagaagcatgctactaaagcaattccttttgggtcaacacccaagaataatgatggcacatctgatgctggaacaaattggttaatgtttgagttgctgtggagagatttcttcaggttcatcacaaagaagtacagctctgtacagaagacatctgaagttgccactggctgcactcccgccccagcgcttgcatgaacttacttagacaagctgattgccagctgcttttttggggtgataaacttatgtgcattttcaatggagtcttttttgccgccaataatgttggtagtcaaagtgaacgccgaatgcgcattcctgcgttttggtttggtcgatgtatttaatgctgtcgacatccctccaaatgactgttgaatgcaaatgatactgtgagcaacc

SEQ ID NO: 19101 - protein, 446 aa, Zea mays subsp. mays
  peptide (1)..(446): Ceres Seq. ID no. 13499382
MATASGTDAGAQPRDDPSLLPFASFSLGLSIRAPATPTLASVPSTLHLPTQISTLAVCLHPSAAQPSSRRTTRLNSATSSVIAPLPSSTPGLSRSFPSGAPAAAGRRRTLVWFRADLRLHDHEPFHAAAGASSSLLPVFVFDPRDFGKSPSGFDRTGPYRANFLLDSVADLRRSLRARGGDLVVRVGMPEVVIPELARAAGAEAVYAHGEVSRDEVRAEERVQKAVEKEGINVKYFWGSTLYHVEDLPFRLEDMPSNYGGFREAVKGLEVRKVLEAPEEVKCVPMKNVLEPGDIPTLAELGLTAPPAMSQDSKPAVGSTLIGGETEALERLKKFAAECSMQPNKVDKSNTQDSIYGANFSCKISPWLATGCLSPRFMYEELKKHATKAIPFGSTPKNNDGTSDAGTNWLMFELLWRDFFRFITKKYSSVQKTSEVATGCTPAPALA

SEQ ID NO: 19102 - protein, 259 aa, Zea mays subsp. mays
  peptide (1)..(259): Ceres Seq. ID no. 13499383
MPEVVIPELARAAGAEAVYAHGEVSRDEVRAEERVQKAVEKEGINVKYFWGSTLYHVEDLPFRLEDMPSNYGGFREAVKGLEVRKVLEAPEEVKCVPMKNVLEPGDIPTLAELGLTAPPAMSQDSKPAVGSTLIGGETEALERLKKFAAECSMQPNKVDKSNTQDSIYGANFSCKISPWLATGCLSPRFMYEELKKHATKAIPFGSTPKNNDGTSDAGTNWLMFELLWRDFFRFITKKYSSVQKTSEVATGCTPAPALA

SEQ ID NO: 19103 - protein, 256 aa, Zea mays subsp. mays
  peptide (1)..(256): Ceres Seq. ID no. 13499384
ARDHYLEHPNRKSPHPFIRPSHLPWPPPPALTPVPSRATTPASSPSRPSRSASPSARRPPPHSPPSPPPSTSPLKSLHSPSASTPPPRSPPPAAPPASIPPPPPSSPRCPPQRPASPAPSLRARPPQQGAAARSSGSAPTSASTTMSRFTPQRGRRPPSSPFSSSIRGTSASPPRGSTGRARTAPTSCSIRSPTCAGASAPAVGTWWCAWVCPKWSFPSSRGRRARRPCTLTGRYRGTRSAPRRGCKRLWRRRVST

SEQ ID NO: 19104 - DNA, 1061 bp, Zea mays subsp. mays
  misc_feature (1)..(1061): Ceres Seq. ID no. 12363664
  misc_feature (1)..(1061): Ortholog of  Ceres SEQ ID NO 13662219 as cited in SEQ ID NO 63129
gcacgagaccattacctagaacatcctaatcgaaaaaatcatccatcgctgcgacctcggaaccaacctttccgccactctctctcgcgacaccgaccgacgcgacgacgtcgcactcgcacagccaccaccaccccaccatggcggcaccgaggctggagcgcggcgggttccagctcccgaacaccgagcaggagaactccctcttcctccgcgcgctcatctccgtcgtgtccggggacaccgccgcgttgctcccggaagcggcggccgtagaggctcccgcggcccccgtggcgtgcgccaggtgcggcgcggacgggtgcgcggcggccggctgctgcgagctcgtcgccgggtcgagcagcgacagcgacggcggcctagggctagccgcgggcaagcggagagggagggggaggaaggtgatccagtacaggggcgtgcggcggcggccgtggggcaagtgggcggcggagatccgcgacccgcgccgcgccgcgcgcaagtggctcggcacgttcgacaccgccgaggacgccgcgcgcgcctacgacgtcgccgcggtcgagctccggggccagcgagccaagctcaacttcccagcgcagcctccgcaccaccgtccattgcccgatcagcagagcctccgcgagaacagcggatccaacgccgcgtcgccggtgcacgtggcgctggcgccgaccacgcagcaggacatctgggagggtttgaacgagatcatgatgatggaggaggaacgcagcttctggtctatgcgatgatcctgcctgcaccttcgcccatgcatccatctccgtatcttctcttgtttaatgcttttattctatcctactctatttcatgattattagagtccattgattgccttttagggaagggattccatacgatctccatctgaaaagagaacacttattagcttcacaagattgcttggcatgcagacgtacgtaaagtgagtttaggaagcaatggtgccaccagccgactgtactgtaaatcactgtttctgtaactcgttagtcaccatcgctttc

SEQ ID NO: 19105 - protein, 214 aa, Zea mays subsp. mays
  peptide (1)..(214): Ceres Seq. ID no. 12363665
MAAPRLERGGFQLPNTEQENSLFLRALISVVSGDTAALLPEAAAVEAPAAPVACARCGADGCAAAGCCELVAGSSSDSDGGLGLAAGKRRGRGRKVIQYRGVRRRPWGKWAAEIRDPRRAARKWLGTFDTAEDAARAYDVAAVELRGQRAKLNFPAQPPHHRPLPDQQSLRENSGSNAASPVHVALAPTTQQDIWEGLNEIMMMEEERSFWSMR

SEQ ID NO: 19106 - DNA, 1567 bp, Zea mays subsp. mays
  misc_feature (1)..(1567): Ceres Seq. ID no. 12383380
  misc_feature (1)..(1567): Ortholog of  Ceres SEQ ID NO 13659759 as cited in SEQ ID NO 67663
gcacgagaccattacctagaacatcctaatcgaaaaaccattcgattgggcaactcgtcaccgtaccaaccaaaccatcattccagccgcggcgggacacaccgcctcctccgaactaacgcgacgacgacgcacggcggcctcgtccggcaccggcaggagcgcgatggggcagaagcgcgccttgctggtgggcatcaactacctgggcacggacggggagctgaagggatgcctcaacgacgtggcccgcatgcgccgctgcctggtgggccgcttcgggttcgacgaggccgacatccgtgtcctggccgacgccgacccgtccacgccgccgcccactggggccaacatccggctggagctcgagcggctcgtggcgggcgcgcgccccggggacgcgctcttcttccactacagcggccacggcctgcagctccccgccgagactggggaggacgacgacaccgggtacgacgagtgcatcgtgccatgcgacctcaacttgatcaaagaccaagatttcacggatctcgtggccaaggtccctgacggctgccgcttcaccatggtctcggactcgtgccacagcggcggcctgatcgacaagaccaaggagcaaatcgggaacagcaccaagcagaacagaacccagcagcgccgagagcgcgaaatgaagcctcctcctcccgctcccggttccgcactccgcgtctccctcgcgcgaatcgtccgtggcgtgctggagtctctggggtgcatccactgcagtcgttgccgtgtccagcagcagggcaacagcaatagcagcagcatcagcaaccggtcgctgccgctgtcgacgttcatccagatgctcagggacaagaccggaaggcacgacgtcggcgtgggctccatccgcacgacgctgttccaccacttcggcgacgaggcgagccccaaggtcaagaggttcatgaaggccatgctgttaggcaagctccggcacgacggcaaggaagcggaggagcagtcgcgcgttcccagggaggcagaggtggaggagaccctggcgcaggacgcgcacagcgtcgaggaagtgtacgcggggccggctgcggcggcggcggcggccagggtgccgccgcgcaacggcgtcctgatcagcgggtgccagacggacgagacctcggcggacgcgaccacggccgacggcatgtcctacggcgcgctgagcaacgtgatccagaccatcctcgccggggacggcaagaagcgcggcgtggcgctggcggtgacgaaccgagagctggtggtccgggcgcgggagctgctgtccaggcaggggtacacgcagcagcccgggctctactgcagcgacgagcacgccacgctgcccttcatctgctgaagacgaaataaactccgtgtacagtgaatttcaggcttcattagttcattttacgggatgctacgttgtgttgtgtgtgtaacagaattgacactttgtgttgactcgtggtgtgccgcagcctgcgtatgttatggtgttactgttacgttgttacctgatgacgttgacctt

SEQ ID NO: 19107 - protein, 408 aa, Zea mays subsp. mays
  peptide (1)..(408): Ceres Seq. ID no. 12383381
MGQKRALLVGINYLGTDGELKGCLNDVARMRRCLVGRFGFDEADIRVLADADPSTPPPTGANIRLELERLVAGARPGDALFFHYSGHGLQLPAETGEDDDTGYDECIVPCDLNLIKDQDFTDLVAKVPDGCRFTMVSDSCHSGGLIDKTKEQIGNSTKQNRTQQRREREMKPPPPAPGSALRVSLARIVRGVLESLGCIHCSRCRVQQQGNSNSSSISNRSLPLSTFIQMLRDKTGRHDVGVGSIRTTLFHHFGDEASPKVKRFMKAMLLGKLRHDGKEAEEQSRVPREAEVEETLAQDAHSVEEVYAGPAAAAAAARVPPRNGVLISGCQTDETSADATTADGMSYGALSNVIQTILAGDGKKRGVALAVTNRELVVRARELLSRQGYTQQPGLYCSDEHATLPFIC

SEQ ID NO: 19108 - protein, 379 aa, Zea mays subsp. mays
  peptide (1)..(379): Ceres Seq. ID no. 12383382
MRRCLVGRFGFDEADIRVLADADPSTPPPTGANIRLELERLVAGARPGDALFFHYSGHGLQLPAETGEDDDTGYDECIVPCDLNLIKDQDFTDLVAKVPDGCRFTMVSDSCHSGGLIDKTKEQIGNSTKQNRTQQRREREMKPPPPAPGSALRVSLARIVRGVLESLGCIHCSRCRVQQQGNSNSSSISNRSLPLSTFIQMLRDKTGRHDVGVGSIRTTLFHHFGDEASPKVKRFMKAMLLGKLRHDGKEAEEQSRVPREAEVEETLAQDAHSVEEVYAGPAAAAAAARVPPRNGVLISGCQTDETSADATTADGMSYGALSNVIQTILAGDGKKRGVALAVTNRELVVRARELLSRQGYTQQPGLYCSDEHATLPFIC

SEQ ID NO: 19109 - protein, 274 aa, Zea mays subsp. mays
  peptide (1)..(274): Ceres Seq. ID no. 12383383
MVSDSCHSGGLIDKTKEQIGNSTKQNRTQQRREREMKPPPPAPGSALRVSLARIVRGVLESLGCIHCSRCRVQQQGNSNSSSISNRSLPLSTFIQMLRDKTGRHDVGVGSIRTTLFHHFGDEASPKVKRFMKAMLLGKLRHDGKEAEEQSRVPREAEVEETLAQDAHSVEEVYAGPAAAAAAARVPPRNGVLISGCQTDETSADATTADGMSYGALSNVIQTILAGDGKKRGVALAVTNRELVVRARELLSRQGYTQQPGLYCSDEHATLPFIC

SEQ ID NO: 19110 - DNA, 842 bp, Zea mays subsp. mays
  misc_feature (1)..(842): Ceres Seq. ID no. 12378544
  misc_feature (1)..(842): Ortholog of  Ceres SEQ ID NO 15179287 as cited in SEQ ID NO 0
tacactagatataggaggcggtgcagagtccttaagatggcttgtttggccaatgatagatgataagtcaaaggtgactctagctgtcgaatgccctcgtgttactgtcaacccacagccatcgctgttcgacctctccggatattccaaagtcccaatagaagcattgtcaagcgtaccactggaccattctgtggttgaggacattgatcccaaaacatgggctgtttctgctgctcctccaagagctgttgctccagcgaatccaaatgttccaagtgctccgcctgaaataccgatggcagaaaggttcaggctggcctatgtggagagggaagcgaggctggcacccaagagggccaagcgggaaaggcagcggcgtcggcgcgctgagagggactacatgatggttgacatcgacgcaaggtcggtcgcacttgctgctcaagcaagcaggaacctgcgcaagagctgattgtttcttgtctacgctatttgtggagactcgagagtagagaatcatgaggcaagaaatgctgttcaatccttctactttcaaggcaaagatagcatacatatatggacncagtattgtatagttgtattggcagtagcggtagcgtttacactgccatgtactagtaatagaaaaaaatctgagtgggaataacagggaaggcgtgccttatcaaatcacaaatgggttgccacgaggatttgtgaacatgctcgtccagatttctttgaatctggatggtgcgattatgtgaggttcctcacgcaatttgttaaatctgaacaagattcgtgtgaactgttgtatacataattttttttcttgc

SEQ ID NO: 19111 - protein, 157 aa, Zea mays subsp. mays
  peptide (1)..(157): Ceres Seq. ID no. 12378545
TLDIGGGAESLRWLVWPMIDDKSKVTLAVECPRVTVNPQPSLFDLSGYSKVPIEALSSVPLDHSVVEDIDPKTWAVSAAPPRAVAPANPNVPSAPPEIPMAERFRLAYVEREARLAPKRAKRERQRRRRAERDYMMVDIDARSVALAAQASRNLRKS

SEQ ID NO: 19112 - protein, 140 aa, Zea mays subsp. mays
  peptide (1)..(140): Ceres Seq. ID no. 12378546
MIDDKSKVTLAVECPRVTVNPQPSLFDLSGYSKVPIEALSSVPLDHSVVEDIDPKTWAVSAAPPRAVAPANPNVPSAPPEIPMAERFRLAYVEREARLAPKRAKRERQRRRRAERDYMMVDIDARSVALAAQASRNLRKS

SEQ ID NO: 19113 - DNA, 1883 bp, Zea mays subsp. mays
  misc_feature (1)..(1883): Ceres Seq. ID no. 12359147
  misc_feature (1)..(1883): Ortholog of  Ceres SEQ ID NO 14307904 as cited in SEQ ID NO 66440
  misc_feature (1)..(1883): Ortholog of  Ceres SEQ ID NO 13659971 as cited in SEQ ID NO 67565
aaaaaggagctagcactagccaggaaacacacagagagacgaaataagcagcgaggcaatgggcaacctgcttcaccaggaaatacgacgagcacgagcacgagataccaatcaccacggacccgccgcggcggacgtcgatgccggtgtaccggccgccccggccccgcgatgacaaggcgcaggaggtgccgctatactcgggctcggaccgccggccgtcctaccgtccgccgcggcttccggtcttcccgtcgggcccgggatcgacgggccggcggcggccgcccaccggccagacgggcacggtcctggaccggcacacggtggacgtgcggacgctgttccacctggagcggaagctggggagcgggcagttcggcaccacgtacctgtgcacggagcgcgcgacggggaagaagtacgcgtgcaagtcggtgtccaagcgcaagctggtgcggcgcgccgacatcgcggacatgcgccgggagatcaccatcctgcagcacctcagcggccagcccaacgtggcggagttcaagggcgcgttcgaggaccgcgacgacgtgcacgtcgtcatggagctctgctccggcggcgagctcttcgaccgcatcaccgccaaggggagctactccgagcgccaggccgccgccgtgtgccgcgacgtcctcaccgtcgtcaacgtctgccacttcatgggggtcatgcaccgcgacctcaagcccgagaacttcctgctcgccagccccgccgacgacgcgccgctcaaggccatcgacttcggcctgtccgtcttcatcgaagaaggcaaagtttacaaggacgtggtggggagcgcgtactacgtggcgcccgaggtgttgcgccggaactacggcagggagatcgacgtctggagtgctggcgtgatcctatacatccttctatgcgggtcgccgcctttctgggaagaaacgcagaaaggcatatttgacgcaatattggccgacgagctcgatctggtctcctccccgtggccctccatatctgaaagcgcgaaggatctcattagaaaaatgctgaacaaggaccctcagaggcgcattacggcttcacaggccctagaacatccatggctcaaaggtggtgcacctgacaggcctatcgacagcgcggtcctgtcaagaatgaagcagttcaaggcgatgaacaagctaaagcaacttgcactgaaggtaatcgcagagaacctaacagaggacgagatcaaggggctgaagcagatgttcaacaacatggatacagacaggagcggcacgatcacggtcgaggaactcaaggacgggctggcgaagctcgggtccaagattagcgaagcggaggttcagaagcttatggaagcagttgacgtggacaagagtggcagcattgactacaccgagttcctcactgccatgatgaacaggcataaactggagaaggaggaggatttgttccttgcttttcaacacttcgacaaagacgatagcgggtacataacaagagacgaactggaacaagccatggcggagtatggggtgggtgatgaagcaagcattaaggaagtgctggacgaagttgataaagacaaggatgggagaatcgactacgaagagtttgtagaaatgatgaggaagggaagttatacctgaggaagctctgttctcatggtgggagaggttgtgtatatatgtttcagcaaatgtgtcaagtacaagcaacgaagcaagtttaacttagaacaagttgcttctgcagctatggtccgaggcaagcatgtacagctatttatttattgaccgaatatgcaacgagagagaaaatgtccagtttacttgaaagaaaagttcagagttcgtgct

SEQ ID NO: 19114 - protein, 510 aa, Zea mays subsp. mays
  peptide (1)..(510): Ceres Seq. ID no. 12359148
MPVYRPPRPRDDKAQEVPLYSGSDRRPSYRPPRLPVFPSGPGSTGRRRPPTGQTGTVLDRHTVDVRTLFHLERKLGSGQFGTTYLCTERATGKKYACKSVSKRKLVRRADIADMRREITILQHLSGQPNVAEFKGAFEDRDDVHVVMELCSGGELFDRITAKGSYSERQAAAVCRDVLTVVNVCHFMGVMHRDLKPENFLLASPADDAPLKAIDFGLSVFIEEGKVYKDVVGSAYYVAPEVLRRNYGREIDVWSAGVILYILLCGSPPFWEETQKGIFDAILADELDLVSSPWPSISESAKDLIRKMLNKDPQRRITASQALEHPWLKGGAPDRPIDSAVLSRMKQFKAMNKLKQLALKVIAENLTEDEIKGLKQMFNNMDTDRSGTITVEELKDGLAKLGSKISEAEVQKLMEAVDVDKSGSIDYTEFLTAMMNRHKLEKEEDLFLAFQHFDKDDSGYITRDELEQAMAEYGVGDEASIKEVLDEVDKDKDGRIDYEEFVEMMRKGSYT

SEQ ID NO: 19115 - protein, 397 aa, Zea mays subsp. mays
  peptide (1)..(397): Ceres Seq. ID no. 12359149
MRREITILQHLSGQPNVAEFKGAFEDRDDVHVVMELCSGGELFDRITAKGSYSERQAAAVCRDVLTVVNVCHFMGVMHRDLKPENFLLASPADDAPLKAIDFGLSVFIEEGKVYKDVVGSAYYVAPEVLRRNYGREIDVWSAGVILYILLCGSPPFWEETQKGIFDAILADELDLVSSPWPSISESAKDLIRKMLNKDPQRRITASQALEHPWLKGGAPDRPIDSAVLSRMKQFKAMNKLKQLALKVIAENLTEDEIKGLKQMFNNMDTDRSGTITVEELKDGLAKLGSKISEAEVQKLMEAVDVDKSGSIDYTEFLTAMMNRHKLEKEEDLFLAFQHFDKDDSGYITRDELEQAMAEYGVGDEASIKEVLDEVDKDKDGRIDYEEFVEMMRKGSYT

SEQ ID NO: 19116 - protein, 364 aa, Zea mays subsp. mays
  peptide (1)..(364): Ceres Seq. ID no. 12359150
MELCSGGELFDRITAKGSYSERQAAAVCRDVLTVVNVCHFMGVMHRDLKPENFLLASPADDAPLKAIDFGLSVFIEEGKVYKDVVGSAYYVAPEVLRRNYGREIDVWSAGVILYILLCGSPPFWEETQKGIFDAILADELDLVSSPWPSISESAKDLIRKMLNKDPQRRITASQALEHPWLKGGAPDRPIDSAVLSRMKQFKAMNKLKQLALKVIAENLTEDEIKGLKQMFNNMDTDRSGTITVEELKDGLAKLGSKISEAEVQKLMEAVDVDKSGSIDYTEFLTAMMNRHKLEKEEDLFLAFQHFDKDDSGYITRDELEQAMAEYGVGDEASIKEVLDEVDKDKDGRIDYEEFVEMMRKGSYT

SEQ ID NO: 19117 - DNA, 474 bp, Zea mays subsp. mays
  misc_feature (1)..(474): Ceres Seq. ID no. 4615167
  misc_feature (1)..(474): Ortholog of  Ceres SEQ ID NO 15173516 as cited in SEQ ID NO 61801
agcagagtccaggtgcgtcmgcaggagtcaggactctcaactccggcgaagggagcagaaccgtttgtggcagttgggcggcgtcggcatggacgaggctacgaagaaggtggaggctacggtgctggagatcccgcgaggtctgatatggagtccgtaacggagaacaaggaggaggcgaaggcggcggaggagggcgacgctggcagggagagcaaggacaaggaacggaaggaagatgaggaggaggatgaaggtaagggtggcgggaagaganaktacggcgaccaaggggaccttatcctgtgccgcctgtcgagcaagaggagggtgactctgtcggagttcaagggcaggtcgctggtgtccatccgagagttctacgtgaaggacggcaaggagatgccctccgccaaaggtattagtatgacaatggagcagtgggaagcattttcaatgctgcacctgcgatag

SEQ ID NO: 19118 - protein, 157 aa, Zea mays subsp. mays
  peptide (1)..(157): Ceres Seq. ID no. 4615168
  misc_feature (7)..(7): Xaa is any aa, unknown or other
  misc_feature (93)..(93): Xaa is any aa, unknown or other
SRVQVRXQESGLSTPAKGAEPFVAVGRRRHGRGYEEGGGYGAGDPARSDMESVTENKEEAKAAEEGDAGRESKDKERKEDEEEDEGKGGGKRXYGDQGDLILCRLSSKRRVTLSEFKGRSLVSIREFYVKDGKEMPSAKGISMTMEQWEAFSMLHLR

SEQ ID NO: 19119 - protein, 108 aa, Zea mays subsp. mays
  peptide (1)..(108): Ceres Seq. ID no. 4615169
  misc_feature (44)..(44): Xaa is any aa, unknown or other
MESVTENKEEAKAAEEGDAGRESKDKERKEDEEEDEGKGGGKRXYGDQGDLILCRLSSKRRVTLSEFKGRSLVSIREFYVKDGKEMPSAKGISMTMEQWEAFSMLHLR

SEQ ID NO: 19120 - DNA, 2200 bp, Zea mays subsp. mays; identical to SEQ ID NO: 18408
  misc_feature (1)..(2200): Ceres Seq. ID no. 12362570
  misc_feature (1)..(2200): Ortholog of  Ceres SEQ ID NO 13656138 as cited in SEQ ID NO 65492
  misc_feature (1)..(2200): Ortholog of  Ceres SEQ ID NO 14301542 as cited in SEQ ID NO 66246

SEQ ID NO: 19121 - protein, 580 aa, Zea mays subsp. mays; identical to SEQ ID NO: 18409
  peptide (1)..(580): Ceres Seq. ID no. 12362571

SEQ ID NO: 19122 - protein, 321 aa, Zea mays subsp. mays; identical to SEQ ID NO: 18410
  peptide (1)..(321): Ceres Seq. ID no. 12362572

SEQ ID NO: 19123 - DNA, 1073 bp, Zea mays subsp. mays; identical to SEQ ID NO: 16463
  misc_feature (1)..(1073): Ceres Seq. ID no. 12405278
  misc_feature (1)..(1073): Ortholog of  Ceres SEQ ID NO 14301944 as cited in SEQ ID NO 0

SEQ ID NO: 19124 - protein, 312 aa, Zea mays subsp. mays; identical to SEQ ID NO: 16464
  peptide (1)..(312): Ceres Seq. ID no. 12405279

SEQ ID NO: 19125 - protein, 270 aa, Zea mays subsp. mays; identical to SEQ ID NO: 16465
  peptide (1)..(270): Ceres Seq. ID no. 12405280

SEQ ID NO: 19126 - protein, 265 aa, Zea mays subsp. mays; identical to SEQ ID NO: 16466
  peptide (1)..(265): Ceres Seq. ID no. 12405281

SEQ ID NO: 19127 - DNA, 1868 bp, Zea mays subsp. mays
  misc_feature (1)..(1868): Ceres Seq. ID no. 12366477
  misc_feature (1)..(1868): Ortholog of  Ceres SEQ ID NO 14315257 as cited in SEQ ID NO 52552
  misc_feature (1)..(1868): Ortholog of  Ceres SEQ ID NO 14314636 as cited in SEQ ID NO 56924
  misc_feature (1)..(1868): Ortholog of  Ceres SEQ ID NO 14314755 as cited in SEQ ID NO 59919
  misc_feature (1)..(1868): Ortholog of  Ceres SEQ ID NO 15171614 as cited in SEQ ID NO 60106
  misc_feature (1)..(1868): Ortholog of  Ceres SEQ ID NO 15168421 as cited in SEQ ID NO 60131
  misc_feature (1)..(1868): Ortholog of  Ceres SEQ ID NO 13597574 as cited in SEQ ID NO 64677
  misc_feature (1)..(1868): Ortholog of  Ceres SEQ ID NO 13597843 as cited in SEQ ID NO 64850
  misc_feature (1)..(1868): Ortholog of  Ceres SEQ ID NO 13597678 as cited in SEQ ID NO 65375
  misc_feature (1)..(1868): Ortholog of  Ceres SEQ ID NO 15176787 as cited in SEQ ID NO 66468
  misc_feature (1)..(1868): Ortholog of  Ceres SEQ ID NO 13596180 as cited in SEQ ID NO 67941
  misc_feature (1)..(1868): Ortholog of  Ceres SEQ ID NO 13591190 as cited in SEQ ID NO 68044
  misc_feature (1)..(1868): Ortholog of  Ceres SEQ ID NO 13595961 as cited in SEQ ID NO 68223
gcacgagaccattacctagaacatcctaatcaaaaaatgacactacctgacaaccacaaacgtcgtctccctccatggcactccgccacggcaataattgaagcaacgctgatctgttgcatctccggcgaggcagagcgcagcagctcgtgcatatatctagctaagccaattgcgcaccaccgcgcgcgccaccccaagatccccgtgccttttcagagcatctctccgtcgccgtgacaatgaagcagcagcagaccgtcatcctgtacccgagccctggcgtcggccacatcgtccccatggtgcagctcgccaaggtgtttctgaggcacggctgcgacgtgaccatggtgatcgccgagccagccgccagctcgcccgacttccgcatcgtcgacctcgaccgcgtggctgcctccaaccccgccatcaccttccacgtcctccctccggtcccgtacgccgacctcgccgtccccggcaagcaccatttcctcctcacgctgcaagtgctgcgacggtacaacggcgagctggagaggttcctccgctccgtcccgcgcgagcgcctgcactccctggtggtcggcatgttctgcaccgacgcggtcgacgtcggcgcaaagctgggcgtccccgtgtacacgttcttcgcctcggccgccgctactctggccgtcgtggcccagctgccggcgttgctctccggcaggcgagcgggcctcaaggagctcggggacacgccactccagttcctcggcgtcccgccgttcccagcgtcccatctcgtcagggagctgctggagcacccggacgacgacgagctgtgcaagaccatggtggacgtctggaagcgctgcacggacggcagcggcgtcttggtcaacacgttcgagtcgctggagagcccggccgtgcaggcgctgagggatccccggtgcgtgcccggccgcgtgctgcccccggtctactgcgtggggccgctgatcggtggcgacggcggcacaagagcagcagcggagcaagagcgcgcggcggagacgcggcacgagtgccttgcgtggctcgacgagcagcccgagaacagcgtcgtgttcctctgcttcggaagcagatgcgcgcactcggctgagcagctaaggggcatcgccgtcggccttgagaggtccgggcagcgcttcttgtggtctgtgcggacgccggccggcaccgacggcggttcggagaatctcggcgcgctctttccagaggggttcttgcagcggaccaaggaccggggcctcgtcgtgcggtcatgggcaccgcaggttgaggtgctacggcatccatcgacgggcgcgttcatgacgcactgcggatggaactcgacgctggaagccatcacagcaggggtgccgatgctatgctggccgttctacgcggagcagctgatgaacaaggtgttcgtgaccgagggcatgggcgtcggggtggagatggaggggtacacgacgggcttcatcaaatccgaggaggtggaagccaaggtgaggctggtgatggaatctgaggagggcaggcacctcaggggtcgagcggtagcactcaagaatgaagcacaagcagcgctgcgggatgacggcccatcggagacctcgttcgccaggttcctctttgatgcgaagaatcttcagggacacctcggtcacggatcggagtgaattttctttaattttctattgaggccttgttcgaaatttatattaggaataagatgcaggaagggttcttgaacttggcagtcatttgagtctcagggtcgacaatgtatcaaatacatatgtgttggagacttgttctcaaatgctataagttaagaacaaggc

SEQ ID NO: 19128 - protein, 486 aa, Zea mays subsp. mays
  peptide (1)..(486): Ceres Seq. ID no. 12366478
MKQQQTVILYPSPGVGHIVPMVQLAKVFLRHGCDVTMVIAEPAASSPDFRIVDLDRVAASNPAITFHVLPPVPYADLAVPGKHHFLLTLQVLRRYNGELERFLRSVPRERLHSLVVGMFCTDAVDVGAKLGVPVYTFFASAAATLAVVAQLPALLSGRRAGLKELGDTPLQFLGVPPFPASHLVRELLEHPDDDELCKTMVDVWKRCTDGSGVLVNTFESLESPAVQALRDPRCVPGRVLPPVYCVGPLIGGDGGTRAAAEQERAAETRHECLAWLDEQPENSVVFLCFGSRCAHSAEQLRGIAVGLERSGQRFLWSVRTPAGTDGGSENLGALFPEGFLQRTKDRGLVVRSWAPQVEVLRHPSTGAFMTHCGWNSTLEAITAGVPMLCWPFYAEQLMNKVFVTEGMGVGVEMEGYTTGFIKSEEVEAKVRLVMESEEGRHLRGRAVALKNEAQAALRDDGPSETSFARFLFDAKNLQGHLGHGSE

SEQ ID NO: 19129 - protein, 466 aa, Zea mays subsp. mays
  peptide (1)..(466): Ceres Seq. ID no. 12366479
MVQLAKVFLRHGCDVTMVIAEPAASSPDFRIVDLDRVAASNPAITFHVLPPVPYADLAVPGKHHFLLTLQVLRRYNGELERFLRSVPRERLHSLVVGMFCTDAVDVGAKLGVPVYTFFASAAATLAVVAQLPALLSGRRAGLKELGDTPLQFLGVPPFPASHLVRELLEHPDDDELCKTMVDVWKRCTDGSGVLVNTFESLESPAVQALRDPRCVPGRVLPPVYCVGPLIGGDGGTRAAAEQERAAETRHECLAWLDEQPENSVVFLCFGSRCAHSAEQLRGIAVGLERSGQRFLWSVRTPAGTDGGSENLGALFPEGFLQRTKDRGLVVRSWAPQVEVLRHPSTGAFMTHCGWNSTLEAITAGVPMLCWPFYAEQLMNKVFVTEGMGVGVEMEGYTTGFIKSEEVEAKVRLVMESEEGRHLRGRAVALKNEAQAALRDDGPSETSFARFLFDAKNLQGHLGHGSE

SEQ ID NO: 19130 - protein, 450 aa, Zea mays subsp. mays
  peptide (1)..(450): Ceres Seq. ID no. 12366480
MVIAEPAASSPDFRIVDLDRVAASNPAITFHVLPPVPYADLAVPGKHHFLLTLQVLRRYNGELERFLRSVPRERLHSLVVGMFCTDAVDVGAKLGVPVYTFFASAAATLAVVAQLPALLSGRRAGLKELGDTPLQFLGVPPFPASHLVRELLEHPDDDELCKTMVDVWKRCTDGSGVLVNTFESLESPAVQALRDPRCVPGRVLPPVYCVGPLIGGDGGTRAAAEQERAAETRHECLAWLDEQPENSVVFLCFGSRCAHSAEQLRGIAVGLERSGQRFLWSVRTPAGTDGGSENLGALFPEGFLQRTKDRGLVVRSWAPQVEVLRHPSTGAFMTHCGWNSTLEAITAGVPMLCWPFYAEQLMNKVFVTEGMGVGVEMEGYTTGFIKSEEVEAKVRLVMESEEGRHLRGRAVALKNEAQAALRDDGPSETSFARFLFDAKNLQGHLGHGSE

SEQ ID NO: 19131 - DNA, 1092 bp, Zea mays subsp. mays
  misc_feature (1)..(1092): Ceres Seq. ID no. 12376878
  misc_feature (1)..(1092): Ortholog of  Ceres SEQ ID NO 15169809 as cited in SEQ ID NO 52839
  misc_feature (1)..(1092): Ortholog of  Ceres SEQ ID NO 15224302 as cited in SEQ ID NO 53942
  misc_feature (1)..(1092): Ortholog of  Ceres SEQ ID NO 14306297 as cited in SEQ ID NO 56907
gcacgagaccatttacctagaacatcctaatcaaaaaaatccatcttcagagagagagagagagatagagagagagagagagttggtttgcatggggtgtgtgtcctccaaggagtccagacgacgacctccgggatacgaggatcccaacaccttagctagagagaccacgttttctgtcaacgaagtggaggccctctacgagctgtacaagaggataagctattccataaccaaagacggcctaatccacaaggaggagttccagctcgctctcttccggaacagtaacaagaggaaccttttcgccgatcggatatttgacctgttcgacctgaagcgcaacggagtgattgagttcggggagttcgttcgctccctcgacgttttccacccagctacgcccgtggaagaaaagatcgcctttgcgtttcggctgtacgatctgagaggcactggattcattggacgcgaagagctgaaggaaatggtgctggccattctgaacgaatcagaattacttctttccgacgacgccgtcgaagaaatcgtggatcagactttcaggcaagcggacatgaacggcgacgggaagatagatcctgatgaatggaaggtgttcgcgagcaaaaacccggcacttctaaagaacatgacgctcccatacctcaagtaaaaacccggtacttctaaagaacattaattacccgcaccgcacatgactgggcggcttgatctgacgacgacgtgttgcattttgttgttgttgttgttgttgttgttgttgttgttgttgttgttgttgtgcatcgtcatcttgtacacgtacagggacataaccatggcgttccccagctttgttctcaactctggagccagtgacgacgagttgtagtagctgcgagcatgcatggccaagctgcgagcgaggaaggaacgctgacctcactcctcagttcactaagtttcagacggagcagcagcaggaggacccctcctgaaaggtgatttggaagctggtggttcactcaagctgctaggatcatctgtggaagaacacacatgctccatacttgcccagcccacagcaac

SEQ ID NO: 19132 - protein, 224 aa, Zea mays subsp. mays
  peptide (1)..(224): Ceres Seq. ID no. 12376879
HETIYLEHPNQKNPSSEREREIERERELVCMGCVSSKESRRRPPGYEDPNTLARETTFSVNEVEALYELYKRISYSITKDGLIHKEEFQLALFRNSNKRNLFADRIFDLFDLKRNGVIEFGEFVRSLDVFHPATPVEEKIAFAFRLYDLRGTGFIGREELKEMVLAILNESELLLSDDAVEEIVDQTFRQADMNGDGKIDPDEWKVFASKNPALLKNMTLPYLK

SEQ ID NO: 19133 - protein, 194 aa, Zea mays subsp. mays
  peptide (1)..(194): Ceres Seq. ID no. 12376880
MGCVSSKESRRRPPGYEDPNTLARETTFSVNEVEALYELYKRISYSITKDGLIHKEEFQLALFRNSNKRNLFADRIFDLFDLKRNGVIEFGEFVRSLDVFHPATPVEEKIAFAFRLYDLRGTGFIGREELKEMVLAILNESELLLSDDAVEEIVDQTFRQADMNGDGKIDPDEWKVFASKNPALLKNMTLPYLK

SEQ ID NO: 19134 - DNA, 871 bp, Zea mays subsp. mays
  misc_feature (1)..(871): Ceres Seq. ID no. 12364438
  misc_feature (1)..(871): Ortholog of  Ceres SEQ ID NO 14313014 as cited in SEQ ID NO 54841
  misc_feature (1)..(871): Ortholog of  Ceres SEQ ID NO 13639317 as cited in SEQ ID NO 59781
  misc_feature (1)..(871): Ortholog of  Ceres SEQ ID NO 13654578 as cited in SEQ ID NO 68583
gcacgagaccattacctagaacatcctaatccaaaaactagcaggcatccacttctcacaggcaaagagaagtctcctagcatcaaagcagatttgcagatagaccttctccaagcgatggagactttcacccaggaacatgtcattggaattccattgacttcgtttgcatatgccgatgaggaaagacaaggaaaatcttcctgttctgccatggttcataaaaaaaataagaagagttccttcattcatcggatgaacaaactgagccataaaacagatagctacatgcaaggattcaaagaacacttaaccatgggaccaaaaatttcagaaactataaaagggaaactaagcttcggtgcaaaggttctccaagctggcggtattgataaagtcttcagagaatactttgcagttgagaaagatgagaaactacggaaggctttccagtgctatctttcaaccacagctggtccaatagctggaatgcttttcatctcaactaagaagattgctttccatagtgataggcctttgagtttcacgtctcctaaaggaagcagtacaagggtgccttacaaggtgttgatccccacagagaggatgaaaagtgcttcagtgcgggaaaatttatacaatccagatgagaagtatattgatgtagtcactgttgatggctttgatttttggttcatgggctttgtcagctatgagaagtcattcaaatatctccaacaagtaattatggagctgagatgatgcacacagttttgtaacgtgaaacatcatagataccatgttgatatggtatatgtacattgaagagatagaattgatctatcacattgattgtgaagcaaagtttttc

SEQ ID NO: 19135 - protein, 253 aa, Zea mays subsp. mays
  peptide (1)..(253): Ceres Seq. ID no. 12364439
ARDHYLEHPNPKTSRHPLLTGKEKSPSIKADLQIDLLQAMETFTQEHVIGIPLTSFAYADEERQGKSSCSAMVHKKNKKSSFIHRMNKLSHKTDSYMQGFKEHLTMGPKISETIKGKLSFGAKVLQAGGIDKVFREYFAVEKDEKLRKAFQCYLSTTAGPIAGMLFISTKKIAFHSDRPLSFTSPKGSSTRVPYKVLIPTERMKSASVRENLYNPDEKYIDVVTVDGFDFWFMGFVSYEKSFKYLQQVIMELR

SEQ ID NO: 19136 - protein, 214 aa, Zea mays subsp. mays
  peptide (1)..(214): Ceres Seq. ID no. 12364440
METFTQEHVIGIPLTSFAYADEERQGKSSCSAMVHKKNKKSSFIHRMNKLSHKTDSYMQGFKEHLTMGPKISETIKGKLSFGAKVLQAGGIDKVFREYFAVEKDEKLRKAFQCYLSTTAGPIAGMLFISTKKIAFHSDRPLSFTSPKGSSTRVPYKVLIPTERMKSASVRENLYNPDEKYIDVVTVDGFDFWFMGFVSYEKSFKYLQQVIMELR

SEQ ID NO: 19137 - protein, 182 aa, Zea mays subsp. mays
  peptide (1)..(182): Ceres Seq. ID no. 12364441
MVHKKNKKSSFIHRMNKLSHKTDSYMQGFKEHLTMGPKISETIKGKLSFGAKVLQAGGIDKVFREYFAVEKDEKLRKAFQCYLSTTAGPIAGMLFISTKKIAFHSDRPLSFTSPKGSSTRVPYKVLIPTERMKSASVRENLYNPDEKYIDVVTVDGFDFWFMGFVSYEKSFKYLQQVIMELR

SEQ ID NO: 19138 - DNA, 472 bp, Zea mays subsp. mays
  misc_feature (1)..(472): Ceres Seq. ID no. 1848109
  misc_feature (1)..(472): Ortholog of  Ceres SEQ ID NO 12593170 as cited in SEQ ID NO 63263
  misc_feature (1)..(472): Ortholog of  Ceres SEQ ID NO 14301882 as cited in SEQ ID NO 64381
  misc_feature (1)..(472): Ortholog of  Ceres SEQ ID NO 13597851 as cited in SEQ ID NO 64869
  misc_feature (1)..(472): Ortholog of  Ceres SEQ ID NO 13662420 as cited in SEQ ID NO 68680
catatctggtgttcctggtgcatatgttttgtggtatcgtcctctgtataatgcaatgaggactgatagtgcattgaagtttggattgttcttcttgctttacttgttccatattcttttctgcgtgtttgctgctgtggctcctcctgctgtatttgagggaaaatcattggcaggaattttgccagcaattgatcttatcagcgtaaatgctttggttgggatattctactttgttggatttggattgttttgtctggaatcgttgctcagcatctgggtcatccagcaagtgtacatgtacttccgtggaagtggaaaggctgcagagatgaagcgtgatgcgacaaggggtgcaatgagagccgcattttaagtggtatttttgtgatgatagtccaaagtcccaatcgcatacttccggtggataggttgtgccaacaaacagaggctggcatatgtttcttccttg

SEQ ID NO: 19139 - protein, 124 aa, Zea mays subsp. mays
  peptide (1)..(124): Ceres Seq. ID no. 1848110
ISGVPGAYVLWYRPLYNAMRTDSALKFGLFFLLYLFHILFCVFAAVAPPAVFEGKSLAGILPAIDLISVNALVGIFYFVGFGLFCLESLLSIWVIQQVYMYFRGSGKAAEMKRDATRGAMRAAF

SEQ ID NO: 19140 - protein, 106 aa, Zea mays subsp. mays
  peptide (1)..(106): Ceres Seq. ID no. 1848111
MRTDSALKFGLFFLLYLFHILFCVFAAVAPPAVFEGKSLAGILPAIDLISVNALVGIFYFVGFGLFCLESLLSIWVIQQVYMYFRGSGKAAEMKRDATRGAMRAAF

SEQ ID NO: 19141 - DNA, 1999 bp, Zea mays subsp. mays
  misc_feature (1)..(1999): Ceres Seq. ID no. 12375111
  misc_feature (1)..(1999): Ortholog of  Ceres SEQ ID NO 13623539 as cited in SEQ ID NO 355
gcggcgcggcgagactgctgagcccgaggaaacgggaagagaggagaaaagcaaaacgaagctcggaaccacgagacgacggagaggatgggcttcagcgtcctgctctcaccgccgccccttccgctcccgagcgccaccgctgcggccgacttgtacctaatattcggcggccacgatcgccgccgccgccgcccgctggaacacggctgccgctgcggccgccccccggagacggcgctcggcggcagctcaggccgccgcggctcgtacgatgacgacgggacggctccaggctccctcggcctcgacggcagcagcacgtcctcctcggtccgtcggacggggagtgcaaaaccaagatatcaagtaacttcgaaagaagaggacacacaaaatgcagaccgcgaggggtggcaatatagtacagaaggcctttcaaagagcatgtccaagtcaaggtacatcaaagtatttggggttgatttgtcccctgataatgtggctgttgctattgtttacttcgtgcaaggagttttaggcctttcgaggcttgctgtcagcttctacttaaaagataatcttcatcttgagccagcagagactgcagttatatctgggttctcagccttgccatggttggtcaagcccctctacggttttatcagtgattccatccctctctttggatatcgaagaaggtcgtacctatttctatcaggcatccttggagcactttcatggagtttgatggccgctgttgtggatgataaatatagtgcagcactctctattattcttggatctcttgcagttgccatatctgatgttgtggttgattctatggtggttgagagagctcgaggtgaatcacagagtacatctggatctctccagtcgctatgttggggatcctcagccttcggaggagtcgtgagtgcatacttcagtggttctttagtggatacttatggtgtaagatttgtttttggtgttacagcacttctgccactgatgacatctgctgttgcagttcttgtaaatgaagaacgcttacctttggggaaaagttcagtctcactttcagtttcaggttcagaattaattgagagctctaagcaacgtatcatgcagatttgggattcagtaaagcaacccagcatactcctacccaccttgttcatattcctttggcaagcaacaccgcaatcagactctgccatgtttttcttcataacaaataagctcgggtttactccagaatttctaggacgcgttacgcttgtcacatctgttgcatccttactggaatcggagtgtataatttgtttctgaaggaagttccattgaggaaaatctttcttgtgacaacagtcttaggttctgctctcggaatgacacaggttcttcttgtcactgggctcaaccggaagcttggcataagcgacgaatggttctccattggggattctttgattatcacagtccttggccaggcttcctttatgcctgtcctggtgttggctgcaaagttgtgccctgtgggagcggaagcaactttatttgccactttgatgtccatctctaacgccggaggtgttgccggaggtctggtgggcgcgggtctgacgcagttactgggagtcagcagagacaacttcgaaaaccttgctctgctgatcgcgatttgcaatctcagttccctgctacctctgcctcttctgggtctcctgccagatgaatcccgtaatgcagatggtgcacagaccaaaaatgactgatgcttgtatatctccacgcgtctttacaagacgaaagggcatacacatacactcatcggcacaaagcagcgcagctgatgacgtgaacaaaacatggaagctgatgtataggatgtattatctatgatgtatagtaagtaacgttagattaattatgaaacatatttgtaataaatttaattgaaagtataaatactccttttcataaaacgaggttt

SEQ ID NO: 19142 - protein, 415 aa, Zea mays subsp. mays
  peptide (1)..(415): Ceres Seq. ID no. 12375112
MGFSVLLSPPPLPLPSATAAADLYLIFGGHDRRRRRPLEHGCRCGRPPETALGGSSGRRGSYDDDGTAPGSLGLDGSSTSSSVRRTGSAKPRYQVTSKEEDTQNADREGWQYSTEGLSKSMSKSRYIKVFGVDLSPDNVAVAIVYFVQGVLGLSRLAVSFYLKDNLHLEPAETAVISGFSALPWLVKPLYGFISDSIPLFGYRRRSYLFLSGILGALSWSLMAAVVDDKYSAALSIILGSLAVAISDVVVDSMVVERARGESQSTSGSLQSLCWGSSAFGGVVSAYFSGSLVDTYGVRFVFGVTALLPLMTSAVAVLVNEERLPLGKSSVSLSVSGSELIESSKQRIMQIWDSVKQPSILLPTLFIFLWQATPQSDSAMFFFITNKLGFTPEFLGRVTLVTSVASLLESECIICF

SEQ ID NO: 19143 - protein, 295 aa, Zea mays subsp. mays
  peptide (1)..(295): Ceres Seq. ID no. 12375113
MSKSRYIKVFGVDLSPDNVAVAIVYFVQGVLGLSRLAVSFYLKDNLHLEPAETAVISGFSALPWLVKPLYGFISDSIPLFGYRRRSYLFLSGILGALSWSLMAAVVDDKYSAALSIILGSLAVAISDVVVDSMVVERARGESQSTSGSLQSLCWGSSAFGGVVSAYFSGSLVDTYGVRFVFGVTALLPLMTSAVAVLVNEERLPLGKSSVSLSVSGSELIESSKQRIMQIWDSVKQPSILLPTLFIFLWQATPQSDSAMFFFITNKLGFTPEFLGRVTLVTSVASLLESECIICF

SEQ ID NO: 19144 - DNA, 1721 bp, Zea mays subsp. mays
  misc_feature (1)..(1721): Ceres Seq. ID no. 12435567
  misc_feature (1)..(1721): Ortholog of  Ceres SEQ ID NO 14314755 as cited in SEQ ID NO 59919
  misc_feature (1)..(1721): Ortholog of  Ceres SEQ ID NO 12617417 as cited in SEQ ID NO 65089
gcacgagaccattacctagaacatcctaatcgaaaaagtgccatggctgaagcagcgccccacttcgtgctcgtgccgatgctggcgcagggccacttgctccccatgctggacctggcgcgcgtcctcgccagccacggcgcccgtgccacggtggtgctgacgcccgtcaacgccgcgcgcaacagggccttcctggagcaggccgcgggggcggggctcaccatcaacttcgccgagctcgcgttcccggggccagcgctcggcctcgccgcgggctgcgagagggtcgacatgctgcaagacctctccctcatcgtcccgttctacgatgccgtgtggctgctcgccgagccgctcgaggcgtacctcctctcgctgccccggatgccggactgcctcgtctccgactcgttcatggcgtggactgccagcgtcgcgcggcggcacggcatccttcggttcgtggtccacttctcgcccgcgtcctacgtcctcgccgcgcacatcctcgaaacgcgcggcgtctacgaccgcgccgccgacgacttcgaaccgttcgaggtgccggagttccccgtacgcgccgtggtgagcagggctacggcgcaaggggtcttccagtggcctgcaggcatggagaggttccggcgcgacacgctcgatgccgaggccaccgccgacgggatactgttcaacacgtgtgctgccctggaggacgcgttcgtggagcgcttcgcttcggaggtcggcaagaagatttgggcggtcgggccgctgttcctcctcggttccggttccgacgccggcgggatggccgggagaggcaaccgcgcggcggtggacgccgaccaaatcgtgtcctggcttgacgcgcgtccggcggcgtccgtgctctacatcagcttcggcagcatcggccgtctgttcccggctcaggccgccgagctcgccgccggactggaggcgtcgcgcctgccgttcatctggtcggccaaggagacggcgcccggcctcgacgcgggaattcgaggagcgcgtgaaggaccggggcctcgtcgtccacgggtgggcgccccagatgaccatcctgtcgcaccctgccgtgggcggcttcctgacgcactgcggctggaactccatcctggagagcctctgctacggcgtgccgctcatgacctggccgctgttcgtcgaccagttcctgaacgaggcgttggtcgtggacgtgctcggcgccggcgtccgctccggcgccaaggtgccggtgacgcacgtgacggtcgtgaagccaggggaggtgctggaagtgcaggtctggagggacggcgtcgagagggcggtcaccgacctcatggacgagggccccgcgggcgcggcgaggcgggcgagggccaaggagctcgggcaacagatgagggccgcaatggcgaagggtgggtcgtcggacaccgatgtgaggaacttggttcgccacgtcgttgaggtcgcgcggaaaaaggaggagcacgaggacacggctcttgctggaggtgaccaagtgatcacgagcaaggaaaagacgatgaacggcgccggtggaaaacactactgatgaaattcgtgtggtacggtcgtttttggctgaaagaatctctcgagttaagctagctactagccacgcaacccaacttgcatgtaccagcagcaatgacatattatgttatcgtgctttttgtgcg

SEQ ID NO: 19145 - protein, 494 aa, Zea mays subsp. mays
  peptide (1)..(494): Ceres Seq. ID no. 12435568
ARDHYLEHPNRKSAMAEAAPHFVLVPMLAQGHLLPMLDLARVLASHGARATVVLTPVNAARNRAFLEQAAGAGLTINFAELAFPGPALGLAAGCERVDMLQDLSLIVPFYDAVWLLAEPLEAYLLSLPRMPDCLVSDSFMAWTASVARRHGILRFVVHFSPASYVLAAHILETRGVYDRAADDFEPFEVPEFPVRAVVSRATAQGVFQWPAGMERFRRDTLDAEATADGILFNTCAALEDAFVERFASEVGKKIWAVGPLFLLGSGSDAGGMAGRGNRAAVDADQIVSWLDARPAASVLYISFGSIGRLFPAQAAELAAGLEASRLPFIWSAKETAPGLDAGIRGAREGPGPRRPRVGAPDDHPVAPCRGRLPDALRLELHPGEPLLRRAAHDLAAVRRPVPERGVGRGRARRRRPLRRQGAGDARDGREARGGAGSAGLEGRRREGGHRPHGRGPRGRGEAGEGQGARATDEGRNGEGWVVGHRCEELGSPRR

SEQ ID NO: 19146 - protein, 480 aa, Zea mays subsp. mays
  peptide (1)..(480): Ceres Seq. ID no. 12435569
MAEAAPHFVLVPMLAQGHLLPMLDLARVLASHGARATVVLTPVNAARNRAFLEQAAGAGLTINFAELAFPGPALGLAAGCERVDMLQDLSLIVPFYDAVWLLAEPLEAYLLSLPRMPDCLVSDSFMAWTASVARRHGILRFVVHFSPASYVLAAHILETRGVYDRAADDFEPFEVPEFPVRAVVSRATAQGVFQWPAGMERFRRDTLDAEATADGILFNTCAALEDAFVERFASEVGKKIWAVGPLFLLGSGSDAGGMAGRGNRAAVDADQIVSWLDARPAASVLYISFGSIGRLFPAQAAELAAGLEASRLPFIWSAKETAPGLDAGIRGAREGPGPRRPRVGAPDDHPVAPCRGRLPDALRLELHPGEPLLRRAAHDLAAVRRPVPERGVGRGRARRRRPLRRQGAGDARDGREARGGAGSAGLEGRRREGGHRPHGRGPRGRGEAGEGQGARATDEGRNGEGWVVGHRCEELGSPRR

SEQ ID NO: 19147 - protein, 468 aa, Zea mays subsp. mays
  peptide (1)..(468): Ceres Seq. ID no. 12435570
MLAQGHLLPMLDLARVLASHGARATVVLTPVNAARNRAFLEQAAGAGLTINFAELAFPGPALGLAAGCERVDMLQDLSLIVPFYDAVWLLAEPLEAYLLSLPRMPDCLVSDSFMAWTASVARRHGILRFVVHFSPASYVLAAHILETRGVYDRAADDFEPFEVPEFPVRAVVSRATAQGVFQWPAGMERFRRDTLDAEATADGILFNTCAALEDAFVERFASEVGKKIWAVGPLFLLGSGSDAGGMAGRGNRAAVDADQIVSWLDARPAASVLYISFGSIGRLFPAQAAELAAGLEASRLPFIWSAKETAPGLDAGIRGAREGPGPRRPRVGAPDDHPVAPCRGRLPDALRLELHPGEPLLRRAAHDLAAVRRPVPERGVGRGRARRRRPLRRQGAGDARDGREARGGAGSAGLEGRRREGGHRPHGRGPRGRGEAGEGQGARATDEGRNGEGWVVGHRCEELGSPRR

SEQ ID NO: 19148 - DNA, 1330 bp, Zea mays subsp. mays
  misc_feature (1)..(1330): Ceres Seq. ID no. 12383496
  misc_feature (1)..(1330): Ortholog of  Ceres SEQ ID NO 12613725 as cited in SEQ ID NO 68196
gaattttcgatagtataaacttccactccaaatttaagttcaactgacaccgtttgcagcttctttgaccgcgcggcgatcgtcaccgacggcgacctggtcacgctgacggacgcggactccggcaagccgtcgacggcccccgtcccggacctgtggcgcctgagcaccgtgcaccgcgtggaggagctcaagtcggtgatccgcatgggtcctatctgggcggcgggcatcctggtgatcacggggtcgtcgacgcagaacaccttctctctgcagcaggcgagcaccatggaccgccgcctcgcgccgggcctctccacgttcgagatccccgcggggtccatgaccgtcttcgggctgctggccatgctcttcaccctcttcgtctacgaccgcgcgctcatccgcgtggcgcgccgcttcacggggctggaccgcggcatctccttcctgcaccgcatgggcgtcggcttcgccatcagcgtgctcgccaccctggtcgccggcttcgtggagcggcaccgcagggacgcggcggcggcggccggcgccacggacgccggcacgtccccgctgtcggcctactggctggtgccgcagtacgcgctgcatggcgtggccgaggcgttcacctccgtggggcacctcgagttcatgtacgaccaggcgcccgagagcatgcgcagcacggcgacggcgctcttctggctgtccatctcgctgggaagctacgcgagcacctgctggtggacgctgtgcaccgctggagcgcggggcccggcggcgccaactggctgccggacaacatcaatcacggcaggctggattacttttactgggtcgtcacggtactgcaggtcatgaacctggtgtactacgccatttgcgccaagcggttcacgttcaagccagtgcagctcaacaagaaagaggaggaagaaggcggcaaggtacttgtggagttgcaaganaaggtttaatttgagcagcatgcactttcagctatgtgcaggtacatgtctaatagaaaggaagtactcatcagtgctaggaagatcctcagaaaaactcccaaggtattactatataaatctatgtgagcatctgtattagtcaagtagatcaagaatgcaggaaggttgttcaggcaagcaacctcagaaattgtcaaggatcacatgacagctttgtggatggcagaagctatctggtctggtcctgagacttggcacaggtgcaaaacacaactcgactatatttgtaattagaaagcaggcacgaggcacatgtctgaactctgaaacttgacgttaatgcatagtactgt

SEQ ID NO: 19149 - protein, 219 aa, Zea mays subsp. mays
  peptide (1)..(219): Ceres Seq. ID no. 12383497
MGPIWAAGILVITGSSTQNTFSLQQASTMDRRLAPGLSTFEIPAGSMTVFGLLAMLFTLFVYDRALIRVARRFTGLDRGISFLHRMGVGFAISVLATLVAGFVERHRRDAAAAAGATDAGTSPLSAYWLVPQYALHGVAEAFTSVGHLEFMYDQAPESMRSTATALFWLSISLGSYASTCWWTLCTAGARGPAAPTGCRTTSITAGWITFTGSSRYCRS

SEQ ID NO: 19150 - protein, 191 aa, Zea mays subsp. mays
  peptide (1)..(191): Ceres Seq. ID no. 12383498
MDRRLAPGLSTFEIPAGSMTVFGLLAMLFTLFVYDRALIRVARRFTGLDRGISFLHRMGVGFAISVLATLVAGFVERHRRDAAAAAGATDAGTSPLSAYWLVPQYALHGVAEAFTSVGHLEFMYDQAPESMRSTATALFWLSISLGSYASTCWWTLCTAGARGPAAPTGCRTTSITAGWITFTGSSRYCRS

SEQ ID NO: 19151 - protein, 173 aa, Zea mays subsp. mays
  peptide (1)..(173): Ceres Seq. ID no. 12383499
MTVFGLLAMLFTLFVYDRALIRVARRFTGLDRGISFLHRMGVGFAISVLATLVAGFVERHRRDAAAAAGATDAGTSPLSAYWLVPQYALHGVAEAFTSVGHLEFMYDQAPESMRSTATALFWLSISLGSYASTCWWTLCTAGARGPAAPTGCRTTSITAGWITFTGSSRYCRS

SEQ ID NO: 19152 - DNA, 2345 bp, Zea mays subsp. mays
  misc_feature (1)..(2345): Ceres Seq. ID no. 13637382
  misc_feature (1)..(2345): Ortholog of  Ceres SEQ ID NO 14303276 as cited in SEQ ID NO 1264
  misc_feature (1)..(2345): Ortholog of  Ceres SEQ ID NO 15170536 as cited in SEQ ID NO 52791
  misc_feature (1)..(2345): Ortholog of  Ceres SEQ ID NO 12465083 as cited in SEQ ID NO 68239
  misc_feature (1)..(2345): Ortholog of  Ceres SEQ ID NO 14309653 as cited in SEQ ID NO 0
atcagacagacgcagactctctcacccgactcgtcagacgtcagccagcagttcgaaaccaaggatcgatccaggagcttccggaaggcgaggcgcgcgcgcagcgtcgaggtgctggtgccggtgccgcccatggatcgggctcgcggatccgcgttcctgctcggcgtcctgctcgcaggatccttgttcgcgttttcagttgccatagaggagaccaagaagctcgggaccgtgatcggtatcgatctcggtaccacctactcctgtgtcggtgtgtacaagaacggtcatgtcgagatcatcgccaatgaccagggtaaccgtatcacaccctcatgggttgccttcaccgatagcgagaggctcatcgggtgaggctgccaagaaccaggcagccgtcaaccctgagaggaccatctttgacgtcaagcgtctcatcggaagaaagttcgcggacaaggaagtccagagggacatgaaacttgttccctacaagattattaacaaggatggcaagccctacattcaggtcaagatcaaggatggggagaacaaggtcttcagccctgaggagatcagtgccatgattcttggcaagatgaaggatactgctgaggcataccttggcaagaagatcaatgatgctgtcgtcactgtccctgcgtacttcaatgatgcgcagaggcaggcaaccaaggatgctggtgtcattgctggcctcaatgttgctaggatcatcaatgagccaactgctgctgctattgcctatggtttggacaagaagggtggcgagaagaacatccttgtctttgaccttggtggtggcacttttgatgtcagtatcttgaccattgacaacggtgtgtttgaggtgctggccaccaatggtgacactcatcttggaggtgaggactttgaccagaggatcatggagtacttcatcaagttgatcaagaagaagtacagcaaggacatcagcaaggacaaccgtgctcttggaaagctgaggagggaagccgagcgcgccaagagagccctcagcaaccagcaccaggtccgtgttgagatcgagtccctctttgacgggaccgatttctcggagccgctgacccgtgccaggtttgaggagctgaacaacgacctcttccgcaagaccatgggccctgtcaagaaggccatggaggatgctggccttgagaagagccagatccacgagatcgtcctggttggtggaagcaccaggattcccaaggtccagcagctcctgcgggactacttcgacggcaaggagcccaacaagggtgtcaaccctgatgaggctgttgcctttggtgccgctgtgcagggaagcatcttgagcggcgagggtggtgacgagaccaaagatatcctcctccttgatgtggctcccctcaccctgggtatcgagaccgtcggtggagtcatgaccaagttgatcccgaggaacactgtcatcccgaccaagaagtcgcaggtgttcaccacctaccaggaccagcagaccactgtctccatccaggtctttgagggtgagcgcagtatgaccaaggactgccgtcttctcggcaagttcgacctcaacggcattgcgccagctccaaggggcacaccccagatcgaggtgaccttcgaggtggacgccaacggtatcctgaacgtgaaggcggaggacaagggcacgggcaagtcggagaagatcacgatcacgaacgagaaggggcggctgagccaggaggagatcgaccgcatggtgcgggaggcggaggagttcgcggaggaggacaagaaggtgaaggagcggatcgacgcccgcaaccagctggagacgtacgtgtacaacatgaagaacacggtgggcgacaaggacaagctcgcggacaagctggaggcggaggagaaggagaaggtggaggaggccctcaaggaggcgctggagtggctggacgacaaccagtcggccgagaaggaggactacgaggagaagctcaaggaggtggaggccgtgtgcaaccccatcgtgtcggccgtgtaccagcggtcgggcggcgcccctggcggtgacgctgacggcggtgttgacgacgaccacgacgagctgtagatggttgtagatggtggtggtgacgtggagtgccgggagccgagccaaattttgtaacggtgtttagcggcggacaatacttattactaatcttggtgctgctctgccaatagccgtgctgagcgtagaaactgtttgtttgtaatttttttttcttctacttccttggttgttcaggattcggattcgaattttatgtgaaaaaagaagtcgcgctttt

SEQ ID NO: 19153 - protein, 610 aa, Zea mays subsp. mays
  peptide (1)..(610): Ceres Seq. ID no. 13637383
MSRSSPMTRVTVSHPHGLPSPIARGSSGEAAKNQAAVNPERTIFDVKRLIGRKFADKEVQRDMKLVPYKIINKDGKPYIQVKIKDGENKVFSPEEISAMILGKMKDTAEAYLGKKINDAVVTVPAYFNDAQRQATKDAGVIAGLNVARIINEPTAAAIAYGLDKKGGEKNILVFDLGGGTFDVSILTIDNGVFEVLATNGDTHLGGEDFDQRIMEYFIKLIKKKYSKDISKDNRALGKLRREAERAKRALSNQHQVRVEIESLFDGTDFSEPLTRARFEELNNDLFRKTMGPVKKAMEDAGLEKSQIHEIVLVGGSTRIPKVQQLLRDYFDGKEPNKGVNPDEAVAFGAAVQGSILSGEGGDETKDILLLDVAPLTLGIETVGGVMTKLIPRNTVIPTKKSQVFTTYQDQQTTVSIQVFEGERSMTKDCRLLGKFDLNGIAPAPRGTPQIEVTFEVDANGILNVKAEDKGTGKSEKITITNEKGRLSQEEIDRMVREAEEFAEEDKKVKERIDARNQLETYVYNMKNTVGDKDKLADKLEAEEKEKVEEALKEALEWLDDNQSAEKEDYEEKLKEVEAVCNPIVSAVYQRSGGAPGGDADGGVDDDHDEL

SEQ ID NO: 19154 - protein, 604 aa, Zea mays subsp. mays
  peptide (1)..(604): Ceres Seq. ID no. 13637384
MTRVTVSHPHGLPSPIARGSSGEAAKNQAAVNPERTIFDVKRLIGRKFADKEVQRDMKLVPYKIINKDGKPYIQVKIKDGENKVFSPEEISAMILGKMKDTAEAYLGKKINDAVVTVPAYFNDAQRQATKDAGVIAGLNVARIINEPTAAAIAYGLDKKGGEKNILVFDLGGGTFDVSILTIDNGVFEVLATNGDTHLGGEDFDQRIMEYFIKLIKKKYSKDISKDNRALGKLRREAERAKRALSNQHQVRVEIESLFDGTDFSEPLTRARFEELNNDLFRKTMGPVKKAMEDAGLEKSQIHEIVLVGGSTRIPKVQQLLRDYFDGKEPNKGVNPDEAVAFGAAVQGSILSGEGGDETKDILLLDVAPLTLGIETVGGVMTKLIPRNTVIPTKKSQVFTTYQDQQTTVSIQVFEGERSMTKDCRLLGKFDLNGIAPAPRGTPQIEVTFEVDANGILNVKAEDKGTGKSEKITITNEKGRLSQEEIDRMVREAEEFAEEDKKVKERIDARNQLETYVYNMKNTVGDKDKLADKLEAEEKEKVEEALKEALEWLDDNQSAEKEDYEEKLKEVEAVCNPIVSAVYQRSGGAPGGDADGGVDDDHDEL

SEQ ID NO: 19155 - protein, 548 aa, Zea mays subsp. mays
  peptide (1)..(548): Ceres Seq. ID no. 13637385
MKLVPYKIINKDGKPYIQVKIKDGENKVFSPEEISAMILGKMKDTAEAYLGKKINDAVVTVPAYFNDAQRQATKDAGVIAGLNVARIINEPTAAAIAYGLDKKGGEKNILVFDLGGGTFDVSILTIDNGVFEVLATNGDTHLGGEDFDQRIMEYFIKLIKKKYSKDISKDNRALGKLRREAERAKRALSNQHQVRVEIESLFDGTDFSEPLTRARFEELNNDLFRKTMGPVKKAMEDAGLEKSQIHEIVLVGGSTRIPKVQQLLRDYFDGKEPNKGVNPDEAVAFGAAVQGSILSGEGGDETKDILLLDVAPLTLGIETVGGVMTKLIPRNTVIPTKKSQVFTTYQDQQTTVSIQVFEGERSMTKDCRLLGKFDLNGIAPAPRGTPQIEVTFEVDANGILNVKAEDKGTGKSEKITITNEKGRLSQEEIDRMVREAEEFAEEDKKVKERIDARNQLETYVYNMKNTVGDKDKLADKLEAEEKEKVEEALKEALEWLDDNQSAEKEDYEEKLKEVEAVCNPIVSAVYQRSGGAPGGDADGGVDDDHDEL

SEQ ID NO: 19156 - DNA, 1674 bp, Zea mays subsp. mays; identical to SEQ ID NO: 10039
  misc_feature (1)..(1674): Ceres Seq. ID no. 12405979
  misc_feature (1)..(1674): Ortholog of  Ceres SEQ ID NO 14302836 as cited in SEQ ID NO 65013

SEQ ID NO: 19157 - protein, 264 aa, Zea mays subsp. mays; identical to SEQ ID NO: 10040
  peptide (1)..(264): Ceres Seq. ID no. 12405980
  misc_feature (149)..(149): Xaa is any aa, unknown or other

SEQ ID NO: 19158 - protein, 260 aa, Zea mays subsp. mays; identical to SEQ ID NO: 10041
  peptide (1)..(260): Ceres Seq. ID no. 12405981
  misc_feature (145)..(145): Xaa is any aa, unknown or other

SEQ ID NO: 19159 - protein, 259 aa, Zea mays subsp. mays; identical to SEQ ID NO: 10042
  peptide (1)..(259): Ceres Seq. ID no. 12405982
  misc_feature (144)..(144): Xaa is any aa, unknown or other

SEQ ID NO: 19160 - DNA, 1914 bp, Zea mays subsp. mays
  misc_feature (1)..(1914): Ceres Seq. ID no. 12419897
  misc_feature (1)..(1914): Ortholog of  Ceres SEQ ID NO 14313743 as cited in SEQ ID NO 59555
gcacgagaccattacctagaacatcctaatcaaaaaagttcttctgatctctgacttctgagcgaggagtggacgagtggtgtgccgtcgtccggttcccgttggtttggcgatgaggcgcgctcgcggtcgccgcgggctgctgcttctcctcggcgtggcgctctcggcggctgcgctgctccgtggctgcgcggggcagcaaggggaggacggctcggacgcccctgcggcggcggcggcggagacggcccccatggaggagaaggagcgcagggcgctgtacgccgccatcgagagcttcgtcggcaaggggtggaacggctccggggctctaccccagacccctgcggctggtctccccatccagggggtgtcatgtgatctcttcaatggcctgtggtacccaacagtgatgagcattggcccagtccttgacaactcgctgcagtgcggccccgacgccaagttcagcgcccagctgttcgacctgaggcgcctccggacgctgtctttctacagctgcttcccggcgagcaaccccacggccatcccgaccggcagctgggagaagctggcggggacgctggagacgctggagttccgcaccaacccgggcctgaacggcgccatcccggcgtccctcggccgcctggccagcctgcagtcgctggtgctcgtggagaacaacctgacggggcccgtgcccgcggagctgggcgcgctgtcgaggctgagacggctggtgctgtccgggaacgggctgtcggggccgatcccggtgacactcggtggcctcacggggctcctgaagatggacctgagcagcaacctgctgcagggcagcatcccgccggagctcgcggggctcaggagcctcacgctgctggacctcaggaacaacagcctcaccggcgggctgcccccagttcgtgcagggcatggcgtcgctgcaggacctgctgctctcgaacaacccgctgggcggcggcctgccgcagtccggctggggggcgctggcgggcctggccacgctggacctgtccaacgtcggcctcgtgggcgccataccggggtccatggcggccctgacggggctccggttcctggcgctggaccacaaccgcctgacgggggccgtgccgcccgagctcgcccggctgcccagcatcggcgcgctgtacctgaacggcaacaacctgacggggacgctggagttctcggccgggttctaccagcgcatggggcggcggttcgcgtcgtgggacaaccccgggctgtgctacaacgtcgcggccgtggacgcggcccacgcgccgtcgggcgtggtggtgtgcaaggacctgcaggagcccagcgtgggcggcggcgcgcgggacggggacggggacggggacgcggaggaggacgggacgaagcccgaggcgggctccatcctcgtggcctcctcgtcgtccggcatgccggttggcagtgtcggtgggctcgggtacctggtggtggttcggggaatggcggctgcggttcttgggttggtgtccctcctacaatagcaagcaagcaggttcagaagaagaacacggagaaacttgaagtaatgctaggtaggttagcacgaagtagtttctgcgcgttctctgtgatcttttggcatttgtttttggctgctggtggcttaccatcgtcagatggtgacggaggaaggagggaacatggatctggatggtgtgagccacagattacattacagtagtagagtaaactatgagagttcttgtggactgaaggtgtgtagtggtggatagggtagcttctccggggttcttttgtgtgtaattagcctgtgtcgccctgtggtgtcatgttacaacagcaagtggaaatctaagctggttcgtccgttgttggagaatc

SEQ ID NO: 19161 - protein, 546 aa, Zea mays subsp. mays
  peptide (1)..(546): Ceres Seq. ID no. 12419898
MRRARGRRGLLLLLGVALSAAALLRGCAGQQGEDGSDAPAAAAAETAPMEEKERRALYAAIESFVGKGWNGSGALPQTPAAGLPIQGVSCDLFNGLWYPTVMSIGPVLDNSLQCGPDAKFSAQLFDLRRLRTLSFYSCFPASNPTAIPTGSWEKLAGTLETLEFRTNPGLNGAIPASLGRLASLQSLVLVENNLTGPVPAELGALSRLRRLVLSGNGLSGPIPVTLGGLTGLLKMDLSSNLLQGSIPPELAGLRSLTLLDLRNNSLTGGLPPVRAGHGVAAGPAALEQPAGRRPAAVRLGGAGGPGHAGPVQRRPRGRHTGVHGGPDGAPVPGAGPQPPDGGRAARARPAAQHRRAVPERQQPDGDAGVLGRVLPAHGAAVRVVGQPRAVLQRRGRGRGPRAVGRGGVQGPAGAQRGRRRAGRGRGRGRGGGRDEARGGLHPRGLLVVRHAGWQCRWARVPGGGSGNGGCGSWVGVPPTIASKQVQKKNTEKLEVMLGRLARSSFCAFSVIFWHLFLAAGGLPSSDGDGGRREHGSGWCEPQITLQ

SEQ ID NO: 19162 - protein, 498 aa, Zea mays subsp. mays
  peptide (1)..(498): Ceres Seq. ID no. 12419899
MEEKERRALYAAIESFVGKGWNGSGALPQTPAAGLPIQGVSCDLFNGLWYPTVMSIGPVLDNSLQCGPDAKFSAQLFDLRRLRTLSFYSCFPASNPTAIPTGSWEKLAGTLETLEFRTNPGLNGAIPASLGRLASLQSLVLVENNLTGPVPAELGALSRLRRLVLSGNGLSGPIPVTLGGLTGLLKMDLSSNLLQGSIPPELAGLRSLTLLDLRNNSLTGGLPPVRAGHGVAAGPAALEQPAGRRPAAVRLGGAGGPGHAGPVQRRPRGRHTGVHGGPDGAPVPGAGPQPPDGGRAARARPAAQHRRAVPERQQPDGDAGVLGRVLPAHGAAVRVVGQPRAVLQRRGRGRGPRAVGRGGVQGPAGAQRGRRRAGRGRGRGRGGGRDEARGGLHPRGLLVVRHAGWQCRWARVPGGGSGNGGCGSWVGVPPTIASKQVQKKNTEKLEVMLGRLARSSFCAFSVIFWHLFLAAGGLPSSDGDGGRREHGSGWCEPQITLQ

SEQ ID NO: 19163 - protein, 445 aa, Zea mays subsp. mays
  peptide (1)..(445): Ceres Seq. ID no. 12419900
MSIGPVLDNSLQCGPDAKFSAQLFDLRRLRTLSFYSCFPASNPTAIPTGSWEKLAGTLETLEFRTNPGLNGAIPASLGRLASLQSLVLVENNLTGPVPAELGALSRLRRLVLSGNGLSGPIPVTLGGLTGLLKMDLSSNLLQGSIPPELAGLRSLTLLDLRNNSLTGGLPPVRAGHGVAAGPAALEQPAGRRPAAVRLGGAGGPGHAGPVQRRPRGRHTGVHGGPDGAPVPGAGPQPPDGGRAARARPAAQHRRAVPERQQPDGDAGVLGRVLPAHGAAVRVVGQPRAVLQRRGRGRGPRAVGRGGVQGPAGAQRGRRRAGRGRGRGRGGGRDEARGGLHPRGLLVVRHAGWQCRWARVPGGGSGNGGCGSWVGVPPTIASKQVQKKNTEKLEVMLGRLARSSFCAFSVIFWHLFLAAGGLPSSDGDGGRREHGSGWCEPQITLQ

SEQ ID NO: 19164 - DNA, 2516 bp, Zea mays subsp. mays
  misc_feature (1)..(2516): Ceres Seq. ID no. 12419327
  misc_feature (1)..(2516): Ortholog of  Ceres SEQ ID NO 15226209 as cited in SEQ ID NO 0
gcacgagaccattacctagaacatcctaatcgaaaagtactcccgtgcgctagtgcgctcggcgctgcccccgtccgcccgcagtccgtccccgctcgccgcccatgcgctcgccggccgcccctcggcgctcccccatctcctcccgctccgcccccgccctccgtctggtagtccgtcgccgctcctcccgcacgccagcacgacctagtagacggctcgaagcgaagacggtcccatttccagtctccgtggtcaagatggatttagaggtatccgagggttcaggtactaatgccacctcggatgaccaatcggtgcaaacgctgcctagaagggcaaagcttttggagtattttcaaccggagttagttgaggtcaatggcgtgatgaaggctatttgcaaatattgcggggcgatgttgaggagttcaagcacaaatagccttagaaaccacgttgcggatacatgtcctaaaatttcagttgaggaccgcaagcaattcattgctacaatggaaaaaggaccagcggaagcttcatttgtgtttgactctcaaaaggctcgtgagtgtatggttaagtggtgcatcagtgccgaggtcgcattcaacaagtttgacgatcctttctttgctcagtggatggagtcaatgcagccatcattcagcggtgttgggcgtcaaacaatgcaaaatgattgtattaccagattcaagatgatgaggcaagagctaagaaatgagctacaaagtcttaactctcggatttgcttgacaactaatctttggacctcaaatcagaagttgggttatctttgcttgacagcccactacattaatgcagactttatcttgaaaaaaaagattattgcgttcaaatatttgaaatatccacatacaggcctagcaatcaaagaaggaattacagagtgtctcaaagagtgggggataaaagagaagatgtttactatcacattagataatgtttctaacaatctgtcagtgcgtgaccttcgagaaagtgggctatttggaggcgatcttcgtattgtccaatgttgtgcacacatattgattctcttagttcaagatggaatggcaattgctcatggagcaatctataagattcgtgagctggtcagacatatcaattcctcaccctcccgcatacaagcttttaatgggattgctgagaggtcttgattgccttcaaaggatagattaattcttgacgttccaaaccgttggaattcgacacacgacatgattatggaggccattgagtacaaggttgtcttgaaaagatatgctgaagaacaacttgagccttcaccaaatgatgaagagtggacaaattctgaggcaattggagagtttcttgaggcatttgagaaagctacaaaagcattctcgacacatagaagtccaacatctcatttgtttttacataatgtgctatgtatccatcgaactctgagaaatacaaattggcaaatcaattgtgtgcttaaggattcggcacgggcgatggatgctaagttcgataaatactgggagaagggcaagtataacatgacacttgtcttagccaccatacttgatccatcaaagaagatggattttttggacttcttttatgagaagatgtctcaatattttgttgacatccagataaacgtggtcttggttaaacaatgtctcaccaaattatttgaaaaatatgcaacacttgttcaaatagataataaaagttcaccttttattgatataaggactagtaatttaggctcaacagttcttggaaaaagaaggttggatgaagaattttctcaatggtcccaaataagaggaagacgttttccaaagtctgagcttgacacatacttagaggaagaacttgtgagaatagatgaaagatttgaaattctaaattggtggaggacaaatgcaaacaaatacccggtgctttcagctatggcgcgtgatattttagcaatacctttgagcactgttccttcggagtttgcgttcagcgctggtggtcgtattcttgatgataatcgaagcacaatgacaccagaaacacttgaatgctttgtatgctgtaaggattggttatatgaatacccaaatattcaagcttagttgatctgacttccttcaaacatgttgaacagtacggcattcaagggagatttatgcatcattctgcgggctcctgtagctgcttagggatgacccttccactgctgctcgcttcaagcttgatcagatactctttctactgatacgcaaggtgtaaaactgccgtgttatgtggtagattggtgtgtgtactgttttctttatgtgtaaaactgtctgcttgatcaggggtgagtattgttttctttatcactctggattcatggtaatgagttcctatttcagtatttcttgccaaaaagattgttgtgcattaaggatatttgacagatgttctttgttatttctctcaagacctgaaagtttatc

SEQ ID NO: 19165 - protein, 366 aa, Zea mays subsp. mays
  peptide (1)..(366): Ceres Seq. ID no. 12419328
MRSPAAPRRSPISSRSAPALRLVVRRRSSRTPARPSRRLEAKTVPFPVSVVKMDLEVSEGSGTNATSDDQSVQTLPRRAKLLEYFQPELVEVNGVMKAICKYCGAMLRSSSTNSLRNHVADTCPKISVEDRKQFIATMEKGPAEASFVFDSQKARECMVKWCISAEVAFNKFDDPFFAQWMESMQPSFSGVGRQTMQNDCITRFKMMRQELRNELQSLNSRICLTTNLWTSNQKLGYLCLTAHYINADFILKKKIIAFKYLKYPHTGLAIKEGITECLKEWGIKEKMFTITLDNVSNNLSVRDLRESGLFGGDLRIVQCCAHILILLVQDGMAIAHGAIYKIRELVRHINSSPSRIQAFNGIAERS

SEQ ID NO: 19166 - protein, 314 aa, Zea mays subsp. mays
  peptide (1)..(314): Ceres Seq. ID no. 12419329
MDLEVSEGSGTNATSDDQSVQTLPRRAKLLEYFQPELVEVNGVMKAICKYCGAMLRSSSTNSLRNHVADTCPKISVEDRKQFIATMEKGPAEASFVFDSQKARECMVKWCISAEVAFNKFDDPFFAQWMESMQPSFSGVGRQTMQNDCITRFKMMRQELRNELQSLNSRICLTTNLWTSNQKLGYLCLTAHYINADFILKKKIIAFKYLKYPHTGLAIKEGITECLKEWGIKEKMFTITLDNVSNNLSVRDLRESGLFGGDLRIVQCCAHILILLVQDGMAIAHGAIYKIRELVRHINSSPSRIQAFNGIAERS

SEQ ID NO: 19167 - protein, 293 aa, Zea mays subsp. mays
  peptide (1)..(293): Ceres Seq. ID no. 12419330
MIMEAIEYKVVLKRYAEEQLEPSPNDEEWTNSEAIGEFLEAFEKATKAFSTHRSPTSHLFLHNVLCIHRTLRNTNWQINCVLKDSARAMDAKFDKYWEKGKYNMTLVLATILDPSKKMDFLDFFYEKMSQYFVDIQINVVLVKQCLTKLFEKYATLVQIDNKSSPFIDIRTSNLGSTVLGKRRLDEEFSQWSQIRGRRFPKSELDTYLEEELVRIDERFEILNWWRTNANKYPVLSAMARDILAIPLSTVPSEFAFSAGGRILDDNRSTMTPETLECFVCCKDWLYEYPNIQA

SEQ ID NO: 19168 - DNA, 2187 bp, Zea mays subsp. mays; identical to SEQ ID NO: 14180
  misc_feature (1)..(2187): Ceres Seq. ID no. 13666028
  misc_feature (1)..(2187): Ortholog of  Ceres SEQ ID NO 15170788 as cited in SEQ ID NO 52635
  misc_feature (1)..(2187): Ortholog of  Ceres SEQ ID NO 13638058 as cited in SEQ ID NO 55054
  misc_feature (1)..(2187): Ortholog of  Ceres SEQ ID NO 15170362 as cited in SEQ ID NO 57883
  misc_feature (1)..(2187): Ortholog of  Ceres SEQ ID NO 14303297 as cited in SEQ ID NO 67765

SEQ ID NO: 19169 - protein, 606 aa, Zea mays subsp. mays; identical to SEQ ID NO: 14181
  peptide (1)..(606): Ceres Seq. ID no. 13666029

SEQ ID NO: 19170 - protein, 579 aa, Zea mays subsp. mays; identical to SEQ ID NO: 14182
  peptide (1)..(579): Ceres Seq. ID no. 13666030

SEQ ID NO: 19171 - protein, 371 aa, Zea mays subsp. mays; identical to SEQ ID NO: 14183
  peptide (1)..(371): Ceres Seq. ID no. 13666031

SEQ ID NO: 19172 - DNA, 1174 bp, Zea mays subsp. mays; identical to SEQ ID NO: 5862
  misc_feature (1)..(1174): Ceres Seq. ID no. 12381799
  misc_feature (1)..(1174): Ortholog of  Ceres SEQ ID NO 13658282 as cited in SEQ ID NO 66701

SEQ ID NO: 19173 - protein, 316 aa, Zea mays subsp. mays; identical to SEQ ID NO: 5863
  peptide (1)..(316): Ceres Seq. ID no. 12381800

SEQ ID NO: 19174 - protein, 221 aa, Zea mays subsp. mays; identical to SEQ ID NO: 5864
  peptide (1)..(221): Ceres Seq. ID no. 12381801

SEQ ID NO: 19175 - protein, 219 aa, Zea mays subsp. mays; identical to SEQ ID NO: 5865
  peptide (1)..(219): Ceres Seq. ID no. 12381802

SEQ ID NO: 19176 - DNA, 722 bp, Zea mays subsp. mays
  misc_feature (1)..(722): Ceres Seq. ID no. 12420098
  misc_feature (1)..(722): Ortholog of  Ceres SEQ ID NO 14301738 as cited in SEQ ID NO 61201
acatcatcacttgcagcttcacaagcaaactaaaacacagcggctaaaggcacagctctccagcattcatccagaaagaagagaaggaaccaagccaacagccaaccatgatcagcgccaagagggtcgctcatctggctaagaagtggcagaggatggctgcccaagggaggcagcgcctcacctggggcggcgcaggcgcggcagcaaagcaagccggcgagagctgcagctccgtggcgagcaagggccactgcgccgtgtacacggccgacggggcgcggttcgaggtgcccctggcgtgcctcagcactctggtcttcagggagctcctggaaatgtcgcaggaggagttcggcttctccggcggcgatggcagtggcaggatcacgctgccctgcgacacggcggtcatggagtacgccatgtgcttgctcaggagaagcgcctctgctgagctagagcaggcgttccttagcaccgtggcggcaacgtcgtgctgccactacgccagccgtgtggcgctggcgacgtgcgtaggagccggccctgcgggttgctgtttagtgatgttcttcagtacgtgtgtataggtagtagataaagtattattattcggagccttctgatcctgcaactgatcaagtaaggtgttagtgttctgtacgtatgtatgattcgctggatatgattggcttatgaaaattgtgaggactacttac

SEQ ID NO: 19177 - protein, 161 aa, Zea mays subsp. mays
  peptide (1)..(161): Ceres Seq. ID no. 12420099
MISAKRVAHLAKKWQRMAAQGRQRLTWGGAGAAAKQAGESCSSVASKGHCAVYTADGARFEVPLACLSTLVFRELLEMSQEEFGFSGGDGSGRITLPCDTAVMEYAMCLLRRSASAELEQAFLSTVAATSCCHYASRVALATCVGAGPAGCCLVMFFSTCV

SEQ ID NO: 19178 - protein, 145 aa, Zea mays subsp. mays
  peptide (1)..(145): Ceres Seq. ID no. 12420100
MAAQGRQRLTWGGAGAAAKQAGESCSSVASKGHCAVYTADGARFEVPLACLSTLVFRELLEMSQEEFGFSGGDGSGRITLPCDTAVMEYAMCLLRRSASAELEQAFLSTVAATSCCHYASRVALATCVGAGPAGCCLVMFFSTCV

SEQ ID NO: 19179 - protein, 84 aa, Zea mays subsp. mays
  peptide (1)..(84): Ceres Seq. ID no. 12420101
MSQEEFGFSGGDGSGRITLPCDTAVMEYAMCLLRRSASAELEQAFLSTVAATSCCHYASRVALATCVGAGPAGCCLVMFFSTCV

SEQ ID NO: 19180 - DNA, 1291 bp, Zea mays subsp. mays
  misc_feature (1)..(1291): Ceres Seq. ID no. 13494909
  misc_feature (1)..(1291): Ortholog of  Ceres SEQ ID NO 14302734 as cited in SEQ ID NO 66748
gcccttccaaaccatccccgaagcttccagtgcgtcgcgccgcaaccatgagcgacggtaaggactccctcgacctctccgccctcggcgccgccatccccaactcggccgagctcagcgcggaagacaaggctaaccttgtggcgtcgatcaagaacacgctcgagggattggcatcgcggcataccgacgtgctcgagaacctcgagcccaaggtcaggaagcgcgttgagaagctcagggagatccagggcgaacacgatgaacttgaggcgaagtttttcgaagagagagctgctctagaagctaagtatcagaagttgtatgaaccactttactcaaagcgttatgaaattgtcaatggtgtggtcgagattgagggtatcacaaaagaaagtgcagctgaaaccccagaggagcaaaaaagtggagatgagacctctgctgagcaaaaagaagaaaaaggtgtaccagctttctggcttaatgcaatgaagaatcatgaaattttagctgaggagatccaggagagggatgaggaagctctcaagtacctcaaggacatcaagtggtacaggatcagcgagccgaagggttttaagcttgaatttcactttggtacgaatatgttcttcaagaattcggtgcttacaaaaacatatcacatgatcgatgaggatgaaccaattctggagaaagccattggtactgaaattgaatggtaccctgggaagtgcttgacacaaaaagtgctaaaaaagaagccacggaaggggtcaaagaacacgaaacctatcacaaaaaccgaagattgtgagagcttcttcaacttcttcagtccacctcaagtccctgatgacgacgaggaaattgatgaggacacagctgaacagttgcagaaccaaatggagcaagattatgatattggatctaccatcagagacaagattatcccacatgctgtctcgtggttcactggagaggctgctcaagatgaggactttgaagttatggatggcgaggacgacgacgatgaagacgacgatgatgaagacgacgaggatgaagatgacgatgattatgatacaaagaagaccaagggaactgctggaggggaagggcagcagggtgaacgacctgcagagtgcaagcaacagtgaggtgtgatgtcattaagttggttttgtggggccgttgggtgggggttcttgttggttttattttatggaactggcggggggatttttctgggacatgttacatgtgggtctgtattgggtttcagaagggc

SEQ ID NO: 19181 - protein, 385 aa, Zea mays subsp. mays
  peptide (1)..(385): Ceres Seq. ID no. 13494910
PSKPSPKLPVRRAATMSDGKDSLDLSALGAAIPNSAELSAEDKANLVASIKNTLEGLASRHTDVLENLEPKVRKRVEKLREIQGEHDELEAKFFEERAALEAKYQKLYEPLYSKRYEIVNGVVEIEGITKESAAETPEEQKSGDETSAEQKEEKGVPAFWLNAMKNHEILAEEIQERDEEALKYLKDIKWYRISEPKGFKLEFHFGTNMFFKNSVLTKTYHMIDEDEPILEKAIGTEIEWYPGKCLTQKVLKKKPRKGSKNTKPITKTEDCESFFNFFSPPQVPDDDEEIDEDTAEQLQNQMEQDYDIGSTIRDKIIPHAVSWFTGEAAQDEDFEVMDGEDDDDEDDDDEDDEDEDDDDYDTKKTKGTAGGEGQQGERPAECKQQ

SEQ ID NO: 19182 - protein, 370 aa, Zea mays subsp. mays
  peptide (1)..(370): Ceres Seq. ID no. 13494911
MSDGKDSLDLSALGAAIPNSAELSAEDKANLVASIKNTLEGLASRHTDVLENLEPKVRKRVEKLREIQGEHDELEAKFFEERAALEAKYQKLYEPLYSKRYEIVNGVVEIEGITKESAAETPEEQKSGDETSAEQKEEKGVPAFWLNAMKNHEILAEEIQERDEEALKYLKDIKWYRISEPKGFKLEFHFGTNMFFKNSVLTKTYHMIDEDEPILEKAIGTEIEWYPGKCLTQKVLKKKPRKGSKNTKPITKTEDCESFFNFFSPPQVPDDDEEIDEDTAEQLQNQMEQDYDIGSTIRDKIIPHAVSWFTGEAAQDEDFEVMDGEDDDDEDDDDEDDEDEDDDDYDTKKTKGTAGGEGQQGERPAECKQQ

SEQ ID NO: 19183 - protein, 222 aa, Zea mays subsp. mays
  peptide (1)..(222): Ceres Seq. ID no. 13494912
MKNHEILAEEIQERDEEALKYLKDIKWYRISEPKGFKLEFHFGTNMFFKNSVLTKTYHMIDEDEPILEKAIGTEIEWYPGKCLTQKVLKKKPRKGSKNTKPITKTEDCESFFNFFSPPQVPDDDEEIDEDTAEQLQNQMEQDYDIGSTIRDKIIPHAVSWFTGEAAQDEDFEVMDGEDDDDEDDDDEDDEDEDDDDYDTKKTKGTAGGEGQQGERPAECKQQ

SEQ ID NO: 19184 - DNA, 488 bp, Zea mays subsp. mays
  misc_feature (1)..(488): Ceres Seq. ID no. 2790550
  misc_feature (1)..(488): Ortholog of  Ceres SEQ ID NO 14311136 as cited in SEQ ID NO 56694
gaactggtctatcggcgccgccttcacgccgagagttccctctttctcgcttgctcactcgcgtcgacgactgggctaccggcgcctccaccctccgcctggtgtccttcgccgtcgacgagcgcacaccagggtacagtacgtattgctcgtgatttgtgtaactacggagcaagctgcatacagcacaagatagaagatgggtatccttgagaggatcaaggagattgaggccgagatggctcggactcagaaaaataaagcaacagaatatcatcttggacaactgaaggcaaaactagcaaagttgaggacacaactattagagcctccaargggttccagcggaggtggagatggttttgaagtcacaaagtttgggcatggtcgtgttgcacttattggatttcccagtgttggaaagtcaactcttttaacgatgttgactgggacacattctgaagctgcatcatatgagttcacaacgs

SEQ ID NO: 19185 - protein, 96 aa, Zea mays subsp. mays
  peptide (1)..(96): Ceres Seq. ID no. 2790551
  misc_feature (46)..(46): Xaa is any aa, unknown or other
MGILERIKEIEAEMARTQKNKATEYHLGQLKAKLAKLRTQLLEPPXGSSGGGDGFEVTKFGHGRVALIGFPSVGKSTLLTMLTGTHSEAASYEFTT

SEQ ID NO: 19186 - protein, 83 aa, Zea mays subsp. mays
  peptide (1)..(83): Ceres Seq. ID no. 2790552
  misc_feature (33)..(33): Xaa is any aa, unknown or other
MARTQKNKATEYHLGQLKAKLAKLRTQLLEPPXGSSGGGDGFEVTKFGHGRVALIGFPSVGKSTLLTMLTGTHSEAASYEFTT

SEQ ID NO: 19187 - protein, 70 aa, Zea mays subsp. mays
  peptide (1)..(70): Ceres Seq. ID no. 2790553
ELVYRRRLHAESSLFLACSLASTTGLPAPPPSAWCPSPSTSAHQGTVRIARDLCNYGASCIQHKIEDGYP

SEQ ID NO: 19188 - DNA, 1616 bp, Zea mays subsp. mays; identical to SEQ ID NO: 10150
  misc_feature (1)..(1616): Ceres Seq. ID no. 12637795
  misc_feature (1)..(1616): Ortholog of  Ceres SEQ ID NO 14303850 as cited in SEQ ID NO 53464
  misc_feature (1)..(1616): Ortholog of  Ceres SEQ ID NO 14310452 as cited in SEQ ID NO 54426
  misc_feature (1)..(1616): Ortholog of  Ceres SEQ ID NO 15176262 as cited in SEQ ID NO 54751
  misc_feature (1)..(1616): Ortholog of  Ceres SEQ ID NO 15174626 as cited in SEQ ID NO 59393
  misc_feature (1)..(1616): Ortholog of  Ceres SEQ ID NO 15169663 as cited in SEQ ID NO 64659
  misc_feature (1)..(1616): Ortholog of  Ceres SEQ ID NO 13656177 as cited in SEQ ID NO 64997

SEQ ID NO: 19189 - protein, 455 aa, Zea mays subsp. mays; identical to SEQ ID NO: 10151
  peptide (1)..(455): Ceres Seq. ID no. 12637796

SEQ ID NO: 19190 - protein, 410 aa, Zea mays subsp. mays; identical to SEQ ID NO: 10152
  peptide (1)..(410): Ceres Seq. ID no. 12637797

SEQ ID NO: 19191 - protein, 391 aa, Zea mays subsp. mays; identical to SEQ ID NO: 10153
  peptide (1)..(391): Ceres Seq. ID no. 12637798

SEQ ID NO: 19192 - DNA, 1094 bp, Zea mays subsp. mays
  misc_feature (1)..(1094): Ceres Seq. ID no. 12381845
  misc_feature (1)..(1094): Ortholog of  Ceres SEQ ID NO 15169248 as cited in SEQ ID NO 55022
  misc_feature (1)..(1094): Ortholog of  Ceres SEQ ID NO 14315042 as cited in SEQ ID NO 56959
  misc_feature (1)..(1094): Ortholog of  Ceres SEQ ID NO 12608620 as cited in SEQ ID NO 60192
  misc_feature (1)..(1094): Ortholog of  Ceres SEQ ID NO 15173077 as cited in SEQ ID NO 64566
  misc_feature (1)..(1094): Ortholog of  Ceres SEQ ID NO 13662898 as cited in SEQ ID NO 66199
  misc_feature (1)..(1094): Ortholog of  Ceres SEQ ID NO 13654314 as cited in SEQ ID NO 67914
gcacgagaccattacctagaacatcctaatcgaaaaaggagatacttgaagcctcaccagagaccacaaggagggatattcgcaggacccggtttttgcagcacgaggtgtggaggctgctctgccataccaaaaagcagacagaggaccaaggaaggaagcagggatccggctttgctctgcaaccatgagctccctgtacgacgtctcctgcttcgcggctggccttgctgggaacgtcttcgccctcgccctcttcctgtcgccggtgccgacgttcaagagggtcctcaaggccaagtcgacggagcagttcgatgggctgccctacctgctgtccctgctcaactgctgcatctgcctctggtacggcctcccgtgggtctccgacggcggcagggccctcgtcgccaccgtcaactgcaccggcgccctgttccagctcgcctacatctcgctcttcatcttctacgccgacagcaggaccactcggctcaaggtcgcggggcttctggtgctagtggtcttcgcgttcgcgctcatcgcacacgccagcatcgccttcttcgaccagccgctccggcagctgttcgttggcagcgtcagcatggcgtccctggtctccatgttcgcttccccgctggctgtcatgggtgtggtggtccgcaccgagtgcgtggagttcatgcccttctacctctctctgtccacgttcctgatgagcgcatccttcgcagtgtacgggcttctcctgcgtgatttcttcatatacttcccgaatgggctcggagtcatcctgggagcaatgcagctggtgctgtacgcgtactacagccggagatggaaaagcagcgactcgtcagcaccgttgcttgcctgatcatgtagccgagttcgtcagtccaattgcccgtgccgtgctttctgttgttctctgttctgccatcctgtaattctaggagaggagctaggcggtgttttggaacagattaatcgtactgctacgaaatatattttttgagatagattattttaaatagagatggtcataaagtttattcgtcttctaagagaattttgaatacgatcatttt

SEQ ID NO: 19193 - protein, 252 aa, Zea mays subsp. mays
  peptide (1)..(252): Ceres Seq. ID no. 12381846
ARDHYLEHPNRKRRYLKPHQRPQGGIFAGPGFCSTRCGGCSAIPKSRQRTKEGSRDPALLCNHELPVRRLLLRGWPCWERLRPRPLPVAGADVQEGPQGQVDGAVRWAALPAVPAQLLHLPLVRPPVGLRRRQGPRRHRQLHRRPVPARLHLALHLLRRQQDHSAQGRGASGASGLRVRAHRTRQHRLLRPAAPAAVRWQRQHGVPGLHVRFPAGCHGCGGPHRVRGVHALLPLSVHVPDERILRSVRASPA

SEQ ID NO: 19194 - protein, 230 aa, Zea mays subsp. mays
  peptide (1)..(230): Ceres Seq. ID no. 12381847
MSSLYDVSCFAAGLAGNVFALALFLSPVPTFKRVLKAKSTEQFDGLPYLLSLLNCCICLWYGLPWVSDGGRALVATVNCTGALFQLAYISLFIFYADSRTTRLKVAGLLVLVVFAFALIAHASIAFFDQPLRQLFVGSVSMASLVSMFASPLAVMGVVVRTECVEFMPFYLSLSTFLMSASFAVYGLLLRDFFIYFPNGLGVILGAMQLVLYAYYSRRWKSSDSSAPLLA

SEQ ID NO: 19195 - DNA, 716 bp, Zea mays subsp. mays
  misc_feature (1)..(716): Ceres Seq. ID no. 12419788
  misc_feature (1)..(716): Ortholog of  Ceres SEQ ID NO 14304479 as cited in SEQ ID NO 53547
gcacgagaccattacctagaacatcctaatcaaaaaaaaaggccggaggtgagccccgcatccgcggccaagtacccatgacgacgaggctgacagcgacgttgttgctctccagaaccctcgtccgccgcgtaacctcgcgaaccccgacacccctcggccctttcggtctcgaaccatccgcaggaatccccatctcctggtccagacgcgcctcctcgaccgcctcgggagatcggggccaggaaccgccaccggccatggattcgcctatcaaggtggtttctcacctggggagcggacgagggggagagggagagggaggggccgcagcgatcgacgcggggaagtcggcacggaggccgctcagcctgtggcccgggatgtaccactccccggtgaccaacgcgctctgggaggcgcgatccagcatcttcgagcggatgatggacgctgggaacggcgcttcctctgccgagcagcggccgcagactgagctgctcgtcaagacgcccgcgcagagccggaccagcatcgtgtacaagttcgccaccgacgacatcctcagggagcagtaccgggacccctggaacgagttgcgcatcggcaagctgctcgaggatcttgacgccctcgccggcaccatcgccgtcaagcactgttcaggggaagatagcacaacaagaccccttttggttgtgactgcttctgttgac

SEQ ID NO: 19196 - protein, 213 aa, Zea mays subsp. mays
  peptide (1)..(213): Ceres Seq. ID no. 12419789
MTTRLTATLLLSRTLVRRVTSRTPTPLGPFGLEPSAGIPISWSRRASSTASGDRGQEPPPAMDSPIKVVSHLGSGRGGEGEGGAAAIDAGKSARRPLSLWPGMYHSPVTNALWEARSSIFERMMDAGNGASSAEQRPQTELLVKTPAQSRTSIVYKFATDDILREQYRDPWNELRIGKLLEDLDALAGTIAVKHCSGEDSTTRPLLVVTASVD

SEQ ID NO: 19197 - protein, 152 aa, Zea mays subsp. mays
  peptide (1)..(152): Ceres Seq. ID no. 12419790
MDSPIKVVSHLGSGRGGEGEGGAAAIDAGKSARRPLSLWPGMYHSPVTNALWEARSSIFERMMDAGNGASSAEQRPQTELLVKTPAQSRTSIVYKFATDDILREQYRDPWNELRIGKLLEDLDALAGTIAVKHCSGEDSTTRPLLVVTASVD

SEQ ID NO: 19198 - protein, 111 aa, Zea mays subsp. mays
  peptide (1)..(111): Ceres Seq. ID no. 12419791
MYHSPVTNALWEARSSIFERMMDAGNGASSAEQRPQTELLVKTPAQSRTSIVYKFATDDILREQYRDPWNELRIGKLLEDLDALAGTIAVKHCSGEDSTTRPLLVVTASVD

SEQ ID NO: 19199 - DNA, 1903 bp, Zea mays subsp. mays
  misc_feature (1)..(1903): Ceres Seq. ID no. 12436393
  misc_feature (1)..(1903): Ortholog of  Ceres SEQ ID NO 14311191 as cited in SEQ ID NO 52591
gcccaacacccaattgaagacgtcccaatcccaaccctactcccttgcctccccctaatgacatcgcctggcggcgtcttctccgccgcgctcgtcgccgaggacttcccttgggtggacatggaggaggagatggggatggccccggacatgtaccgcgaggtgttcgacctcgcgcagcgcgggacacgagcctttcgcgaccgcctcttcgacgaggcaatatcctgttacactaaagctcaaaatttgagaccagatccaattatccttggcaatcgaagtttgactttctgccggttaagtcaactgttgagggagagatcagcagccgactctgaatatcagcccttgaatggccttgatcctacaactcatgcagagttagctctgaaggatgcagagaagatattatctatcaacagtaattctcctagaccatatattctcaaggcatatgcgctatttctgatggagcattaccatgaggcacgtgagacccttcttgctggtcttcaagttgatcccctcagtcatgtcttgcaaacctgtctgaatgatctggataggaatacaaatattgcagctggggcaaggcgtgcaaggttagctaggattgatgattttgagtgcacattatgctttaagctattgtatgaacctgtcactacaccatgtggccattcattttgtcgctcttgtctacatcagtcaatggatcatggtaataagtgccccatgtgtcggacagtattatttatcggtccaagaacatgccctataagtgtaacattaagcaacataattcagagaaatttcccagaagaatatgctgagaggaggtcagaacatgagactatgacatatgctggtgttgatttgatgcctctctttgtcatggatgttgtacttccatcccaaaagatggcactgaacatatttgaacctcgctacagactgatggtacggagaataatggaagggaaccatcggatgggaatggttgctattgattcggcaacgggtactgtagcagattgtggctgtgaggtggaaatttcagagtgtgaaccacttccacatgggcgcttttatttagaggtggaaggcacacgtcggtttcgtatcgtgcgatcatgggatcaagatggatatagagttgctgaagttgaatggttgaaagatatacctctgccagaaggttcacaagggagaagagaactaatggaactggccaatggagcttcagagctggccagggcatatatcagacatgctagagataccgtacggactgcaaggcgaacaagacatctggatcttgagggcatgcctgggccacaggacccggaaaaatttagtttctggctagccaacttgataagtttgaggccctcggatagattagatacgttacgccttcgcgacactagggagagaatttctagtagcatcagtttgctccgtgattccgaacaaggctgccgtgtacaatgacggaaacagtacaagaatcgtttccacagaccaattcgttcgtctaggagtatatcgatttggagctactccgtgattccgaacaaggctgccgtgtacaatgacggaaacagtacaagaatcgtttccacgtaccaattcgttcgtctaggagtatatcgatttggagctactccgtgattccgaacaaggctgccgtatacaatgacggaaacagtacaagaatcgtttccacagaccaattcgttcgtctaggagtatatcgatttggagctagggatgtaatatgatttagaaaatatccgtccagatccagactcgaagatggtgaatactggttcggatggaattttcggatatccggtctttttttgataacggatacaaatacggatattttattcgc

SEQ ID NO: 19200 - protein, 498 aa, Zea mays subsp. mays
  peptide (1)..(498): Ceres Seq. ID no. 12436394
AQHPIEDVPIPTLLPCLPLMTSPGGVFSAALVAEDFPWVDMEEEMGMAPDMYREVFDLAQRGTRAFRDRLFDEAISCYTKAQNLRPDPIILGNRSLTFCRLSQLLRERSAADSEYQPLNGLDPTTHAELALKDAEKILSINSNSPRPYILKAYALFLMEHYHEARETLLAGLQVDPLSHVLQTCLNDLDRNTNIAAGARRARLARIDDFECTLCFKLLYEPVTTPCGHSFCRSCLHQSMDHGNKCPMCRTVLFIGPRTCPISVTLSNIIQRNFPEEYAERRSEHETMTYAGVDLMPLFVMDVVLPSQKMALNIFEPRYRLMVRRIMEGNHRMGMVAIDSATGTVADCGCEVEISECEPLPHGRFYLEVEGTRRFRIVRSWDQDGYRVAEVEWLKDIPLPEGSQGRRELMELANGASELARAYIRHARDTVRTARRTRHLDLEGMPGPQDPEKFSFWLANLISLRPSDRLDTLRLRDTRERISSSISLLRDSEQGCRVQ

SEQ ID NO: 19201 - protein, 479 aa, Zea mays subsp. mays
  peptide (1)..(479): Ceres Seq. ID no. 12436395
MTSPGGVFSAALVAEDFPWVDMEEEMGMAPDMYREVFDLAQRGTRAFRDRLFDEAISCYTKAQNLRPDPIILGNRSLTFCRLSQLLRERSAADSEYQPLNGLDPTTHAELALKDAEKILSINSNSPRPYILKAYALFLMEHYHEARETLLAGLQVDPLSHVLQTCLNDLDRNTNIAAGARRARLARIDDFECTLCFKLLYEPVTTPCGHSFCRSCLHQSMDHGNKCPMCRTVLFIGPRTCPISVTLSNIIQRNFPEEYAERRSEHETMTYAGVDLMPLFVMDVVLPSQKMALNIFEPRYRLMVRRIMEGNHRMGMVAIDSATGTVADCGCEVEISECEPLPHGRFYLEVEGTRRFRIVRSWDQDGYRVAEVEWLKDIPLPEGSQGRRELMELANGASELARAYIRHARDTVRTARRTRHLDLEGMPGPQDPEKFSFWLANLISLRPSDRLDTLRLRDTRERISSSISLLRDSEQGCRVQ

SEQ ID NO: 19202 - protein, 458 aa, Zea mays subsp. mays
  peptide (1)..(458): Ceres Seq. ID no. 12436396
MEEEMGMAPDMYREVFDLAQRGTRAFRDRLFDEAISCYTKAQNLRPDPIILGNRSLTFCRLSQLLRERSAADSEYQPLNGLDPTTHAELALKDAEKILSINSNSPRPYILKAYALFLMEHYHEARETLLAGLQVDPLSHVLQTCLNDLDRNTNIAAGARRARLARIDDFECTLCFKLLYEPVTTPCGHSFCRSCLHQSMDHGNKCPMCRTVLFIGPRTCPISVTLSNIIQRNFPEEYAERRSEHETMTYAGVDLMPLFVMDVVLPSQKMALNIFEPRYRLMVRRIMEGNHRMGMVAIDSATGTVADCGCEVEISECEPLPHGRFYLEVEGTRRFRIVRSWDQDGYRVAEVEWLKDIPLPEGSQGRRELMELANGASELARAYIRHARDTVRTARRTRHLDLEGMPGPQDPEKFSFWLANLISLRPSDRLDTLRLRDTRERISSSISLLRDSEQGCRVQ

SEQ ID NO: 19203 - DNA, 1942 bp, Zea mays subsp. mays
  misc_feature (1)..(1942): Ceres Seq. ID no. 12436371
  misc_feature (1)..(1942): Ortholog of  Ceres SEQ ID NO 15175785 as cited in SEQ ID NO 56970
  misc_feature (1)..(1942): Ortholog of  Ceres SEQ ID NO 15178157 as cited in SEQ ID NO 57481
  misc_feature (1)..(1942): Ortholog of  Ceres SEQ ID NO 13597407 as cited in SEQ ID NO 64106
  misc_feature (1)..(1942): Ortholog of  Ceres SEQ ID NO 14303309 as cited in SEQ ID NO 67739
gcacgagaccattacctagaacatcctaatcgaaaaagggcgctaatttcagccgtgttctcttctctctcgttcgagagatttatactacgtgtataaaaagcatcgtccaacagaggtacctttgctgcgcctctcgatctctagctatagcccgtagctagctagccctcccggcgaatcggccgatcagccggtcgggaacgatgaagaaagatgatgacctcgagtcggcgctgctggccgccaaagagccggcgccggcgcccgccaagggctacgcgtacgcgctcacctgcgcgctcctggcttccctcacctccatcatctacggctacaaccgcggggtgatgagcggggcgcagaagttcgtgcaggccgacctcggcgtcacggacgcgcagctggaggtgctcatcggcgccaccagcgtctactccctcgtcggctcgctggcggcgggctgggcgtgcgaccgcgcgggccggcgccgcaccatcgcgctgtcggcggccttgttcctcgccggctcagccgtcaccgccgccgccgacggctacgccgcgctcatggcgggccagttcgtcgccggcgtggcctgcggattcggcctcgtcgtcgctcccgtctacatcgcggagatctcgccggccaacgctcggggcttcctctcctccatccccgagatcgccggcaactcgggcatcctgctgagctacatcgccgacttcgcgctcgccggcctcccgacgccactcaactggcgcctgatgatcggcatcggcgccgtccctcctctattcctagcggccgcggccgcgcttgccatgccggagaccccgcgctggctcgtcctccacggccaccgcgacgaggcgcgccgcgtgctggcgcgcacggtgggggacgcggaccgccggctccaggagatcgtgacgtccgtgcaggaggccacgaagcaggcgggctccggcggcggcgacgcgccgtcgtcggcgagcgtgcggcgcgngatcctgctccggccgacgcccgccgtccgccgcgtgatgctggccatcctggggctgcaggtgttccagcaggcgtgcggcgtggcggccatggtgctgtacgccccgcgcgtgttcagccacgtcgggatcacctccgagcgcgacgtgctcggcgccaccgtcctcctcggcgccgccaagacggtggcgatcgtcgtccctctgttcctcgccgacagcctcggccgccggcccatgctgctcaccagcgcgggtggcatggccgcgtcgcttctggtcctcggcctgtccatacgcgcgacgtcggccgcgacgtgcgtcgccgccgccgtggcgttcatggcgaccttctcgctggggttcggacccgtgatctggatgtacgggtcggagatcctgccgctgcggctgcgcgcgcaggggactggcgtcgggacggcggtcaaccgggtgatgagcgccatcgtggggatgaccttcatcccgatgtacgaggcggtgggcatggccgggaccttctacatcttcgcggcgatgtccgcggcagcgtgggtgttcgtctacgcgtgcctgcctgagaccaaggggaggagcctcgaggagatggaggcactcttcgacgccggtgccggtgccgatgctgcaccgtcgccacgggcggcgttgtcgtgacgttccagacactgagtacacatgcatcatgtccacgcaaggaacaaacacgtgatgacatgaagttgtcaggtgtgcagtgtagcaaggttagacaggtgctagtgtatttgtaagcagccaagatgccgtcgacgaatagttttgtactcttgtcattttgaatgggttgattatatggtagctgtttctagcaacgcgtctcttaaatttcattctctaaagcaatatgtaccgttctttacatttacaat

SEQ ID NO: 19204 - protein, 493 aa, Zea mays subsp. mays
  peptide (1)..(493): Ceres Seq. ID no. 12436372
  misc_feature (269)..(269): Xaa is any aa, unknown or other
MKKDDDLESALLAAKEPAPAPAKGYAYALTCALLASLTSIIYGYNRGVMSGAQKFVQADLGVTDAQLEVLIGATSVYSLVGSLAAGWACDRAGRRRTIALSAALFLAGSAVTAAADGYAALMAGQFVAGVACGFGLVVAPVYIAEISPANARGFLSSIPEIAGNSGILLSYIADFALAGLPTPLNWRLMIGIGAVPPLFLAAAAALAMPETPRWLVLHGHRDEARRVLARTVGDADRRLQEIVTSVQEATKQAGSGGGDAPSSASVRRXILLRPTPAVRRVMLAILGLQVFQQACGVAAMVLYAPRVFSHVGITSERDVLGATVLLGAAKTVAIVVPLFLADSLGRRPMLLTSAGGMAASLLVLGLSIRATSAATCVAAAVAFMATFSLGFGPVIWMYGSEILPLRLRAQGTGVGTAVNRVMSAIVGMTFIPMYEAVGMAGTFYIFAAMSAAAWVFVYACLPETKGRSLEEMEALFDAGAGADAAPSPRAALS

SEQ ID NO: 19205 - protein, 445 aa, Zea mays subsp. mays
  peptide (1)..(445): Ceres Seq. ID no. 12436373
  misc_feature (221)..(221): Xaa is any aa, unknown or other
MSGAQKFVQADLGVTDAQLEVLIGATSVYSLVGSLAAGWACDRAGRRRTIALSAALFLAGSAVTAAADGYAALMAGQFVAGVACGFGLVVAPVYIAEISPANARGFLSSIPEIAGNSGILLSYIADFALAGLPTPLNWRLMIGIGAVPPLFLAAAAALAMPETPRWLVLHGHRDEARRVLARTVGDADRRLQEIVTSVQEATKQAGSGGGDAPSSASVRRXILLRPTPAVRRVMLAILGLQVFQQACGVAAMVLYAPRVFSHVGITSERDVLGATVLLGAAKTVAIVVPLFLADSLGRRPMLLTSAGGMAASLLVLGLSIRATSAATCVAAAVAFMATFSLGFGPVIWMYGSEILPLRLRAQGTGVGTAVNRVMSAIVGMTFIPMYEAVGMAGTFYIFAAMSAAAWVFVYACLPETKGRSLEEMEALFDAGAGADAAPSPRAALS

SEQ ID NO: 19206 - protein, 372 aa, Zea mays subsp. mays
  peptide (1)..(372): Ceres Seq. ID no. 12436374
  misc_feature (148)..(148): Xaa is any aa, unknown or other
MAGQFVAGVACGFGLVVAPVYIAEISPANARGFLSSIPEIAGNSGILLSYIADFALAGLPTPLNWRLMIGIGAVPPLFLAAAAALAMPETPRWLVLHGHRDEARRVLARTVGDADRRLQEIVTSVQEATKQAGSGGGDAPSSASVRRXILLRPTPAVRRVMLAILGLQVFQQACGVAAMVLYAPRVFSHVGITSERDVLGATVLLGAAKTVAIVVPLFLADSLGRRPMLLTSAGGMAASLLVLGLSIRATSAATCVAAAVAFMATFSLGFGPVIWMYGSEILPLRLRAQGTGVGTAVNRVMSAIVGMTFIPMYEAVGMAGTFYIFAAMSAAAWVFVYACLPETKGRSLEEMEALFDAGAGADAAPSPRAALS

SEQ ID NO: 19207 - DNA, 2161 bp, Zea mays subsp. mays; identical to SEQ ID NO: 7401
  misc_feature (1)..(2161): Ceres Seq. ID no. 13494407
  misc_feature (1)..(2161): Ortholog of  Ceres SEQ ID NO 15177969 as cited in SEQ ID NO 58823
  misc_feature (1)..(2161): Ortholog of  Ceres SEQ ID NO 15177963 as cited in SEQ ID NO 59105
  misc_feature (1)..(2161): Ortholog of  Ceres SEQ ID NO 14302746 as cited in SEQ ID NO 66646

SEQ ID NO: 19208 - protein, 412 aa, Zea mays subsp. mays; identical to SEQ ID NO: 7402
  peptide (1)..(412): Ceres Seq. ID no. 13494408

SEQ ID NO: 19209 - protein, 411 aa, Zea mays subsp. mays; identical to SEQ ID NO: 7403
  peptide (1)..(411): Ceres Seq. ID no. 13494409

SEQ ID NO: 19210 - DNA, 2010 bp, Zea mays subsp. mays
  misc_feature (1)..(2010): Ceres Seq. ID no. 12362438
  misc_feature (1)..(2010): Ortholog of  Ceres SEQ ID NO 14313167 as cited in SEQ ID NO 54354
actcaccacccccggccgagcgaattgaagaagctccccctctgaactgaagcaatggcaggcggcaatgccggtggcgccgctcgagtcctgttctccatcctcggcctggcgctggcgctgccgctgctcgtggccggcgacgacccgtaccggttcttcacgtggacggtgacctacggcgacatctacccgctgggcgtcaagcagcaggggatcctgatcaacaaccagttcccggggccgcagatcgaggccgtcaccaacgacaacctcatcatcaacgtcttcaacaagctcaacgagccgttcctcctctcctggagcgggctccagcagcggcggaactcgttcgaggacggcgtggccgggacgacgtgcccgatcccgccgggctccaacttcacctacatcatgcaggccaaggaccagatcggcacctactactacttcccatcgctggccttccacaaggccgccggcgggttcggcggcatccgcgtgctcagccgcccgcagatccccgtcccgttcccgccgccggccgccgactacaccgtcctcatcggcgactggtacaaggccaaccacaccgacttgcggtacgtgctcgacagcggcgtggcgctcgggttccctgacgggctgctcatcaacggctggggcctgaatggctacaccttcaacgttcagcccggccggacgtaccggttccggatcaccaacgtggggctggccacgtccctcaacatccggttccaggggcacaccatgaagctggtggaggtggagggctcgcacaccatgcagaccacctactcgtccctggacgtgcacctgggccagtcctactccgtgctgctcaccgccgaccagccgggctacgactacgccgtcgtcgtctccacgcgcttcacgagccggatcatctccaccacggcggtcctgcgctacgccaactccgccggcagggcgccgggtcccctccccggtggccccaccatccagatcgactggtcgctcaaccaggcccgctcggtccggtggaacctgacggccagcgggccgcggcccaacccgcaggggtcgtaccactacggcctggtgccggtgacctggaccatccgcctggccaactcggcggcgaccatcggcgggaagcggcgctacgcggtgaacggcgcgtcgtacgtgggccccgacaccccgctcaaggtcgcagactactacaagatcggcggcgtcttctccgtgggcaccatcgccgacagcccccccgcctacggcggcgccgcctacctgcggacgtcggtcatgggcgccagctacagggactacgtcgaggtcgtgttcgagaacggcgaggacgaggtgcagtcgtggcacatcgacggatacgccttctgggtcgtcgggatggatggagggaaatggtcgtcggcaagcaggcagggctacaacctgagggacggcgtttcgcggtacactgttcaggtgtaccccagatcgtggacggcgatttacatgcccctggacaacgtgggcatgtggaacgtccggtcggagaactgggccaggcagtacctggggcagcagttctacctccgcgtctggacgccgtccacgtcgttgcgcgacgagtaccccatccccaagaacgcgctcctgtgcggccgggcggccggacgccggaccaggccgctgtgagagtgacactgccgccggatcattcacagcttttgtcatgagaggatgacacactattggtttggtctttggagaagagcaggaacatacacaagtttatataccctcaactgaagggaggttcagaggaacgaaagtgttgcttgccgattttttttcattttagtttttttttccctttaaagtttcatatttacgtctctgctgaactaaaaccgtgttggaatttctgggtcaacactataacttatactccctccgtcccaacatagtatttgttttagagtgttaacggattcatgc

SEQ ID NO: 19211 - protein, 550 aa, Zea mays subsp. mays
  peptide (1)..(550): Ceres Seq. ID no. 12362439
MAGGNAGGAARVLFSILGLALALPLLVAGDDPYRFFTWTVTYGDIYPLGVKQQGILINNQFPGPQIEAVTNDNLIINVFNKLNEPFLLSWSGLQQRRNSFEDGVAGTTCPIPPGSNFTYIMQAKDQIGTYYYFPSLAFHKAAGGFGGIRVLSRPQIPVPFPPPAADYTVLIGDWYKANHTDLRYVLDSGVALGFPDGLLINGWGLNGYTFNVQPGRTYRFRITNVGLATSLNIRFQGHTMKLVEVEGSHTMQTTYSSLDVHLGQSYSVLLTADQPGYDYAVVVSTRFTSRIISTTAVLRYANSAGRAPGPLPGGPTIQIDWSLNQARSVRWNLTASGPRPNPQGSYHYGLVPVTWTIRLANSAATIGGKRRYAVNGASYVGPDTPLKVADYYKIGGVFSVGTIADSPPAYGGAAYLRTSVMGASYRDYVEVVFENGEDEVQSWHIDGYAFWVVGMDGGKWSSASRQGYNLRDGVSRYTVQVYPRSWTAIYMPLDNVGMWNVRSENWARQYLGQQFYLRVWTPSTSLRDEYPIPKNALLCGRAAGRRTRPL

SEQ ID NO: 19212 - protein, 430 aa, Zea mays subsp. mays
  peptide (1)..(430): Ceres Seq. ID no. 12362440
MQAKDQIGTYYYFPSLAFHKAAGGFGGIRVLSRPQIPVPFPPPAADYTVLIGDWYKANHTDLRYVLDSGVALGFPDGLLINGWGLNGYTFNVQPGRTYRFRITNVGLATSLNIRFQGHTMKLVEVEGSHTMQTTYSSLDVHLGQSYSVLLTADQPGYDYAVVVSTRFTSRIISTTAVLRYANSAGRAPGPLPGGPTIQIDWSLNQARSVRWNLTASGPRPNPQGSYHYGLVPVTWTIRLANSAATIGGKRRYAVNGASYVGPDTPLKVADYYKIGGVFSVGTIADSPPAYGGAAYLRTSVMGASYRDYVEVVFENGEDEVQSWHIDGYAFWVVGMDGGKWSSASRQGYNLRDGVSRYTVQVYPRSWTAIYMPLDNVGMWNVRSENWARQYLGQQFYLRVWTPSTSLRDEYPIPKNALLCGRAAGRRTRPL

SEQ ID NO: 19213 - protein, 311 aa, Zea mays subsp. mays
  peptide (1)..(311): Ceres Seq. ID no. 12362441
MKLVEVEGSHTMQTTYSSLDVHLGQSYSVLLTADQPGYDYAVVVSTRFTSRIISTTAVLRYANSAGRAPGPLPGGPTIQIDWSLNQARSVRWNLTASGPRPNPQGSYHYGLVPVTWTIRLANSAATIGGKRRYAVNGASYVGPDTPLKVADYYKIGGVFSVGTIADSPPAYGGAAYLRTSVMGASYRDYVEVVFENGEDEVQSWHIDGYAFWVVGMDGGKWSSASRQGYNLRDGVSRYTVQVYPRSWTAIYMPLDNVGMWNVRSENWARQYLGQQFYLRVWTPSTSLRDEYPIPKNALLCGRAAGRRTRPL

SEQ ID NO: 19214 - DNA, 1184 bp, Zea mays subsp. mays
  misc_feature (1)..(1184): Ceres Seq. ID no. 12364672
  misc_feature (1)..(1184): Ortholog of  Ceres SEQ ID NO 15168860 as cited in SEQ ID NO 65053
gcacgagaccattacctagaacatcctaatcgaaaactccacctccaccaatccaaccaaccattggccattgcgtagaaaagattactttaagaatgggctgctccaagcgcattgcactggtacttgtcgcggctcttgtagcgctccacgtccatgtcccgatggccaccgcagccaactccaacctcttccgggactacatcggcgccatcttcaacggcgtcaagttcaccgacgtccccatcaacccgagggtccgcttcgactacatcctcgccttcgtgatcgactacaccaccgcgacggagccgcccaccccgaccaacggccagttcaacatcttctggcaggactcggtgctgacggcgtccgcggtggccgccatcaagcagagcaacccgaacgtgcgggtggccgtcagcatcggcggcgccaccgtgaacgaccgccctgtgttcttcaacatcacctccgtcgactcctgggtccagaacgccgtctcctccctgaccaccatcatccagaagtacaacctggacggcatcgacatcgactacgagcagttccaggccgacccggccaccttcgccgagtgcatcggccgcctggtcaccacgctcaagagcaacggggtgatcagcttcgcgtccatcgccccgttcgacaacgccgacgtgcagcgccattaccaggccctgtgggcgacctacggaagcgtcatagactacgtcaacttccagttctacgcctacggcgccagcacgaccgaggcgcagtacgtcgacttcttcaaccagcagcttgtcaactaccccggcggcaacatcctggccagcttcaccacggcgcccaccaccacgtcggtgcccatcaacacgtcgctcagcgcttgccagacattgcagtcgcagggcaagctctacgggatcttcatctgggcagcccgaccattccaggagccaaggcttcaagtacgacacacaagcacaagcactgctcgccaacgcccctgctggctactagtagatggctaccataccttcaatgcgtttaagttggatttggatttcattttcaggtgaacaaataatattattatgtatggaataaggctgtcattggaatataatacggggctatttctatattcctgtgttctctataaaaattaaacaattctt

SEQ ID NO: 19215 - protein, 329 aa, Zea mays subsp. mays
  peptide (1)..(329): Ceres Seq. ID no. 12364673
MGCSKRIALVLVAALVALHVHVPMATAANSNLFRDYIGAIFNGVKFTDVPINPRVRFDYILAFVIDYTTATEPPTPTNGQFNIFWQDSVLTASAVAAIKQSNPNVRVAVSIGGATVNDRPVFFNITSVDSWVQNAVSSLTTIIQKYNLDGIDIDYEQFQADPATFAECIGRLVTTLKSNGVISFASIAPFDNADVQRHYQALWATYGSVIDYVNFQFYAYGASTTEAQYVDFFNQQLVNYPGGNILASFTTAPTTTSVPINTSLSACQTLQSQGKLYGIFIWAARPFQEPRLQVRHTSTSTARQRPCWLLVDGYHTFNAFKLDLDFIFR

SEQ ID NO: 19216 - protein, 306 aa, Zea mays subsp. mays
  peptide (1)..(306): Ceres Seq. ID no. 12364674
MATAANSNLFRDYIGAIFNGVKFTDVPINPRVRFDYILAFVIDYTTATEPPTPTNGQFNIFWQDSVLTASAVAAIKQSNPNVRVAVSIGGATVNDRPVFFNITSVDSWVQNAVSSLTTIIQKYNLDGIDIDYEQFQADPATFAECIGRLVTTLKSNGVISFASIAPFDNADVQRHYQALWATYGSVIDYVNFQFYAYGASTTEAQYVDFFNQQLVNYPGGNILASFTTAPTTTSVPINTSLSACQTLQSQGKLYGIFIWAARPFQEPRLQVRHTSTSTARQRPCWLLVDGYHTFNAFKLDLDFIFR

SEQ ID NO: 19217 - DNA, 2116 bp, Zea mays subsp. mays; identical to SEQ ID NO: 18260
  misc_feature (1)..(2116): Ceres Seq. ID no. 13566658
  misc_feature (1)..(2116): Ortholog of  Ceres SEQ ID NO 14313167 as cited in SEQ ID NO 54354

SEQ ID NO: 19218 - protein, 592 aa, Zea mays subsp. mays; identical to SEQ ID NO: 18261
  peptide (1)..(592): Ceres Seq. ID no. 13566659
  misc_feature (489)..(489): Xaa is any aa, unknown or other

SEQ ID NO: 19219 - protein, 535 aa, Zea mays subsp. mays; identical to SEQ ID NO: 18262
  peptide (1)..(535): Ceres Seq. ID no. 13566660
  misc_feature (432)..(432): Xaa is any aa, unknown or other

SEQ ID NO: 19220 - protein, 463 aa, Zea mays subsp. mays; identical to SEQ ID NO: 18263
  peptide (1)..(463): Ceres Seq. ID no. 13566661
  misc_feature (360)..(360): Xaa is any aa, unknown or other

SEQ ID NO: 19221 - DNA, 2003 bp, Zea mays subsp. mays
  misc_feature (1)..(2003): Ceres Seq. ID no. 12387993
  misc_feature (1)..(2003): Ortholog of  Ceres SEQ ID NO 14311203 as cited in SEQ ID NO 53639
  misc_feature (1)..(2003): Ortholog of  Ceres SEQ ID NO 15176053 as cited in SEQ ID NO 57792
  misc_feature (1)..(2003): Ortholog of  Ceres SEQ ID NO 14311175 as cited in SEQ ID NO 60223
  misc_feature (1)..(2003): Ortholog of  Ceres SEQ ID NO 15224727 as cited in SEQ ID NO 64990
  misc_feature (1)..(2003): Ortholog of  Ceres SEQ ID NO 14308023 as cited in SEQ ID NO 65865
  misc_feature (1)..(2003): Ortholog of  Ceres SEQ ID NO 14307972 as cited in SEQ ID NO 66436
  misc_feature (1)..(2003): Ortholog of  Ceres SEQ ID NO 15170175 as cited in SEQ ID NO 67138
  misc_feature (1)..(2003): Ortholog of  Ceres SEQ ID NO 12614670 as cited in SEQ ID NO 68565
gcaccgagaccattacctagaacatcctaatcgaaaaatccgacccagtatccccgacaaagtcaatgcgatgcgtctcctccttgctctatcgactatcgtagccgattccccgttgcaagtaactaaaactaagtctcaagtctgcagagtaaccggagtagcatagcactagcaagcaatggccgctctcacttccgctctcctcttcgccgccctcctcgtggccgcccagtacgtgctccgcttgctccactccttcctgtgggtcccgttccgcctggaacgccgcttccggcggcagggaatccggtggccaccacgaagcctggtctccggtaacgcagccgactaccgcgacctgctagccgccgccaggtccgcgcccctctcctccttccgccacaacggcgtcgtcgcccgcgccacgccgcagtacgcggtctggctggcgcggtacggccggccgttcgtgtactggttcgggccccggccgcggctggtgatctccgacacggagctcgtgaaggccgtgatgaccgactccacggggggctttgataaggcggcctcgggcggcaacaacccgctcgccaggcagctcatcggcgaggggctcgtcgggctctccggggagacgtgggcgcgccaccgccgcgtgatttcgccggcgtttaacatggagagggtgaaggcttggataccagaaatagcagctgcggcatcacctgttctggataagtgggaggccgaaggtgggagccgcactgagtttgagatcgatgtccataaagcattccacactttgagtgcggatgtcatttcctgtgtggcatttggaagcaggctacgaggaggggaaacgaattttccaattgcaggaggaacagatgcaacttgctcttcttgcaatgaggactgtttatattcctggcttcaggtttgtaccaacaaagaagaaccgaaaaaggcagaggttaaaccaggaaatccaatgctccctgcgcaaattgatcgaaatcaatggaacaaaatgtgaggactcaaaaaatttgctggggttaatgctatcagccagcaaagctgggagtgaatacaaaatgggaatcgaagagataatccatgagtgcaagacgttttactttgctgggaaggaaacaacagcgaacctgttgacatgggcaacacttcttcttgcgttgcatcaagagtggcaggtcaaggcccgtgatgaggttcttaaagtgtgcggaaagcatgagcaccctaatgcagaaaacctgagcgatctcaagattgtaactatggtgttaaaagaaaccctcaggctgtatcctccagctacatttatcaatcggactgccactagggatatcaagctgggtaaactagacatcccggctggcacacggctggacttccctatcattcacatccatcgtgaccatgaagtctggggcatggatgcagaggagtttaatccatcaaggtttgcagatggcagcagctatcacctaggtgcttacttcccctttgggatcggccctacaatctgcgttggccagaatcttgcaatggtcgaggccaaggtggcgcttgcaatgacccttcagcggtttgcgttcaccgtttcggcgtcttatgctcatgcaccgatgctggtgttcaccctccagcctcagttcggtgctcaagttcttgtccggaagatatgagccttctatgtgacaaccaataaggtcataaaatttctatatctttttgagtagtctgaaggatccatgaggcctctcctttttttcttcttctttcgaacacaggactctacttttttttgttcaatcctgttcatgaaagacttgtatataagatttgttctctacaggaatctgataaaggcttcaaacacttgagctaaaatggcatgtgttgtacaaaaaccatctagaacctgcatgaatataccgatttggaactgcaagcctcaccgcttgggtttgttg

SEQ ID NO: 19222 - protein, 299 aa, Zea mays subsp. mays
  peptide (1)..(299): Ceres Seq. ID no. 12387994
MSFPVWHLEAGYEEGKRIFQLQEEQMQLALLAMRTVYIPGFRFVPTKKNRKRQRLNQEIQCSLRKLIEINGTKCEDSKNLLGLMLSASKAGSEYKMGIEEIIHECKTFYFAGKETTANLLTWATLLLALHQEWQVKARDEVLKVCGKHEHPNAENLSDLKIVTMVLKETLRLYPPATFINRTATRDIKLGKLDIPAGTRLDFPIIHIHRDHEVWGMDAEEFNPSRFADGSSYHLGAYFPFGIGPTICVGQNLAMVEAKVALAMTLQRFAFTVSASYAHAPMLVFTLQPQFGAQVLVRKI

SEQ ID NO: 19223 - protein, 285 aa, Zea mays subsp. mays
  peptide (1)..(285): Ceres Seq. ID no. 12387995
MAALTSALLFAALLVAAQYVLRLLHSFLWVPFRLERRFRRQGIRWPPRSLVSGNAADYRDLLAAARSAPLSSFRHNGVVARATPQYAVWLARYGRPFVYWFGPRPRLVISDTELVKAVMTDSTGGFDKAASGGNNPLARQLIGEGLVGLSGETWARHRRVISPAFNMERVKAWIPEIAAAASPVLDKWEAEGGSRTEFEIDVHKAFHTLSADVISCVAFGSRLRGGETNFPIAGGTDATCSSCNEDCLYSWLQVCTNKEEPKKAEVKPGNPMLPAQIDRNQWNKM

SEQ ID NO: 19224 - protein, 274 aa, Zea mays subsp. mays
  peptide (1)..(274): Ceres Seq. ID no. 12387996
MQLALLAMRTVYIPGFRFVPTKKNRKRQRLNQEIQCSLRKLIEINGTKCEDSKNLLGLMLSASKAGSEYKMGIEEIIHECKTFYFAGKETTANLLTWATLLLALHQEWQVKARDEVLKVCGKHEHPNAENLSDLKIVTMVLKETLRLYPPATFINRTATRDIKLGKLDIPAGTRLDFPIIHIHRDHEVWGMDAEEFNPSRFADGSSYHLGAYFPFGIGPTICVGQNLAMVEAKVALAMTLQRFAFTVSASYAHAPMLVFTLQPQFGAQVLVRKI

SEQ ID NO: 19225 - DNA, 1911 bp, Zea mays subsp. mays
  misc_feature (1)..(1911): Ceres Seq. ID no. 12375693
  misc_feature (1)..(1911): Ortholog of  Ceres SEQ ID NO 13523550 as cited in SEQ ID NO 58816
gcacgagaccattacctagaacatcctaatcaaaaaacggggccgccggccggactcttctgacttggcaaccgccgcgcagcgcgacgagcgccacctgcttgctgccgcgtgcctgcgtgcgtgtgcgtccaccactgaccccgcgcccgcccgccgcccctgcccctccactccacttgctcactcgtcggctcgtcgcggcccgcttcccccccggccaagggatggacgcgcttcgcctacggccgtccctcctccccgtgcggcccggcgcggcccgcccgcgagatcattttctaccaccatgttgttccatacaacgaaatggtgaaggacgaatttgcttttctagccaaaggacccaaggtcctaccttgcatcaccatcagaaattcttcgaatggaaatcctcctattgtaggatatcacatcggtcattaaatacttctgttaatgcttcggggcaacagctgcagtctgaacctgaaacacatgattctacaaccatctggagggcaatatcatcttctctagatgcattttacagattttcccggccacatactgtcataggaacagcattaagcatagtctcagtttcccttctagctgtccagagcttgtctgatatatcacctttgttcctcactggtttgctggaggcagtggtagctgcccttttcatgaatatctatattgttggactgaaccagttattcgacattgagatagacaaggttaacaagccaactcttccattggcatctggggaatacacccttgcaactggggttgcaatagtttcggtctttgccgctatgagctttggccttggatgggctgttggatcacaacctctgttttgggctcttttcataagctttgttcttgggactgcatattcaatcaatctgccgtaccttcgatggaagagatttgctgttgttgcagcactgtgcatattagcagttcgtgcagtgattgttcagctggccttttttctccacattcagacttttgttttcaggagaccggcagtgttttctaggccattattatttgcaactggatttatgacgttcttctctgttgtaatagcactattcaaggatatacctgacatcgaaggggaccgcatattcggggatccgatccttcagcgtccggttagggcaaaagaaggtcttttggatctgcgttggcttgcttgagatggcctacagcgttgcgatactgatgggagctacctcttcctgtttgtggagcaaaacagcaaccatcgctggccattccatacttgccgcgatcctatggagctgcgcgcgatcggtggacttgacgagcaaagccgccaataacgtccttctacatgttcatctggaagctgttctacgcggagtacctgctcatccctctggtgcggtgagcgcgaggcgaggtggtggcagacggatcggcgtcggcggggcggcaaacaactccacgggagaacttgagtgccggaagtaaactcccgtttgaaagttgaagcgtgcaccaccggcaccgggcagagagagacacggtggctggatggatacggatggcccccccaataaattcccccgtgcatggtaccccacgctgcttgatgatatcccatgtgtccgggtgaccggacctgatcgtctctagagagattggttgcataacgtccaacatagcccgtaggtattgctaccactgctagtatgatactccttcctagtccttgccagcaccagtgacccaaacttggtcggctgagctcagcgctcagcagctttacgtgcatctgcgccttgacttgtgcagtgggcgtcgctagcatgaatgatgtatggtgcgtcacggcctgacggttcgtcagtctgggccgtgttttgtgtc

SEQ ID NO: 19226 - protein, 328 aa, Zea mays subsp. mays
  peptide (1)..(328): Ceres Seq. ID no. 12375694
MDALRLRPSLLPVRPGAARPRDHFLPPCCSIQRNGEGRICFSSQRTQGPTLHHHQKFFEWKSSYCRISHRSLNTSVNASGQQLQSEPETHDSTTIWRAISSSLDAFYRFSRPHTVIGTALSIVSVSLLAVQSLSDISPLFLTGLLEAVVAALFMNIYIVGLNQLFDIEIDKVNKPTLPLASGEYTLATGVAIVSVFAAMSFGLGWAVGSQPLFWALFISFVLGTAYSINLPYLRWKRFAVVAALCILAVRAVIVQLAFFLHIQTFVFRRPAVFSRPLLFATGFMTFFSVVIALFKDIPDIEGDRIFGDPILQRPVRAKEGLLDLRWLA

SEQ ID NO: 19227 - protein, 175 aa, Zea mays subsp. mays
  peptide (1)..(175): Ceres Seq. ID no. 12375695
MNIYIVGLNQLFDIEIDKVNKPTLPLASGEYTLATGVAIVSVFAAMSFGLGWAVGSQPLFWALFISFVLGTAYSINLPYLRWKRFAVVAALCILAVRAVIVQLAFFLHIQTFVFRRPAVFSRPLLFATGFMTFFSVVIALFKDIPDIEGDRIFGDPILQRPVRAKEGLLDLRWLA

SEQ ID NO: 19228 - DNA, 961 bp, Zea mays subsp. mays
  misc_feature (1)..(961): Ceres Seq. ID no. 12420159
  misc_feature (1)..(961): Ortholog of  Ceres SEQ ID NO 13647016 as cited in SEQ ID NO 20325
  misc_feature (1)..(961): Ortholog of  Ceres SEQ ID NO 15179824 as cited in SEQ ID NO 66250
  misc_feature (1)..(961): Ortholog of  Ceres SEQ ID NO 13657872 as cited in SEQ ID NO 66357
attctcgtaagctgaccgtccgtccctgcaatgcaccaggcggaggcggaggcggaggcggtgctctgccagccggcgagcgagttcctgccggtgatgcaggaggtgtacgcggcgctggtggccaaggtggagcgcgccatcccgggcgccaaggtggaggacaacaagttctgcctgtcggtccacttccgttgcgtggaggaggcgtgctgggccgcgctcttcgagcaggtccgcgccgtgctgagggaccacccgggcctgcgcctcaccccagggccgcaaggtgctggaggtccgccccatgatccgctgggacaagggcaaggcgctggagttcctgctccacgccctcggcttcgccgccgacgccgaccgcgacgacgtcttccccatctacgtcggcgacgaccgcaccgacgaggacgccttcagggtgctgcgcgcgcgcgggcacggcgccgggatcctcgtgtccaggttccccaaggacaccagcgcgtccttcacgctacgcgaccccgccgaggtcaaggagttcctgcgcaagctcgtcggcgccaacgacgacagctgatgatccggcccgcgattcgtttccctttcccgccgtgaccagctccgatccgcctgtgtcaagccgctaactcaacctcggctacctacctgctgcaccggcagagggcttccttgttgttgcaactgcatctccatcgagcagcttgctttgggacaagaacagacctagctagtagtacagtagagcccttttgtatcttcgttttttttttggtttccatctctcttgttcatcatgcatgcctgctgttgtttaccatttgcctcggctgaaaaggcttgtattttcggcgcccttcccgcgaggcactgtaactagttgctttgtctgctgtacgtacgcgtaccatgttgaaataatatgtcatgttgaggagcc

SEQ ID NO: 19229 - protein, 195 aa, Zea mays subsp. mays
  peptide (1)..(195): Ceres Seq. ID no. 12420160
MHQAEAEAEAVLCQPASEFLPVMQEVYAALVAKVERAIPGAKVEDNKFCLSVHFRCVEEACWAALFEQVRAVLRDHPGLRLTPGPQGAGGPPHDPLGQGQGAGVPAPRPRLRRRRRPRRRLPHLRRRRPHRRGRLQGAARARARRRDPRVQVPQGHQRVLHATRPRRGQGVPAQARRRQRRQLMIRPAIRFPFPP

SEQ ID NO: 19230 - protein, 173 aa, Zea mays subsp. mays
  peptide (1)..(173): Ceres Seq. ID no. 12420161
MQEVYAALVAKVERAIPGAKVEDNKFCLSVHFRCVEEACWAALFEQVRAVLRDHPGLRLTPGPQGAGGPPHDPLGQGQGAGVPAPRPRLRRRRRPRRRLPHLRRRRPHRRGRLQGAARARARRRDPRVQVPQGHQRVLHATRPRRGQGVPAQARRRQRRQLMIRPAIRFPFPP

SEQ ID NO: 19231 - protein, 102 aa, Zea mays subsp. mays
  peptide (1)..(102): Ceres Seq. ID no. 12420162
SRKLTVRPCNAPGGGGGGGGALPAGERVPAGDAGGVRGAGGQGGARHPGRQGGGQQVLPVGPLPLRGGGVLGRALRAGPRRAEGPPGPAPHPRAARCWRSAP

SEQ ID NO: 19232 - DNA, 1375 bp, Zea mays subsp. mays
  misc_feature (1)..(1375): Ceres Seq. ID no. 12419315
  misc_feature (1)..(1375): Ortholog of  Ceres SEQ ID NO 12562983 as cited in SEQ ID NO 53309
  misc_feature (1)..(1375): Ortholog of  Ceres SEQ ID NO 14309224 as cited in SEQ ID NO 0
aacagcgagctgcagccacgcgcgccggcgaccaaacaaagccagctaggcaccggcaagggagcggacggagcaagcgcgcggccgatcgatcgagcttcagcttgagctccagcaagatggtgaacttcatcgaggcgcagaagccgctgctgtcacggttgatgaagatggccgggctccgccccattgagatggagctggagccgggcacgaccatgcacgtgtgggcgcccaagcaccacgtgggcaagaagggcaccaccatcagcccgctcgagcctaccgccgccaagaagaagaagaagaataggaagagccccgagtcgaggcccaacgtggtgctcatccacggcttcgccgccgagggcaacgtgacgtggcagttcaacttcggcgtgctggtgtcgcgctacaacctgtacatcccggaccttatgttcttcggcaagtcgtcgacgtcgagcgcggaccggtccccggacttccaggccgagtgcgtggcgggggcgctggcgcggctgggcgtggcgcggtgcgacgtggtcgggttcagctacgggggcatggtggcgttcaagctggccgaggcgcggccggggctggtgcggtcgctgtgcgtgtccgggtccgtggtggccatgacggacgcggtgaacagggagaccatggagcggctgggggccgggtcgtccgccgagctgctcatgcccgacacgctcaaggggctcaaggcgctcctctccgtctccatgtacaggaagatgtggttccccgacaggttctacaaggactacctcaaggtgatgttcaccaacaggaaggagaggatggagctgttgcaggggctgataaccagcaacacggacgccaagatccctacattccaacagaaaataatgctgctgtggggcgaggaggacaagatcttcgacatcgagctcgccaggaagatgaaagagcagctgggcgacaactgcttcctgtacggcatccgcaaggccggccacctgctccacgtcgagcggccgtgcgcctacaaccgccagctccagaggtggttcgcctacgtcaactccacagaagaccacgtccaggccagatgatcgacacgccccgccccgctcctgctgccgctgctgctgctgctacatggagatcatgcatgcatatatacacgtcccgtctcagttgatattacctttgcattgttgttgttcgttattgatgttgttattagctgttgctcccaagaaagaagacgctggcagggcagccaacacactgtatgtatgtagtgtgttgcgctggccatggtttcagtacgtgtactctcgatcaagtgtagaccgacctcggtcgtacgtgtcgcctc

SEQ ID NO: 19233 - protein, 367 aa, Zea mays subsp. mays
  peptide (1)..(367): Ceres Seq. ID no. 12419316
QRAAATRAGDQTKPARHRQGSGRSKRAADRSSFSLSSSKMVNFIEAQKPLLSRLMKMAGLRPIEMELEPGTTMHVWAPKHHVGKKGTTISPLEPTAAKKKKKNRKSPESRPNVVLIHGFAAEGNVTWQFNFGVLVSRYNLYIPDLMFFGKSSTSSADRSPDFQAECVAGALARLGVARCDVVGFSYGGMVAFKLAEARPGLVRSLCVSGSVVAMTDAVNRETMERLGAGSSAELLMPDTLKGLKALLSVSMYRKMWFPDRFYKDYLKVMFTNRKERMELLQGLITSNTDAKIPTFQQKIMLLWGEEDKIFDIELARKMKEQLGDNCFLYGIRKAGHLLHVERPCAYNRQLQRWFAYVNSTEDHVQAR

SEQ ID NO: 19234 - protein, 328 aa, Zea mays subsp. mays
  peptide (1)..(328): Ceres Seq. ID no. 12419317
MVNFIEAQKPLLSRLMKMAGLRPIEMELEPGTTMHVWAPKHHVGKKGTTISPLEPTAAKKKKKNRKSPESRPNVVLIHGFAAEGNVTWQFNFGVLVSRYNLYIPDLMFFGKSSTSSADRSPDFQAECVAGALARLGVARCDVVGFSYGGMVAFKLAEARPGLVRSLCVSGSVVAMTDAVNRETMERLGAGSSAELLMPDTLKGLKALLSVSMYRKMWFPDRFYKDYLKVMFTNRKERMELLQGLITSNTDAKIPTFQQKIMLLWGEEDKIFDIELARKMKEQLGDNCFLYGIRKAGHLLHVERPCAYNRQLQRWFAYVNSTEDHVQAR

SEQ ID NO: 19235 - protein, 313 aa, Zea mays subsp. mays
  peptide (1)..(313): Ceres Seq. ID no. 12419318
MKMAGLRPIEMELEPGTTMHVWAPKHHVGKKGTTISPLEPTAAKKKKKNRKSPESRPNVVLIHGFAAEGNVTWQFNFGVLVSRYNLYIPDLMFFGKSSTSSADRSPDFQAECVAGALARLGVARCDVVGFSYGGMVAFKLAEARPGLVRSLCVSGSVVAMTDAVNRETMERLGAGSSAELLMPDTLKGLKALLSVSMYRKMWFPDRFYKDYLKVMFTNRKERMELLQGLITSNTDAKIPTFQQKIMLLWGEEDKIFDIELARKMKEQLGDNCFLYGIRKAGHLLHVERPCAYNRQLQRWFAYVNSTEDHVQAR

SEQ ID NO: 19236 - DNA, 1201 bp, Zea mays subsp. mays
  misc_feature (1)..(1201): Ceres Seq. ID no. 12419311
  misc_feature (1)..(1201): Ortholog of  Ceres SEQ ID NO 15226526 as cited in SEQ ID NO 54159
gcacgagaccattacctagaacatcctaatctaaaaacaggatctcccactcgtctcgaagacggccgcaccgcagacgccgcgggaatttaacgagagagactggcgccgcgcctcgcggagaccgcagcctggagccagcccgtgacgctgacgcggcgggccacgggcggggcgatgccaggagccatggagccggcagaggcggacgcggcggcagccgctgttgcgggaaggcggccgacggcgtccgagcgccggcgcatgtaccgcgacctggcgctgtcgctgcggtgcggactccgcgacgcggcccgcggggttctcgttcctgcgcctgcgcggcctccgcgcgctcctccgcgcccctccgctccacctccgacgccgacgccgacgcccgacgcgggcctcttccgcgactcccagtccatccgagatctccaagtgatcccggtgctgttcgagcacagcctgcgcaaggcgaccggggacgcggtgctgacggtggcgcaggtgctgggcatggagcccgccgccgccaggctcaggaaccccgccacggactccgaggtcgtgcttgcgctcagggtgctcgaaggttgctgcctcctctgcccggcctgcgcagccgcggcgcaccgctacaatgccgtcaaggtggttttgaatatactgatgacacgtggtatcctcgagcaaagagcatgtctcgacactctcttagcgttgctggtgaattgttcaggaaacctgacggatttcaaagaacaagatggactaaataaaattgctgtcattgtaaaagatgcaaatagggatgaccatgtaaggttaaaatgttccgagtttctgcttctttactctggaaacgcaaaagaaaaatgtggcgcagattccgagtctaatatgcgagaagatttggcaaaggttttcggagaaaaatgtgcatcatttatctcctcaatgaacctattcagctcaactctagagtcacaaatgaggcaatctgagctaagctttcttgcagagcatgtgttggattacatgtagagccatactaaagataaccataatcgtgccattttctccacacacaacagagttcagtgctccaaaatgtatgtttcctattaacttgggtaattattgacgatgctactgtatatgaactcaactacgagaatgttactgttcacct

SEQ ID NO: 19237 - protein, 291 aa, Zea mays subsp. mays
  peptide (1)..(291): Ceres Seq. ID no. 12419312
MPGAMEPAEADAAAAAVAGRRPTASERRRMYRDLALSLRCGLRDAARGVLVPAPARPPRAPPRPSAPPPTPTPTPDAGLFRDSQSIRDLQVIPVLFEHSLRKATGDAVLTVAQVLGMEPAAARLRNPATDSEVVLALRVLEGCCLLCPACAAAAHRYNAVKVVLNILMTRGILEQRACLDTLLALLVNCSGNLTDFKEQDGLNKIAVIVKDANRDDHVRLKCSEFLLLYSGNAKEKCGADSESNMREDLAKVFGEKCASFISSMNLFSSTLESQMRQSELSFLAEHVLDYM

SEQ ID NO: 19238 - protein, 287 aa, Zea mays subsp. mays
  peptide (1)..(287): Ceres Seq. ID no. 12419313
MEPAEADAAAAAVAGRRPTASERRRMYRDLALSLRCGLRDAARGVLVPAPARPPRAPPRPSAPPPTPTPTPDAGLFRDSQSIRDLQVIPVLFEHSLRKATGDAVLTVAQVLGMEPAAARLRNPATDSEVVLALRVLEGCCLLCPACAAAAHRYNAVKVVLNILMTRGILEQRACLDTLLALLVNCSGNLTDFKEQDGLNKIAVIVKDANRDDHVRLKCSEFLLLYSGNAKEKCGADSESNMREDLAKVFGEKCASFISSMNLFSSTLESQMRQSELSFLAEHVLDYM

SEQ ID NO: 19239 - protein, 262 aa, Zea mays subsp. mays
  peptide (1)..(262): Ceres Seq. ID no. 12419314
MYRDLALSLRCGLRDAARGVLVPAPARPPRAPPRPSAPPPTPTPTPDAGLFRDSQSIRDLQVIPVLFEHSLRKATGDAVLTVAQVLGMEPAAARLRNPATDSEVVLALRVLEGCCLLCPACAAAAHRYNAVKVVLNILMTRGILEQRACLDTLLALLVNCSGNLTDFKEQDGLNKIAVIVKDANRDDHVRLKCSEFLLLYSGNAKEKCGADSESNMREDLAKVFGEKCASFISSMNLFSSTLESQMRQSELSFLAEHVLDYM

SEQ ID NO: 19240 - DNA, 1859 bp, Zea mays subsp. mays
  misc_feature (1)..(1859): Ceres Seq. ID no. 12362446
  misc_feature (1)..(1859): Ortholog of  Ceres SEQ ID NO 15170885 as cited in SEQ ID NO 54326
  misc_feature (1)..(1859): Ortholog of  Ceres SEQ ID NO 14311609 as cited in SEQ ID NO 58341
gtaaaggaaggcgaggcaatacacccaccgagagagaagaactaagctttggacacggaagatcgcaagagcctcaaccacactattcaggtggcctaggactctacgagggacgttcgtcgtgcctcggatgagatgggcggcggaggaggaggaggaggcgggaagtccgagaaggcgcggcgttcgtcggcgcgggtgaggctgtgggtcgcgcgcgccagcaccgtgctgctctggacgtgcctcgtccagctcgcggcctaccgggagctctgggcgcccagcgtgctctccaggtggcctggctgcctcaaccagccgcacgtcgcgcggaggccatcggagcgtgtggcggacgccggccagacgcaggcagcgcgcgcgttggtggtgctcccacccaaaagaatctacaggaacaacggctatctaatggtctcctgcaacggcgggcttaaccagatgcgagcagcaatttgtgatatggtaaccatcgcaaggtatcttaacgttactctcatagtaccagagttggataaggcttcattttgggctgatcccagcgatttccaagacatatttgacgtggactacttcatagcgtcgctgagagacgaggtccggatcctgaggcagctgccgccgaggctcaagagaagagtggagatgggatccctccggtccctgccaccagtcagctggtccgacatcggctactaccgccgtcagattctgcctctggtaaagaagtacaaggtcgttcacctgaacaggacggatgcccggctcgcgaacaacggcctacccgtggagatgcagagactgcggtgtccgtcaactacaatgccctgaggtttacccctgaaatcgaggatctgggcagacgcctggttcgagctcttcgccggaacgggccctttgtggtccttcacttgcggtatgagatggacatgcttgccttctccggatgcacgcacggttgcagcagcatggaggctcaagagctcacgaagatgagatatgcctacccatggtggaaggagaaagtgatcgactcggacgccaagaggaaagacgggctgtgtccgttaacgccggaggagaccgcgctggtgctgcaggcgctcggcattgaccgcggctaccagatctacattgccgcaggcgaaatttacggtgggcagagaagaatggctgcgctcacctcggcttatcccaacgtggttagaaaggagacgctgttgccttgggaagtcggcctcttccagaaccactcctcccagatggctgcgctggactacatggtgtccctggagagcgatgtcttcatacccacctacgacggcaacatggccaaggtcgtagaaggccatcgcaggtacctggggtttaggaagacggtgctgctggaccggaggcgtatcgtcgagctcgtcgacgagtacaggaacgggacgttgagctggaccgacttctcgtctgccgtcatggcgtcgcacaccagccgcatgggcgaaccgtccaggaggcagacggttcctgacagacccaaggaagaggactacttctacgcgaacccgcacgagtgcctgcaccagccggaagatgtctcggccttgtgatactgatacagtggatgatgcgcgggctttcggaatccagaaccacatgtatatgttaatagcgcattcgacaccgttgcgttggcagaggattaaacgtaaacggacgaggagggcctcgtttggtccggccggttgaacgggcatgtgagttaggtttcggtacagattcatggaacggtggttcgccgattcttttttctgttcagaagaataagcagaccctttcgttgc

SEQ ID NO: 19241 - protein, 239 aa, Zea mays subsp. mays
  peptide (1)..(239): Ceres Seq. ID no. 12362447
MGGGGGGGGGKSEKARRSSARVRLWVARASTVLLWTCLVQLAAYRELWAPSVLSRWPGCLNQPHVARRPSERVADAGQTQAARALVVLPPKRIYRNNGYLMVSCNGGLNQMRAAICDMVTIARYLNVTLIVPELDKASFWADPSDFQDIFDVDYFIASLRDEVRILRQLPPRLKRRVEMGSLRSLPPVSWSDIGYYRRQILPLVKKYKVVHLNRTDARLANNGLPVEMQRLRCPSTTMP

SEQ ID NO: 19242 - protein, 225 aa, Zea mays subsp. mays
  peptide (1)..(225): Ceres Seq. ID no. 12362448
MDMLAFSGCTHGCSSMEAQELTKMRYAYPWWKEKVIDSDAKRKDGLCPLTPEETALVLQALGIDRGYQIYIAAGEIYGGQRRMAALTSAYPNVVRKETLLPWEVGLFQNHSSQMAALDYMVSLESDVFIPTYDGNMAKVVEGHRRYLGFRKTVLLDRRRIVELVDEYRNGTLSWTDFSSAVMASHTSRMGEPSRRQTVPDRPKEEDYFYANPHECLHQPEDVSAL

SEQ ID NO: 19243 - protein, 223 aa, Zea mays subsp. mays
  peptide (1)..(223): Ceres Seq. ID no. 12362449
MLAFSGCTHGCSSMEAQELTKMRYAYPWWKEKVIDSDAKRKDGLCPLTPEETALVLQALGIDRGYQIYIAAGEIYGGQRRMAALTSAYPNVVRKETLLPWEVGLFQNHSSQMAALDYMVSLESDVFIPTYDGNMAKVVEGHRRYLGFRKTVLLDRRRIVELVDEYRNGTLSWTDFSSAVMASHTSRMGEPSRRQTVPDRPKEEDYFYANPHECLHQPEDVSAL

SEQ ID NO: 19244 - DNA, 990 bp, Zea mays subsp. mays
  misc_feature (1)..(990): Ceres Seq. ID no. 12419778
  misc_feature (1)..(990): Ortholog of  Ceres SEQ ID NO 12610381 as cited in SEQ ID NO 55740
  misc_feature (1)..(990): Ortholog of  Ceres SEQ ID NO 12615300 as cited in SEQ ID NO 62948
  misc_feature (1)..(990): Ortholog of  Ceres SEQ ID NO 14313260 as cited in SEQ ID NO 66814
gcacgagaccattacctagaacatcctaatcgaaaaaaaccatcacaagctctagttttccagctctgcagcacacaagctagttaagctcctgcaacctccaagaaactaggcaatcgtttcctcctctgcttcagtatctccccttccagcagtagctaagctgccatatggcgacaagcaggcttgcgctcgtgtccgtgtttgccgcagccgtcctgctgggcatggcgtcggcggcgacctacaacgtcggcgagccgggcgggtcctgggacctgcgtaccaactacggcacctgggtctcctccaagaggttccacccgggtgaccagatcgtgttcaagtactcgccccaggcgcacgacgtggtggaggtgaacaaggcggactacgactcctgctcaatcgccagccccgtcgccacccacaactccggcaacgacgccatcgccctggcctcccccggcacccgctacttcatctgcggcttccctggccactgcgacgcgggcatgaagatccagatcaacgtcgtgcccagcgccaactccctcggccccgccagcgctcccgccgccaactctcccgtctctcccccgcccatgtccgcgccctcttccgccgctaccaaggccaccggtttcggcgcccttgccgccgtcatgatcgccgcaggcctcatggcttactagatactctgtcgcttgctgcgtacatttagttttccttagatattatatatacgttgtattgtattcttttgagagatcagagttcagacgaatgacatggcatacatgtatctacgtaaagacagatgactagtttatacattattcatattgtatatcattcaggtttcgctcttcggtgtatgtatcgatattcattcagatagatagagatagagatgactagtaatttcctggtgtagttttctctttgttgttccgattatagatatgaatgtaatgaatgattagtatt

SEQ ID NO: 19245 - protein, 174 aa, Zea mays subsp. mays
  peptide (1)..(174): Ceres Seq. ID no. 12419779
MATSRLALVSVFAAAVLLGMASAATYNVGEPGGSWDLRTNYGTWVSSKRFHPGDQIVFKYSPQAHDVVEVNKADYDSCSIASPVATHNSGNDAIALASPGTRYFICGFPGHCDAGMKIQINVVPSANSLGPASAPAANSPVSPPPMSAPSSAATKATGFGALAAVMIAAGLMAY

SEQ ID NO: 19246 - protein, 155 aa, Zea mays subsp. mays
  peptide (1)..(155): Ceres Seq. ID no. 12419780
MASAATYNVGEPGGSWDLRTNYGTWVSSKRFHPGDQIVFKYSPQAHDVVEVNKADYDSCSIASPVATHNSGNDAIALASPGTRYFICGFPGHCDAGMKIQINVVPSANSLGPASAPAANSPVSPPPMSAPSSAATKATGFGALAAVMIAAGLMAY

SEQ ID NO: 19247 - DNA, 1732 bp, Zea mays subsp. mays
  misc_feature (1)..(1732): Ceres Seq. ID no. 12375791
  misc_feature (1)..(1732): Ortholog of  Ceres SEQ ID NO 15172174 as cited in SEQ ID NO 60481
  misc_feature (1)..(1732): Ortholog of  Ceres SEQ ID NO 14302875 as cited in SEQ ID NO 66242
  misc_feature (1)..(1732): Ortholog of  Ceres SEQ ID NO 13660287 as cited in SEQ ID NO 67316
  misc_feature (1)..(1732): Ortholog of  Ceres SEQ ID NO 14307892 as cited in SEQ ID NO 67490
aaataatagaggcagaggcagagccaagacggttccgttcagtggctggcggcgcatagatagatagccatggcgaagaagctagtggaggaagcgctcctcgcagcggcggacgagcactaggaggagaacctgagcgtgcgcgaggagctgaagaagcagctatggctggctgggcccatgatcgccggcgcgctcctgcagaacgtgatccagatgatctccgtcatgtacgtgggacaccttggagagcccccctcgctggctcatccatggccaactccttcgccaccgtcaccggcctcagcctgctgctaggcatggcaagcgctctagacacactgtgcggccaagcgttcggcgcgaggcagtactatctcctgggcatctacaagcagcgcgccatgttcctgctgaccctggtgagcgtccctctgtccgtggtgtggttctacaccggcgagatcctcctcctgttcggccaggacccggacatcgccgcagaggccggcacctacgcccggtggatgatcccgctgctgttcgcgtacggcctgctgcagtgccacgtccggttcctccagacgcagaacatcgtggtgcccgtgatggcgagcgccggcgccgccgcggcctgccacgtcgtcgtctgctgggcgctggtgtacgcgctcgggatgggcagcaagggcgcggcgctcagcaacgccatctcctactgggtcaacgtggccgtgctgtccgtgtacgtgagggtgtccagcgcctgcaaggagacgtggacgggcttctccacggaggccttccgcgacgcgctcggcttcttcaggcttgcggtcccgtccgctctcatggtctgcttggagatgtggtcgtttgaactcattgtgctcctctcgggccttcttcccaacccaaaactggagacctccgtgctgtcgatcagccttaacactgctgcgttcgtgtggatgatcccctttgggcttagctcagctatcagcactcgcgtgtcgaatgagctgggtgccgggcgtcctcgagccgcccgccttgcggtgcgtgtcgttgtgttgctgtctgtcgccgaagggctaggcgtgggcctcatcctggtgtgcgtgcgctacgtctggggccatgcctacagcaacgtcgaggaggtggtgacgtacgtggccaacatgatgctggtcattgcagtgtccaacttcttcgatggtatccagtgcgtgctttcaggtgtggctagaggctgcggatggcagaagatcggtgcctgcatcaaccttggcgcctactacatcgtcggcatcccctctgcttacctcatagcgttcgtcctgcgtgtcggtgggacgggactctggttgggcatcatatgtgggctcatcgtacagctccttctgctcgcgatcatcactctctgcaccaactgggatagcgaggcaacgaaggcaaagaacagagtgttcaattcttcctctccagcatccggaacgtgaacgcattggcggtgaagtaaacggcgagcaaacacggaaactataggagttatgcctgtagttttggaaacttcagcacctctgatcctctctgattttctggctcccacattaactctaatggttagcattgacacttgcagtctggattttgaaacataaatgcgttccttgaacagagtagaggaagggaccaatggaaaacttatacaatagcgttagatcgc

SEQ ID NO: 19248 - protein, 446 aa, Zea mays subsp. mays
  peptide (1)..(446): Ceres Seq. ID no. 12375792
MAGWAHDRRRAPAERDPDDLRHVRGTPWRAPLAGSSMANSFATVTGLSLLLGMASALDTLCGQAFGARQYYLLGIYKQRAMFLLTLVSVPLSVVWFYTGEILLLFGQDPDIAAEAGTYARWMIPLLFAYGLLQCHVRFLQTQNIVVPVMASAGAAAACHVVVCWALVYALGMGSKGAALSNAISYWVNVAVLSVYVRVSSACKETWTGFSTEAFRDALGFFRLAVPSALMVCLEMWSFELIVLLSGLLPNPKLETSVLSISLNTAAFVWMIPFGLSSAISTRVSNELGAGRPRAARLAVRVVVLLSVAEGLGVGLILVCVRYVWGHAYSNVEEVVTYVANMMLVIAVSNFFDGIQCVLSGVARGCGWQKIGACINLGAYYIVGIPSAYLIAFVLRVGGTGLWLGIICGLIVQLLLLAIITLCTNWDSEATKAKNRVFNSSSPASGT

SEQ ID NO: 19249 - protein, 410 aa, Zea mays subsp. mays
  peptide (1)..(410): Ceres Seq. ID no. 12375793
MANSFATVTGLSLLLGMASALDTLCGQAFGARQYYLLGIYKQRAMFLLTLVSVPLSVVWFYTGEILLLFGQDPDIAAEAGTYARWMIPLLFAYGLLQCHVRFLQTQNIVVPVMASAGAAAACHVVVCWALVYALGMGSKGAALSNAISYWVNVAVLSVYVRVSSACKETWTGFSTEAFRDALGFFRLAVPSALMVCLEMWSFELIVLLSGLLPNPKLETSVLSISLNTAAFVWMIPFGLSSAISTRVSNELGAGRPRAARLAVRVVVLLSVAEGLGVGLILVCVRYVWGHAYSNVEEVVTYVANMMLVIAVSNFFDGIQCVLSGVARGCGWQKIGACINLGAYYIVGIPSAYLIAFVLRVGGTGLWLGIICGLIVQLLLLAIITLCTNWDSEATKAKNRVFNSSSPASGT

SEQ ID NO: 19250 - protein, 394 aa, Zea mays subsp. mays
  peptide (1)..(394): Ceres Seq. ID no. 12375794
MASALDTLCGQAFGARQYYLLGIYKQRAMFLLTLVSVPLSVVWFYTGEILLLFGQDPDIAAEAGTYARWMIPLLFAYGLLQCHVRFLQTQNIVVPVMASAGAAAACHVVVCWALVYALGMGSKGAALSNAISYWVNVAVLSVYVRVSSACKETWTGFSTEAFRDALGFFRLAVPSALMVCLEMWSFELIVLLSGLLPNPKLETSVLSISLNTAAFVWMIPFGLSSAISTRVSNELGAGRPRAARLAVRVVVLLSVAEGLGVGLILVCVRYVWGHAYSNVEEVVTYVANMMLVIAVSNFFDGIQCVLSGVARGCGWQKIGACINLGAYYIVGIPSAYLIAFVLRVGGTGLWLGIICGLIVQLLLLAIITLCTNWDSEATKAKNRVFNSSSPASGT

SEQ ID NO: 19251 - DNA, 1742 bp, Zea mays subsp. mays
  misc_feature (1)..(1742): Ceres Seq. ID no. 12595019
  misc_feature (1)..(1742): Ortholog of  Ceres SEQ ID NO 12784091 as cited in SEQ ID NO 67615
  misc_feature (1)..(1742): Ortholog of  Ceres SEQ ID NO 15177688 as cited in SEQ ID NO 0
ctagaacatcctaatcgaaaagcaatgggaagcaaatggccaaccaatagcaaaaaggcagccgtgtatcgatcgccttatccgggtcctgtggcactggcacaccgcgcgtccggatttggctgagtagctgactagctgagcgagcaatccatcccttcgcccgccgcaccatggaagccctcgcctcggcgcctcgggcgctcttcccgcgcgcgtgcccagtggcgacgccggccggcccagcccggcgccgctccgccgctcctcacatctgcagggcctccgcggcggccggggaggagacgacgccgccgccgccgccggcggccgctcccaagaagatcctcaagaagaagcccgtctactcgatgaagaaagggcagattgtgcgcgtggacaaggagaagtacctgaacagcatcaattatctgtcagtgggacacccgcccttctacaaggggctggactacatataccaagaccgcggcgaggtcttggatatcaggaacttcgaaacaggagaatacgccctgatcgcttgggtggggatcccgacgccaccggcatggctaccaacctacatgctcattaagtcggacaagctcgactacgagaggatatatggccggccggcggcctcgcagggcaccgtagcgccgccgccgaattcatgcttcatttcgcatcaggagtcggccaagcaggacacacctcttgttgttgacttgttgtaggtatatacgtacatgccagtattgccagaacagtcgacagaggcaatctgagacctcagctgctggaataatcaggaagtagatcgagagcgacgtacgatgacgagattcataattgctgctgcacatcacctgaggccggggctgaagcacggcatgttctcccgagaggaagaggagaccgtcatgagcctccacgccaagctcggcaacaagtggtcccagatcgcacggcatctgccgggacggacggacaacgaggtgaagaactactggaactcctacctcaagaagcgtgtcgagggcggcgcgcaggcgaagggctcggcggacccggcgacacccgcccgctccgacgacgtgcacgggagcccggaccccagcgagaacggccagaggtccgtcagccggccggcgaactctggctcgtccgagccggcgggggagtcgtcctcggcggacgactctagctgcctcaccgtcaccgagcctgcgcccgcggtgcggaccgcacgcgcccgtgctccccaaggtcatgttcgcggactggctggacatggactacggaaccagcctgctggcgctgggtccggacgccggtttcttcgacgtggccggccgcagcccgggccagggcctgagccaccaggggtctgcgcaggttgacgggccgtgcggcgtcgtggattccctgcacggcctcggcgtcggcgtcggcgtcggcggcatgtgctgggagttcgacggcgcggcggcggagcagctggacgtgcagggaggagagttctgcgatttgctctccatgagcgagttcctcgggatcaactaggcgtcgggccgttctcttcttcccaacgattcatcttgaagcatccttgtcaaatctgtttcttccgtaggcgagagtgtaaaaaactgtgtgttataccaatgtgcagttactaaagtgtatagtatatgcagaggagctgagtaaagatgtgtgaggattgtcctttccggtcc

SEQ ID NO: 19252 - protein, 188 aa, Zea mays subsp. mays
  peptide (1)..(188): Ceres Seq. ID no. 12595020
MTRFIIAAAHHLRPGLKHGMFSREEEETVMSLHAKLGNKWSQIARHLPGRTDNEVKNYWNSYLKKRVEGGAQAKGSADPATPARSDDVHGSPDPSENGQRSVSRPANSGSSEPAGESSSADDSSCLTVTEPAPAVRTARARAPQGHVRGLAGHGLRNQPAGAGSGRRFLRRGRPQPGPGPEPPGVCAG

SEQ ID NO: 19253 - protein, 187 aa, Zea mays subsp. mays
  peptide (1)..(187): Ceres Seq. ID no. 12595021
MEALASAPRALFPRACPVATPAGPARRRSAAPHICRASAAAGEETTPPPPPAAAPKKILKKKPVYSMKKGQIVRVDKEKYLNSINYLSVGHPPFYKGLDYIYQDRGEVLDIRNFETGEYALIAWVGIPTPPAWLPTYMLIKSDKLDYERIYGRPAASQGTVAPPPNSCFISHQESAKQDTPLVVDLL

SEQ ID NO: 19254 - protein, 169 aa, Zea mays subsp. mays
  peptide (1)..(169): Ceres Seq. ID no. 12595022
MFSREEEETVMSLHAKLGNKWSQIARHLPGRTDNEVKNYWNSYLKKRVEGGAQAKGSADPATPARSDDVHGSPDPSENGQRSVSRPANSGSSEPAGESSSADDSSCLTVTEPAPAVRTARARAPQGHVRGLAGHGLRNQPAGAGSGRRFLRRGRPQPGPGPEPPGVCAG

SEQ ID NO: 19255 - DNA, 890 bp, Zea mays subsp. mays
  misc_feature (1)..(890): Ceres Seq. ID no. 13499377
  misc_feature (1)..(890): Ortholog of  Ceres SEQ ID NO 13594090 as cited in SEQ ID NO 51093
tagaacatcctaatcaaaagaccaaccagccaaaacacgcccgcgcgcctgtttgttcggccggaggacgccatggccatggaggagggatcaggagcggtggagaaagggccggccgtgggcacggtggctgacgcctccgccagcgtcatcggcgaaggcgccgtgaaggaggaggccgggggcagacggcagccgtcggccggctacgcggccgtcgtgattggcggcaccttcgaccgcctacaccagggccaccatctcttcctgaaggcggcagcggagctggcgagggagaggatcgtggtcggcgtctgcgacggcccgatgctcgccaagaaacagtacgccgacctgatacaaccgatcgagaagcggatgcagaacgccaaggattatattaagtccataaagcccgaccttgatgttcatgtggagcccatcgtcgaccctttcggcccatccatcgttgacccaggccttgaggccatcattgtcagcaaggagacgttgccgggagggcacgctgtcaacaggaagagagcagagagagggctcactcagctgcagatcgaggtgatagagctggtgccagaggagtcgacgggggacaagataagttccacggcattcagaaagatggaagccgagagggcgctgcagcaacagaataaacaagaagatacagcagtaggcactccggttggggtgcaaaacatagcggttcagtcacatggagcatagtacatgaaccgaagttctgttgcctgtacctttttttaaaaaagtacatgaaactttgaggtctctacttccatcacatacaaagggacaatgcttctttgcccaaacatggactgatcatcaatacagaaaagttccagtttctt

SEQ ID NO: 19256 - protein, 223 aa, Zea mays subsp. mays
  peptide (1)..(223): Ceres Seq. ID no. 13499378
MAMEEGSGAVEKGPAVGTVADASASVIGEGAVKEEAGGRRQPSAGYAAVVIGGTFDRLHQGHHLFLKAAAELARERIVVGVCDGPMLAKKQYADLIQPIEKRMQNAKDYIKSIKPDLDVHVEPIVDPFGPSIVDPGLEAIIVSKETLPGGHAVNRKRAERGLTQLQIEVIELVPEESTGDKISSTAFRKMEAERALQQQNKQEDTAVGTPVGVQNIAVQSHGA

SEQ ID NO: 19257 - protein, 221 aa, Zea mays subsp. mays
  peptide (1)..(221): Ceres Seq. ID no. 13499379
MEEGSGAVEKGPAVGTVADASASVIGEGAVKEEAGGRRQPSAGYAAVVIGGTFDRLHQGHHLFLKAAAELARERIVVGVCDGPMLAKKQYADLIQPIEKRMQNAKDYIKSIKPDLDVHVEPIVDPFGPSIVDPGLEAIIVSKETLPGGHAVNRKRAERGLTQLQIEVIELVPEESTGDKISSTAFRKMEAERALQQQNKQEDTAVGTPVGVQNIAVQSHGA

SEQ ID NO: 19258 - protein, 138 aa, Zea mays subsp. mays
  peptide (1)..(138): Ceres Seq. ID no. 13499380
MLAKKQYADLIQPIEKRMQNAKDYIKSIKPDLDVHVEPIVDPFGPSIVDPGLEAIIVSKETLPGGHAVNRKRAERGLTQLQIEVIELVPEESTGDKISSTAFRKMEAERALQQQNKQEDTAVGTPVGVQNIAVQSHGA

SEQ ID NO: 19259 - DNA, 434 bp, Zea mays subsp. mays
  misc_feature (1)..(434): Ceres Seq. ID no. 1852863
  misc_feature (1)..(434): Ortholog of  Ceres SEQ ID NO 13655434 as cited in SEQ ID NO 64337
aaaaatgtgtaccttcagtactcaaatagacaggagattgtcaacaacaaggcaactggggaaggttcaggcaacgttttgcttgtgggaatggagggtgttgcaccagattctgtcagcattgatgttctacacgtggtattttctgctttcggatttgttcataagatcgctacctttgagaaagcatctggttatcaggctttgattcagttttctgatgctgaaactgcaacatctgcaaaagctgcactggatggtagatgcattcctagctatttgctaccagaactggatgtggcctgcactttgagaataacctattcagcacacagtgttctcaacgtcaagtatcagagccacaggagtagggacttcactaatccttaccttccttttctggactctgcyaaagatggctctggaccggatgg

SEQ ID NO: 19260 - protein, 144 aa, Zea mays subsp. mays
  peptide (1)..(144): Ceres Seq. ID no. 1852864
  misc_feature (137)..(137): Xaa is any aa, unknown or other
KNVYLQYSNRQEIVNNKATGEGSGNVLLVGMEGVAPDSVSIDVLHVVFSAFGFVHKIATFEKASGYQALIQFSDAETATSAKAALDGRCIPSYLLPELDVACTLRITYSAHSVLNVKYQSHRSRDFTNPYLPFLDSXKDGSGPD

SEQ ID NO: 19261 - protein, 114 aa, Zea mays subsp. mays
  peptide (1)..(114): Ceres Seq. ID no. 1852865
  misc_feature (107)..(107): Xaa is any aa, unknown or other
MEGVAPDSVSIDVLHVVFSAFGFVHKIATFEKASGYQALIQFSDAETATSAKAALDGRCIPSYLLPELDVACTLRITYSAHSVLNVKYQSHRSRDFTNPYLPFLDSXKDGSGPD

SEQ ID NO: 19262 - DNA, 1838 bp, Zea mays subsp. mays; identical to SEQ ID NO: 8854
  misc_feature (1)..(1838): Ceres Seq. ID no. 12372855
  misc_feature (1)..(1838): Ortholog of  Ceres SEQ ID NO 14312423 as cited in SEQ ID NO 55259

SEQ ID NO: 19263 - protein, 551 aa, Zea mays subsp. mays; identical to SEQ ID NO: 8855
  peptide (1)..(551): Ceres Seq. ID no. 12372856

SEQ ID NO: 19264 - protein, 540 aa, Zea mays subsp. mays; identical to SEQ ID NO: 8856
  peptide (1)..(540): Ceres Seq. ID no. 12372857

SEQ ID NO: 19265 - protein, 536 aa, Zea mays subsp. mays; identical to SEQ ID NO: 8857
  peptide (1)..(536): Ceres Seq. ID no. 12372858

SEQ ID NO: 19266 - DNA, 1189 bp, Zea mays subsp. mays
  misc_feature (1)..(1189): Ceres Seq. ID no. 12358770
  misc_feature (1)..(1189): Ortholog of  Ceres SEQ ID NO 15177963 as cited in SEQ ID NO 59105
actatatatacagacaccatgcatgtcatcgtctctcgatctattcgatcgacaagccgtgtgttgagtcatttcaaaacaaccagagaaacacatggccaacatccccaagtatcgctggacccaaaaccccttaatccttctatcttgcgctggtgcggtgctggcagtttctactctgatgctgccagtgcctgctgcatcccaaactataaatttcaagaatctttgcattggtgtccataagatcctagacgcatgtgtgggtgccaatgccgaactacgccaagtgtctatggccgccggtgcgaggaacgctagggcgctcctgcttaacagtcagggtatatctgggccacttcccacgggtttgggcgccttctccaacttgagttacgtcgccctcgccaacaacaagctcaccgggccaatcccaccatcagtcgggcacctgcaccactccctccgcgagattgtcttcctcaacaaccagctctccggctgcctccccggcgagctagggatgctcagcaaggcggtcgtcatggacgccggcatgaatcagctcaccggtccaatccctcctctcttttcctgcctcagcagagtcgagcagctcaacctggccgggaaccgcctctatggccatgttcccgacgctctctgcaggctcgcggggccggctggccgcctttccaatctaaccttgtctggcaactactttgtcgccgtcgggccggcatgcgcagcgctgatcaaagacggcgtcctggacgtgaagaacaactgcatttcgggctttgccaaccagaggcctccggcggagtgtgcagcgttccagagccagccaaagacgtgcccggaggaggcgagcactcaggtgtcatgcccagccgcagctaccatgcacatgaacgctgcgccgccgagggatcagcggaagaccaccagggactactacagctacgtgacgtacgctagcctgcgttagtgaggcgccacgtacggccatgcaatgacgcgccaccagtacctatagctggaacttggctatatgtgttatcttcttgtatcattattaattattttgtaccatgcatgtgttggtgtgctgcttgtgattgttgtttgttcgtttgtatcaggtgctactggcatatcttatatattacacgccacttgttagtgt

SEQ ID NO: 19267 - protein, 298 aa, Zea mays subsp. mays
  peptide (1)..(298): Ceres Seq. ID no. 12358771
MANIPKYRWTQNPLILLSCAGAVLAVSTLMLPVPAASQTINFKNLCIGVHKILDACVGANAELRQVSMAAGARNARALLLNSQGISGPLPTGLGAFSNLSYVALANNKLTGPIPPSVGHLHHSLREIVFLNNQLSGCLPGELGMLSKAVVMDAGMNQLTGPIPPLFSCLSRVEQLNLAGNRLYGHVPDALCRLAGPAGRLSNLTLSGNYFVAVGPACAALIKDGVLDVKNNCISGFANQRPPAECAAFQSQPKTCPEEASTQVSCPAAATMHMNAAPPRDQRKTTRDYYSYVTYASLR

SEQ ID NO: 19268 - protein, 269 aa, Zea mays subsp. mays
  peptide (1)..(269): Ceres Seq. ID no. 12358772
MLPVPAASQTINFKNLCIGVHKILDACVGANAELRQVSMAAGARNARALLLNSQGISGPLPTGLGAFSNLSYVALANNKLTGPIPPSVGHLHHSLREIVFLNNQLSGCLPGELGMLSKAVVMDAGMNQLTGPIPPLFSCLSRVEQLNLAGNRLYGHVPDALCRLAGPAGRLSNLTLSGNYFVAVGPACAALIKDGVLDVKNNCISGFANQRPPAECAAFQSQPKTCPEEASTQVSCPAAATMHMNAAPPRDQRKTTRDYYSYVTYASLR

SEQ ID NO: 19269 - protein, 231 aa, Zea mays subsp. mays
  peptide (1)..(231): Ceres Seq. ID no. 12358773
MAAGARNARALLLNSQGISGPLPTGLGAFSNLSYVALANNKLTGPIPPSVGHLHHSLREIVFLNNQLSGCLPGELGMLSKAVVMDAGMNQLTGPIPPLFSCLSRVEQLNLAGNRLYGHVPDALCRLAGPAGRLSNLTLSGNYFVAVGPACAALIKDGVLDVKNNCISGFANQRPPAECAAFQSQPKTCPEEASTQVSCPAAATMHMNAAPPRDQRKTTRDYYSYVTYASLR

SEQ ID NO: 19270 - DNA, 1588 bp, Zea mays subsp. mays
  misc_feature (1)..(1588): Ceres Seq. ID no. 12376845
  misc_feature (1)..(1588): Ortholog of  Ceres SEQ ID NO 14304231 as cited in SEQ ID NO 56472
gagaccattacctagaacatcctaatcgaaaaaccgattcccacgtgattgcggcgcggccgcgcgaggagtgctcgtagccctcccccccgcccgcccgcccagattcggtcgcccatggcgagggacccagcccgcaccgtcttcataggtaacttggacgaaaaggtatctgagagaatcttgtatgagattcttattcaggcaggccatgtagtagacctgcatgtacccagtgacaaggagagtaacagtctcaaaggttacgcttttgttgagtatgaaaccgaggaaatcgcacaatacgctgttaagcttttctcaggacttgttcggatcagtggtaaaacgcttaagttcatgattgctggttatgacaaaccgtcttcaaatgtcaatacctcagtaatgctcaatcctgtaccctcttcaaatggcaataatccacatatcaggtggtaaacgggaggattggaggttatgtcttttctctcactccttatccatatggttttcaagctttatcaggtggacaagtacacggccatggccagcctttgcacatcggacatacttgaaggcttgaagctgtcgtccttacagtctcatcgaccgatgccacagcgacacatgcacgaacaagagcacctgcccgactgagcgtgcacgacctcgcgccgatcagggccaagaactcacccccgtcgtgtgtgccgatggaggtggaggccgacgggatccaggaagccaccgcaggcgcaggagacggcggcggcgtggcacgcatgtcttcttctgcgtcgccgcgacgtccaggggcaacaagaacagcatctcctacttccacaccaacgcggtcggcgaggacgccgagtcggcgctcgcgctcgccgcgctctgcctcgaccacgcccccgaccaccaccggtggcaccaccacaccgtcgccggggcgaagacgttcgcgttcctctcggccgacgacggccgcacgtacttcgccgcggccgacccgagccccggcgccgccgaggtggtccggttcctggagcgcgtccgcgacgcgtgcgacgccgcgcccaggaagcgcctgcgcgacgaggcggtggcccccgtcgctcgccagttcgccaggacgctgcgggcggcggcggcgggcccgagctcaggcgcggagctaccggaggcctcgctgcaggcgaaggagccgtccacgccgctggcgccggtctgcgagaaagacgaggaggagcgccagagggccggagagcgacgtcgcgccttcttgcagccggaggaaagcgcaagcgcgcttccggggtggcgcccgtggtggcgccacgcgtcggtcgtgatcgtcgtggatgtggtgctgtgcctcgtgctgttcgccgtgtggatgggggtttgcaaaggcttcgggtgtctgcgatgaaaatcgcccgagagcatgcaattgtaaatttgtaatcacatccatgctgtgtgcatggttcgcgttctttatgttaatttgcttgtcagatatcacatctacaatttgaaggaaaaaaacggtttaagaaacgaagacgcatgccttcaatgc

SEQ ID NO: 19271 - protein, 212 aa, Zea mays subsp. mays
  peptide (1)..(212): Ceres Seq. ID no. 12376846
MEVEADGIQEATAGAGDGGGVARMSSSASPRRPGATRTASPTSTPTRSARTPSRRSRSPRSASTTPPTTTGGTTTPSPGRRRSRSSRPTTAARTSPRPTRAPAPPRWSGSWSASATRATPRPGSACATRRWPPSLASSPGRCGRRRRARAQARSYRRPRCRRRSRPRRWRRSARKTRRSARGPESDVAPSCSRRKAQARFRGGARGGATRRS

SEQ ID NO: 19272 - protein, 189 aa, Zea mays subsp. mays
  peptide (1)..(189): Ceres Seq. ID no. 12376847
MSSSASPRRPGATRTASPTSTPTRSARTPSRRSRSPRSASTTPPTTTGGTTTPSPGRRRSRSSRPTTAARTSPRPTRAPAPPRWSGSWSASATRATPRPGSACATRRWPPSLASSPGRCGRRRRARAQARSYRRPRCRRRSRPRRWRRSARKTRRSARGPESDVAPSCSRRKAQARFRGGARGGATRRS

SEQ ID NO: 19273 - protein, 114 aa, Zea mays subsp. mays
  peptide (1)..(114): Ceres Seq. ID no. 12376848
MARDPARTVFIGNLDEKVSERILYEILIQAGHVVDLHVPSDKESNSLKGYAFVEYETEEIAQYAVKLFSGLVRISGKTLKFMIAGYDKPSSNVNTSVMLNPVPSSNGNNPHIRW

SEQ ID NO: 19274 - DNA, 1172 bp, Zea mays subsp. mays
  misc_feature (1)..(1172): Ceres Seq. ID no. 12424116
  misc_feature (1)..(1172): Ortholog of  Ceres SEQ ID NO 13624040 as cited in SEQ ID NO 0
gcacgagaccattacctagaacatcctaatcgaaaaaccagaccagctcatcatcacattcgcatacatctcttctagcacgcaaagatcgagctatagctagctctgcaaccagagacaaggaggactacccttcgccggccggcctaaggaggagtacgtacagaacttgggacatggaaaccgtcgtgggcgacctcatggcgaccgagctgaggcttggcctgccgggcaccgtcgacgactgcagccagccccaactggtgaaggccacgccgccgtcgacgccaaggggcaagaggcgcgccaccgccgatgccgtggaggaagccgccggcgccgaggaggcaagcaagcgtgacgccgagacggcgcccccggcagccaaggcgcccgtggtgggttggccgccggtgaggtcgtaccggaagagctgcttccagcaggccagcagcaagcaggcggcggcggccaaacaggaggcggcggcggcggcggcggcgcccggctgcacggcatcgtnngcagccgccacaaacaccagcagctgcagcagcgccgccgttgtcgtcggctccttcgtcaaagtgagcatggacggcgccccgtacctgaggaaggtggacctgaggatgtacaggggctacagggagctccgggaggccctggaggccatgttcgtttcctccagcagcgccaacaacctgtcggagttcgccgtcacctacaggacaaggacggcgacctcatgctcgtcggagacgtgccgttcgagatgttcgctagcacctgcaagaagctgaggatcatgaagagatctgaagccacaggcctggggtcgtcgtcagcgaggcagcaatgaagatgatcccatctgatcgagaggacctgcatgcccggcaacgttgaacaacatgtcgatcgaacgtcatggtggccttattaattgtttctttcttttcttttcttccttttgtttaattatttttgctgttctggttggcgccgccgtggatcggagggatccccaagccgaaggatgagcttggctggcgcatcgaagcgcatgcaacggatgtgtgcggctttggttctgtaataggacaaccagtggtccttttttcgatctattagcggcacaaaaggagctagatgcatgctgaggttgtttc

SEQ ID NO: 19275 - protein, 208 aa, Zea mays subsp. mays
  peptide (1)..(208): Ceres Seq. ID no. 12424117
  misc_feature (116)..(116): Xaa is any aa, unknown or other
METVVGDLMATELRLGLPGTVDDCSQPQLVKATPPSTPRGKRRATADAVEEAAGAEEASKRDAETAPPAAKAPVVGWPPVRSYRKSCFQQASSKQAAAAKQEAAAAAAAPGCTASXAAATNTSSCSSAAVVVGSFVKVSMDGAPYLRKVDLRMYRGYRELREALEAMFVSSSSANNLSEFAVTYRTRTATSCSSETCRSRCSLAPARS

SEQ ID NO: 19276 - protein, 200 aa, Zea mays subsp. mays
  peptide (1)..(200): Ceres Seq. ID no. 12424118
  misc_feature (108)..(108): Xaa is any aa, unknown or other
MATELRLGLPGTVDDCSQPQLVKATPPSTPRGKRRATADAVEEAAGAEEASKRDAETAPPAAKAPVVGWPPVRSYRKSCFQQASSKQAAAAKQEAAAAAAAPGCTASXAAATNTSSCSSAAVVVGSFVKVSMDGAPYLRKVDLRMYRGYRELREALEAMFVSSSSANNLSEFAVTYRTRTATSCSSETCRSRCSLAPARS

SEQ ID NO: 19277 - DNA, 1489 bp, Zea mays subsp. mays
  misc_feature (1)..(1489): Ceres Seq. ID no. 12633927
  misc_feature (1)..(1489): Ortholog of  Ceres SEQ ID NO 13581579 as cited in SEQ ID NO 58361
  misc_feature (1)..(1489): Ortholog of  Ceres SEQ ID NO 13598714 as cited in SEQ ID NO 62656
  misc_feature (1)..(1489): Ortholog of  Ceres SEQ ID NO 13596969 as cited in SEQ ID NO 63375
  misc_feature (1)..(1489): Ortholog of  Ceres SEQ ID NO 14302240 as cited in SEQ ID NO 64162
  misc_feature (1)..(1489): Ortholog of  Ceres SEQ ID NO 13597519 as cited in SEQ ID NO 64759
  misc_feature (1)..(1489): Ortholog of  Ceres SEQ ID NO 13597870 as cited in SEQ ID NO 64982
  misc_feature (1)..(1489): Ortholog of  Ceres SEQ ID NO 13595926 as cited in SEQ ID NO 67778
  misc_feature (1)..(1489): Ortholog of  Ceres SEQ ID NO 12567001 as cited in SEQ ID NO 0
gcacgagaccattacctagaacatcctaatcgaaaactatcttcctgcttcggacagttgagagagagagagagggatcgagagcgcggcggaggcgatggcgagcggagggaagggactcaacgcgactggggagttcttccggcggagggacgagtggaggaggcaccctatggcggggaaccagctgcgccacgccacacccgggctcggcatcgccatcgtcgccttcgggatctacctcgtcggcgaggccgcctacaaccgcctctaccgcccctccggcgtcgacttcactctctctcactcccaaaccaatctaccttccgcccatgggcccaccgccgcgccgccgccaactcctgctgtctctcgcgctgctcgccaccgcggccgcctgctgcgcggcgggggcggcgcccaggctgtcgcccaactactaccgccgcagctgcccgcgcgtggagcggatcgtgtcggacgccgtcgccgccaagcagcgcgccaacccgtccacggcggcgggcacgctgcggctcttcttccacgactgcttcgtcaacggctgcgacgcctcggtgctggtctcgccgctctcctccaccgacgccgcgccggagcgcgccgcggagatcaacctctccctgcccggggacgccttcgacgccgtggcccgcgccaaggcggcgctggaggccgcgtgcccgggcgtcgtctcctgcgccgacgcgctggcgctagcggcgcgcgacctcgtggccgccctgggcgggccccggttccccgtcgcgctgggccgccgcgactcccgccnntcnnacgcgcgcgacgtcgagggcaacctgccccgcaccaacatgtcggcgcgagccatggtgcgcctcttcgcccgcaagggcctcgcgccccgggagatggtggcgctggccggcgcccacaccgtcggcttctcccactgcgccgagttcgcgccccgcatctacggctaccggggcgccagccacgacccgcggctcaacccggagttcgcgcgcgcgctgcagcgctcctgcgcgggataccgcaccgaccccaccgtctccatcttcaacgacatcgtcacgccccgggacttcgacgagacctactacaagaacctgccccacggcctcggcctgctcgcctccgacgccgccatctgggagtacccgcccaccagggtcttcgcccagcgctacgccgccaaccgcaccgccttcttcgaggacttcgccgccgcgatgcagaggctcggcgccgtcggcgtcaagacggggcgccagggcgtcgtcaggcgccgctgcgacgcgctcgactgagtggcgtcgttcgacggcgttgcttattgtgctattgggtcggtcgatcgttggaaagcttcgaattcgattacgggatgtacttggaaaatggggcgtgtgctttttcagagtggtaactgaagtgatgaactgagggcaagctaattctg

SEQ ID NO: 19278 - protein, 452 aa, Zea mays subsp. mays
  peptide (1)..(452): Ceres Seq. ID no. 12633928
  misc_feature (239)..(239): Xaa is any aa, unknown or other
  misc_feature (240)..(240): Xaa is any aa, unknown or other
  misc_feature (241)..(241): Xaa is any aa, unknown or other
MASGGKGLNATGEFFRRRDEWRRHPMAGNQLRHATPGLGIAIVAFGIYLVGEAAYNRLYRPSGVDFTLSHSQTNLPSAHGPTAAPPPTPAVSRAARHRGRLLRGGGGAQAVAQLLPPQLPARGADRVGRRRRQAARQPVHGGGHAAALLPRLLRQRLRRLGAGLAALLHRRRAGARRGDQPLPARGRLRRRGPRQGGAGGRVPGRRLLRRRAGASGARPRGRPGRAPVPRRAGPPRLPXXXRARRRGQPAPHQHVGASHGAPLRPQGPRAPGDGGAGRRPHRRLLPLRRVRAPHLRLPGRQPRPAAQPGVRARAAALLRGIPHRPHRLHLQRHRHAPGLRRDLLQEPAPRPRPARLRRRHLGVPAHQGLRPALRRQPHRLLRGLRRRDAEARRRRRQDGAPGRRQAPLRRARLSGVVRRRCLLCYWVGRSLESFEFDYGMYLENGACAFSEW

SEQ ID NO: 19279 - protein, 427 aa, Zea mays subsp. mays
  peptide (1)..(427): Ceres Seq. ID no. 12633929
  misc_feature (214)..(214): Xaa is any aa, unknown or other
  misc_feature (215)..(215): Xaa is any aa, unknown or other
  misc_feature (216)..(216): Xaa is any aa, unknown or other
MAGNQLRHATPGLGIAIVAFGIYLVGEAAYNRLYRPSGVDFTLSHSQTNLPSAHGPTAAPPPTPAVSRAARHRGRLLRGGGGAQAVAQLLPPQLPARGADRVGRRRRQAARQPVHGGGHAAALLPRLLRQRLRRLGAGLAALLHRRRAGARRGDQPLPARGRLRRRGPRQGGAGGRVPGRRLLRRRAGASGARPRGRPGRAPVPRRAGPPRLPXXXRARRRGQPAPHQHVGASHGAPLRPQGPRAPGDGGAGRRPHRRLLPLRRVRAPHLRLPGRQPRPAAQPGVRARAAALLRGIPHRPHRLHLQRHRHAPGLRRDLLQEPAPRPRPARLRRRHLGVPAHQGLRPALRRQPHRLLRGLRRRDAEARRRRRQDGAPGRRQAPLRRARLSGVVRRRCLLCYWVGRSLESFEFDYGMYLENGACAFSEW

SEQ ID NO: 19280 - protein, 334 aa, Zea mays subsp. mays
  peptide (1)..(334): Ceres Seq. ID no. 12633930
  misc_feature (161)..(161): Xaa is any aa, unknown or other
  misc_feature (162)..(162): Xaa is any aa, unknown or other
  misc_feature (163)..(163): Xaa is any aa, unknown or other
MGPPPRRRQLLLSLALLATAAACCAAGAAPRLSPNYYRRSCPRVERIVSDAVAAKQRANPSTAAGTLRLFFHDCFVNGCDASVLVSPLSSTDAAPERAAEINLSLPGDAFDAVARAKAALEAACPGVVSCADALALAARDLVAALGGPRFPVALGRRDSRXXXARDVEGNLPRTNMSARAMVRLFARKGLAPREMVALAGAHTVGFSHCAEFAPRIYGYRGASHDPRLNPEFARALQRSCAGYRTDPTVSIFNDIVTPRDFDETYYKNLPHGLGLLASDAAIWEYPPTRVFAQRYAANRTAFFEDFAAAMQRLGAVGVKTGRQGVVRRRCDALD

SEQ ID NO: 19281 - DNA, 1141 bp, Zea mays subsp. mays
  misc_feature (1)..(1141): Ceres Seq. ID no. 12375733
  misc_feature (1)..(1141): Ortholog of  Ceres SEQ ID NO 15171366 as cited in SEQ ID NO 51578
  misc_feature (1)..(1141): Ortholog of  Ceres SEQ ID NO 14306949 as cited in SEQ ID NO 54919
  misc_feature (1)..(1141): Ortholog of  Ceres SEQ ID NO 14308536 as cited in SEQ ID NO 55469
  misc_feature (1)..(1141): Ortholog of  Ceres SEQ ID NO 15175723 as cited in SEQ ID NO 57875
  misc_feature (1)..(1141): Ortholog of  Ceres SEQ ID NO 14314909 as cited in SEQ ID NO 58002
  misc_feature (1)..(1141): Ortholog of  Ceres SEQ ID NO 15179772 as cited in SEQ ID NO 64248
gcacgagaccattacctagaacatcctaatcgaaaaaaacacctcccaacccaatctcctcagtcctcactcctcagagagagccccaagccaagatctgcgcgggcaagtcaccaggcgaagcaccggctcccatggccgtggacctgatgggctgctacgccccgcgccgcgccaacgaccagctcgccatccaggaggcggcggcggccgggctccgcaacctggagctgctggtgacgtccctgtccacgcaggccgccgcgccgcacagggccgctgatcagccgttcggcgagatcgccggccgggccgtctccaagttccgcaaggtcatctccatcctcgaccgcacggggcacgcccgcttccgccgcgggcccgtcgagccgtcgccgccgccggcgcctcctgtcgtccccggtccgcccgtcagcgtggcgcagccgccgcagagcctgacgctggatttcacgaagccgaacctggccgtgtcggccgccacgtccgtcacctccacgtccttcttctcgtcggtcacggccggcgagggcagcgtctccaagggccggagcctcatgtcctccgggaagccgccgctgtctggccacaagcggaagccctgcgccggcgcccactccgaggccaccaccaacggcagccgttgccactgctccaagagaaggaagaaccgcgtgaagaggagcatcagagtgccggcgatcagctcgaaggtcgccgacatcccgccggacgagtactcgtggaggaagtacggccagaagcctatcaagggctccccttacccacgtggctactacaagtgcagcactgtgcggggatgcccggcgaggaagcacgtggagcgggccaccgacgacccggccatgctggtggtgacgtacgagggcgagcaccgccacacgccgggcgcggtccaggggccgagccccctggcgaccgcgtcgccggtgcccgtcgccgtctccgccggcaacgggctcgttgtctagtctactaaaagctaggattagcttctcgtcttctttgttttttttttttgtttgagctgatgtccgtgtaaaacaaggaagaaggttgtagaaagagggagaggaggacaccggaatttcgatgccgg

SEQ ID NO: 19282 - protein, 292 aa, Zea mays subsp. mays
  peptide (1)..(292): Ceres Seq. ID no. 12375734
MAVDLMGCYAPRRANDQLAIQEAAAAGLRNLELLVTSLSTQAAAPHRAADQPFGEIAGRAVSKFRKVISILDRTGHARFRRGPVEPSPPPAPPVVPGPPVSVAQPPQSLTLDFTKPNLAVSAATSVTSTSFFSSVTAGEGSVSKGRSLMSSGKPPLSGHKRKPCAGAHSEATTNGSRCHCSKRRKNRVKRSIRVPAISSKVADIPPDEYSWRKYGQKPIKGSPYPRGYYKCSTVRGCPARKHVERATDDPAMLVVTYEGEHRHTPGAVQGPSPLATASPVPVAVSAGNGLVV

SEQ ID NO: 19283 - protein, 287 aa, Zea mays subsp. mays
  peptide (1)..(287): Ceres Seq. ID no. 12375735
MGCYAPRRANDQLAIQEAAAAGLRNLELLVTSLSTQAAAPHRAADQPFGEIAGRAVSKFRKVISILDRTGHARFRRGPVEPSPPPAPPVVPGPPVSVAQPPQSLTLDFTKPNLAVSAATSVTSTSFFSSVTAGEGSVSKGRSLMSSGKPPLSGHKRKPCAGAHSEATTNGSRCHCSKRRKNRVKRSIRVPAISSKVADIPPDEYSWRKYGQKPIKGSPYPRGYYKCSTVRGCPARKHVERATDDPAMLVVTYEGEHRHTPGAVQGPSPLATASPVPVAVSAGNGLVV

SEQ ID NO: 19284 - DNA, 890 bp, Zea mays subsp. mays; identical to SEQ ID NO: 4580
  misc_feature (1)..(890): Ceres Seq. ID no. 12387086
  misc_feature (1)..(890): Ortholog of  Ceres SEQ ID NO 13583358 as cited in SEQ ID NO 62221
  misc_feature (1)..(890): Ortholog of  Ceres SEQ ID NO 15179036 as cited in SEQ ID NO 0

SEQ ID NO: 19285 - protein, 193 aa, Zea mays subsp. mays; identical to SEQ ID NO: 4581
  peptide (1)..(193): Ceres Seq. ID no. 12387087

SEQ ID NO: 19286 - DNA, 1033 bp, Zea mays subsp. mays
  misc_feature (1)..(1033): Ceres Seq. ID no. 12420210
  misc_feature (1)..(1033): Ortholog of  Ceres SEQ ID NO 15224709 as cited in SEQ ID NO 68627
aagctagtggcgagagaggtcgtgcgcagtgcctggtgggtctagtctagtggcatcatggaggaggcggtggaggccgtggtcgcggccggagtggagccgttcccgacggtggacaagtgcgacgcgtcgggccgcggcgcgcacgccgtggtggcggacctggacggcgcgctgctgcgctcccgcagcgcgttcccgtactacgcgctggtggccttcgaggccggcggcgtgccgcgcctgctgctgctgctgctgctggccccgctggccgcggcgctgcgggcgctggcctcggagtcggctgcgcgcgcgtgctggtgttcgcggccacggcgggcgcccgggtgcgcgacatcgagtcggcggcgcgcgccgtgctcccgcgcttctacgccgccgacgtgcacccggccgcgtggcgggtgttctcggcctgcgcacggaggcgcgtcgtgctcacggccgcgcccaggatcatggccgagccgttcttcagggactgcctcggcgccgacgccgtcgcgggcaccgagctcgccacgtggcgcggccgcgccacgggcatggtggacagccgcaggggcgtcctcgtcggctggagcagggccgacgcgctgcgggagatattggccggcgacgacgacgangacgccgcgcccgacgtcggcctcgggaacagccgctccgactaccccttcatgagcatgtgcaaggcgtcaacaatcangtacgtctacacacacgcccacgggtttgggcggtagttgggaccgatgagccttcatgcatgtttngtatgcgttgcaagctaaaaaaggatctgcctagactgtcagcacacacgacacggcgcaaactcgtcgtgtgggcttgggacatcctgcatatgccaactgccccttggggttccttgttaacaagtcttgccggccggtacacctttgagggtgttagacatggttaaaggttttggaggcagagatttcctattcactaagtcacgcttatnnataaatcataaccacct

SEQ ID NO: 19287 - protein, 216 aa, Zea mays subsp. mays
  peptide (1)..(216): Ceres Seq. ID no. 12420211
  misc_feature (199)..(199): Xaa is any aa, unknown or other
MEEAVEAVVAAGVEPFPTVDKCDASGRGAHAVVADLDGALLRSRSAFPYYALVAFEAGGVPRLLLLLLLAPLAAALRALASESAARACWCSRPRRAPGCATSSRRRAPCSRASTPPTCTRPRGGCSRPAHGGASCSRPRPGSWPSRSSGTASAPTPSRAPSSPRGAAAPRAWWTAAGASSSAGAGPTRCGRYWPATTTXTPRPTSASGTAAPTTPS

SEQ ID NO: 19288 - DNA, 2102 bp, Zea mays subsp. mays
  misc_feature (1)..(2102): Ceres Seq. ID no. 13493251
  misc_feature (1)..(2102): Ortholog of  Ceres SEQ ID NO 13597411 as cited in SEQ ID NO 64125
taatcgaaaaataatcgacacacacctaacagagtaacagacaccaaacaacgcccatcactcgcgccgtacatcctgcctcctcccgcgcgcgcgcgtgcgtgcacgctagctagctgccggtcgcctcgccaccatggtgttcgacgcgagcggcagcaggtcggcggcggcggcgtcggggaaccctctccgcgtgatcctgacgcgcgggttcgcgcggcaggtgctcgtggggcggtggttgacggtgttcgcgagcctgctcatcatggcgtcctccggcgcgacgtacatcttcgggagctactccggcacgctcaagtcgtcgctcgggtacgaccagcgcacgctcaacaccgtgtccttcttcaaggacctcggcgccaacctgggcgtcttctcggggctcatcaacgaggtgaccccgccgtgggtggtgctggccatgggcgccgccatgaacctgtccgggtacctcatggtgtacctggccgtgtccgggcgcaccgcgccgccgccgctgtggctcgtctgcctctacttcttcgtgggcgccaactcgcagtcgttcgccaacaccggcgcgctggtgacctgcgtcaagaacttccccgacagccgcggggtggtgctcggcatcctcaagggcttcgtcggcctcagcggcgccgtgtacacgcagctgtacctggccctgtacggcggcgacgacgccgagtcgctgatcctcctcgtcgcctggctccccgcggcggtgtccgtcgtgttcgtccacaccatccggtacatgccgtacccgcgccgccgtgggcaggagacgagctccgactccgaccccttcttctgcttcctctacctctccatcgcgctggcgtgcttcctcctcgtcatgatcgtggtgcagaagcaggtgcccttctcccgcgccgcgtacggcgtggccgccacgccgctgctcatcctcctcctcatgcccctcggcgtcgtcgtcaagcaggagtacaagatctaccgggagcgccagctcgacgccgccgacccgccgccgccgaccatcgtctccgcgtcggcaacggacgccatcaagaaaacagagcagcagccggcgtcgtcgtcgttctgtgggtgcgtgaggaccatgttccgtccgccggctcgtggggaggactacacgatcctgcaggcgctggtgagcgtggacatgctggtgctgttcgtggcgacaatctgcggcgtgggcgggacgctgacggcgatcgacaacatggggcagatcggggagtcgctgggctacccagccaggagcgtcaacacgttcgtgtccctgatcagcatctggaactacgcggggcgcgtgacggcgggctacgcctcggaggcggcgctggcccggtaccgcgtgccgcggccgctgctgctgacgggggtgctggcgctggcgtgcgcggggcacgtgctgatcgcgctgggcgcgccgcggtccctgtacgcggcgtcggtggtcgtcgggttctgcttcggcgcgcagtggccgctggtgttcgccatcatctcggaggtgttcgggctcaagtactactccacgctctacaacttgggcggcatggccagccccgtgggctcctacatcctgaacgtgcgcgtggcggggcggctctacgacgcggcggccgcgcggcagcgcggccgcggcaggatctgcctcggggtggagtgctaccggcggtcgttcctgatcgtcacggcggaccacggtggtcggcgcgctggtgtcgctcgtgctggtgtggcggacgtggacgttctacaggggcgacatctacgcgaggttccgggacggagacgagggcccggggcgggacgggcgcctgccggtcgaccagaaacgggaggaggagcagagggagaaggcggcggccaacggcaggaaggcgtgaggtggtgagcgggagcgggaaggcatggtcagggacgacgacgagtggggtgtacttgtacatgtgaatatagtactttttttgttgcattcacccgtgatgaccgacccttgttacctttcaaatttaaatagcctaaaaaaagccttcttgtccgtttcc

SEQ ID NO: 19289 - protein, 603 aa, Zea mays subsp. mays
  peptide (1)..(603): Ceres Seq. ID no. 13493252
MVFDASGSRSAAAASGNPLRVILTRGFARQVLVGRWLTVFASLLIMASSGATYIFGSYSGTLKSSLGYDQRTLNTVSFFKDLGANLGVFSGLINEVTPPWVVLAMGAAMNLSGYLMVYLAVSGRTAPPPLWLVCLYFFVGANSQSFANTGALVTCVKNFPDSRGVVLGILKGFVGLSGAVYTQLYLALYGGDDAESLILLVAWLPAAVSVVFVHTIRYMPYPRRRGQETSSDSDPFFCFLYLSIALACFLLVMIVVQKQVPFSRAAYGVAATPLLILLLMPLGVVVKQEYKIYRERQLDAADPPPPTIVSASATDAIKKTEQQPASSSFCGCVRTMFRPPARGEDYTILQALVSVDMLVLFVATICGVGGTLTAIDNMGQIGESLGYPARSVNTFVSLISIWNYAGRVTAGYASEAALARYRVPRPLLLTGVLALACAGHVLIALGAPRSLYAASVVVGFCFGAQWPLVFAIISEVFGLKYYSTLYNLGGMASPVGSYILNVRVAGRLYDAAAARQRGRGRICLGVECYRRSFLIVTADHGGRRAGVARAGVADVDVLQGRHLREVPGRRRGPGAGRAPAGRPETGGGAEGEGGGQRQEGVRW

SEQ ID NO: 19290 - protein, 558 aa, Zea mays subsp. mays
  peptide (1)..(558): Ceres Seq. ID no. 13493253
MASSGATYIFGSYSGTLKSSLGYDQRTLNTVSFFKDLGANLGVFSGLINEVTPPWVVLAMGAAMNLSGYLMVYLAVSGRTAPPPLWLVCLYFFVGANSQSFANTGALVTCVKNFPDSRGVVLGILKGFVGLSGAVYTQLYLALYGGDDAESLILLVAWLPAAVSVVFVHTIRYMPYPRRRGQETSSDSDPFFCFLYLSIALACFLLVMIVVQKQVPFSRAAYGVAATPLLILLLMPLGVVVKQEYKIYRERQLDAADPPPPTIVSASATDAIKKTEQQPASSSFCGCVRTMFRPPARGEDYTILQALVSVDMLVLFVATICGVGGTLTAIDNMGQIGESLGYPARSVNTFVSLISIWNYAGRVTAGYASEAALARYRVPRPLLLTGVLALACAGHVLIALGAPRSLYAASVVVGFCFGAQWPLVFAIISEVFGLKYYSTLYNLGGMASPVGSYILNVRVAGRLYDAAAARQRGRGRICLGVECYRRSFLIVTADHGGRRAGVARAGVADVDVLQGRHLREVPGRRRGPGAGRAPAGRPETGGGAEGEGGGQRQEGVRW

SEQ ID NO: 19291 - protein, 499 aa, Zea mays subsp. mays
  peptide (1)..(499): Ceres Seq. ID no. 13493254
MGAAMNLSGYLMVYLAVSGRTAPPPLWLVCLYFFVGANSQSFANTGALVTCVKNFPDSRGVVLGILKGFVGLSGAVYTQLYLALYGGDDAESLILLVAWLPAAVSVVFVHTIRYMPYPRRRGQETSSDSDPFFCFLYLSIALACFLLVMIVVQKQVPFSRAAYGVAATPLLILLLMPLGVVVKQEYKIYRERQLDAADPPPPTIVSASATDAIKKTEQQPASSSFCGCVRTMFRPPARGEDYTILQALVSVDMLVLFVATICGVGGTLTAIDNMGQIGESLGYPARSVNTFVSLISIWNYAGRVTAGYASEAALARYRVPRPLLLTGVLALACAGHVLIALGAPRSLYAASVVVGFCFGAQWPLVFAIISEVFGLKYYSTLYNLGGMASPVGSYILNVRVAGRLYDAAAARQRGRGRICLGVECYRRSFLIVTADHGGRRAGVARAGVADVDVLQGRHLREVPGRRRGPGAGRAPAGRPETGGGAEGEGGGQRQEGVRW

SEQ ID NO: 19292 - DNA, 1663 bp, Zea mays subsp. mays
  misc_feature (1)..(1663): Ceres Seq. ID no. 12381819
  misc_feature (1)..(1663): Ortholog of  Ceres SEQ ID NO 14315063 as cited in SEQ ID NO 52256
  misc_feature (1)..(1663): Ortholog of  Ceres SEQ ID NO 14310736 as cited in SEQ ID NO 52901
  misc_feature (1)..(1663): Ortholog of  Ceres SEQ ID NO 15172325 as cited in SEQ ID NO 54668
  misc_feature (1)..(1663): Ortholog of  Ceres SEQ ID NO 13594345 as cited in SEQ ID NO 58043
  misc_feature (1)..(1663): Ortholog of  Ceres SEQ ID NO 14308594 as cited in SEQ ID NO 60384
  misc_feature (1)..(1663): Ortholog of  Ceres SEQ ID NO 13662880 as cited in SEQ ID NO 65422
  misc_feature (1)..(1663): Ortholog of  Ceres SEQ ID NO 14316013 as cited in SEQ ID NO 67181
  misc_feature (1)..(1663): Ortholog of  Ceres SEQ ID NO 13596089 as cited in SEQ ID NO 68373
actactggtagaactagagcttagaagtgccggttttccacgaggcgagcgcgcggtcatggggtcactgtcgacggcggaggggcagcggccgcacgccgtgtgcatgccgtacccggcgcagggccacgtgacgcccatgctcaagctcgccaagctcctccacgcgcggggcttccagatcaccttcgtcaacaccgagttcaaccaccgccgcctgctccactcgcgcgggcccgacgcgctcgaccgcgtgcccgggttccgcttcgacgccattcccgacggcctcccgccgtccgacgccgacgccacgcaggacatccccgcgctctgctactccaccatgaccacctgcctcccgcacctcctcgcgctcctcgccagggtcgacgccgacgccgggtccccgccggtcacctgcctcgtcgtggacgccgtcatgtcgttcggcttcgacgccgccaggcagatcggcgtgcccgtcgccgcgctctggaccgccagcgcctgcgggttcatgggctaccggaactacagaaacctcatcgactggggcctcgtgccattcaagagcgccgcggacctccaggacaacgtcggcggcggccacctcgccaccgtggtcaccggcgcgcgcggcatgtgcgacggcgtgcagctgcgcgacttccccaacttcatccgcaccacggaccgcgcggacttcatgttcaacttcctcatgcgcgagtccgagcggctgtcgctccccgacggcgtcatcgtcaacaccttcgaggacctcgagggagccacgctggacgccatgcgcgctatcctcccgacggtgtaccccgtcggcccgctcctcctccgcgagcgcctggagatccccgctagcagcccgctcgcggtcctcggctccaacctctggaaggaggaggaaggcctcctggagtggctcgctggccgcgcgccgcgatccgtggtgtacgtgaactacggcagcatcacggtgatgaccaactcgcagctgctcgagttcgcgtggggcctggccaacagcgggtacccgttcgtgtggaacatccggccggacctggtgaagggcgactccgccgtgctgccgccggagttcgcgtccgccgtcgagggccgcgcgttgctgacgacgtggtgcccgcaggaggcggcgatccagcatgaggcggtcggggtgttcctgactcactccggctggaactccaccctggagagcctctgcgcgggggtgcccatgctgagctggcccttcttcgcggagcagcagaccaactgccggtacaagcgcacggagtggggagtcgggatggagatcggcggcgaggtgcggcgcgacgaggtgacggtcgttctaaaggaggccatggacggggagaaggggagggagatgcgccggcgcgcagaggagtggaaggagaaggccgtgaaggtgacgctgccgggtgggcctgcggagactaacctcgagagggtcatccacgaggtgctgctctcccagaaaaagggatagactgccaacgcgtgatcgtcgtgggagtatcatgttcgggagcatcatgccttgcccctcgctttgctgtgttttcttatttacgtgtgttagctttgaataattaattatctcaactttcagctctcg

SEQ ID NO: 19293 - protein, 510 aa, Zea mays subsp. mays
  peptide (1)..(510): Ceres Seq. ID no. 12381820
LLVELELRSAGFPRGERAVMGSLSTAEGQRPHAVCMPYPAQGHVTPMLKLAKLLHARGFQITFVNTEFNHRRLLHSRGPDALDRVPGFRFDAIPDGLPPSDADATQDIPALCYSTMTTCLPHLLALLARVDADAGSPPVTCLVVDAVMSFGFDAARQIGVPVAALWTASACGFMGYRNYRNLIDWGLVPFKSAADLQDNVGGGHLATVVTGARGMCDGVQLRDFPNFIRTTDRADFMFNFLMRESERLSLPDGVIVNTFEDLEGATLDAMRAILPTVYPVGPLLLRERLEIPASSPLAVLGSNLWKEEEGLLEWLAGRAPRSVVYVNYGSITVMTNSQLLEFAWGLANSGYPFVWNIRPDLVKGDSAVLPPEFASAVEGRALLTTWCPQEAAIQHEAVGVFLTHSGWNSTLESLCAGVPMLSWPFFAEQQTNCRYKRTEWGVGMEIGGEVRRDEVTVVLKEAMDGEKGREMRRRAEEWKEKAVKVTLPGGPAETNLERVIHEVLLSQKKG

SEQ ID NO: 19294 - protein, 491 aa, Zea mays subsp. mays
  peptide (1)..(491): Ceres Seq. ID no. 12381821
MGSLSTAEGQRPHAVCMPYPAQGHVTPMLKLAKLLHARGFQITFVNTEFNHRRLLHSRGPDALDRVPGFRFDAIPDGLPPSDADATQDIPALCYSTMTTCLPHLLALLARVDADAGSPPVTCLVVDAVMSFGFDAARQIGVPVAALWTASACGFMGYRNYRNLIDWGLVPFKSAADLQDNVGGGHLATVVTGARGMCDGVQLRDFPNFIRTTDRADFMFNFLMRESERLSLPDGVIVNTFEDLEGATLDAMRAILPTVYPVGPLLLRERLEIPASSPLAVLGSNLWKEEEGLLEWLAGRAPRSVVYVNYGSITVMTNSQLLEFAWGLANSGYPFVWNIRPDLVKGDSAVLPPEFASAVEGRALLTTWCPQEAAIQHEAVGVFLTHSGWNSTLESLCAGVPMLSWPFFAEQQTNCRYKRTEWGVGMEIGGEVRRDEVTVVLKEAMDGEKGREMRRRAEEWKEKAVKVTLPGGPAETNLERVIHEVLLSQKKG

SEQ ID NO: 19295 - protein, 475 aa, Zea mays subsp. mays
  peptide (1)..(475): Ceres Seq. ID no. 12381822
MPYPAQGHVTPMLKLAKLLHARGFQITFVNTEFNHRRLLHSRGPDALDRVPGFRFDAIPDGLPPSDADATQDIPALCYSTMTTCLPHLLALLARVDADAGSPPVTCLVVDAVMSFGFDAARQIGVPVAALWTASACGFMGYRNYRNLIDWGLVPFKSAADLQDNVGGGHLATVVTGARGMCDGVQLRDFPNFIRTTDRADFMFNFLMRESERLSLPDGVIVNTFEDLEGATLDAMRAILPTVYPVGPLLLRERLEIPASSPLAVLGSNLWKEEEGLLEWLAGRAPRSVVYVNYGSITVMTNSQLLEFAWGLANSGYPFVWNIRPDLVKGDSAVLPPEFASAVEGRALLTTWCPQEAAIQHEAVGVFLTHSGWNSTLESLCAGVPMLSWPFFAEQQTNCRYKRTEWGVGMEIGGEVRRDEVTVVLKEAMDGEKGREMRRRAEEWKEKAVKVTLPGGPAETNLERVIHEVLLSQKKG

SEQ ID NO: 19296 - DNA, 1230 bp, Zea mays subsp. mays
  misc_feature (1)..(1230): Ceres Seq. ID no. 12360571
  misc_feature (1)..(1230): Ortholog of  Ceres SEQ ID NO 13598553 as cited in SEQ ID NO 65093
gcacgagaccattacctagaacatcctaatcgaaaagggaactagaattcgacgccgctgtggactggtcatggcgtgctaccgcgcatccacggcgccgacggcccaccgaggtctaggaaaaatagaatggttggtatggtagggtaggtgaaccggtgaagattagagggactgagggagagggaccgtgacaccgtgtctagccagccaacctgctgctctagcccacctgcatggcggtgtcagcgccggtcactctctgcccctcggattctcgctccctctcttccgcgctcgtttcttcccgatccaacaagccttcttcacttgatgctgttcggtcacggcggttgaatttgggagattcagctatgccaacgcagatctccacaaggcagtctcttcggtttgctttaccttcgaacaatgcacgtccaatatcgactgcagcaagaatgacatgttttgctaagaagcaacatattgctgccgtgcccttatgtactttggaggccaaaaggtatgaacctatagtcaaaatgtgtggcattacatctgccttcgatgctgagatggctttgaaggctggagctaaattaattgggatgattctttggcccaagtccaaacgctctatcccattgtctgaagctaaagagatatccagagtggccaaatcttacggggctgaatcagtgggtgtgtttgtggatgatgatagtagtactatcttgacagcatctgattcatgcaacctcgatcttatccagcttcatggagatagctcccgagaactacttcctctgctttggaagaacaacaggattatatatgtgctaaatgctgatgaggatggtaaacttatcaatgctcctccaagtgaggaatatgttcttgattggtttttggtggacagtgcaaaaggtggaagttgcaaagggttcaactgggaaaaattccaaatgccaactgttaaaagcaagaacgggtggttattagcaggaggccttcatgcagataatgttcacgaagccgcttctgctctaaagccaaatggcctggatgttagcagtggcatatgttttcctgacggtttacggaaagacccgaagagaatgtgttccttcatgagcagtgtaaaaactttgaatctcctctaacatactagtgctttattggtcgtagtttcttggtgcagtatgtggaaactgaataaatggcagtcct

SEQ ID NO: 19297 - protein, 308 aa, Zea mays subsp. mays
  peptide (1)..(308): Ceres Seq. ID no. 12360572
MAVSAPVTLCPSDSRSLSSALVSSRSNKPSSLDAVRSRRLNLGDSAMPTQISTRQSLRFALPSNNARPISTAARMTCFAKKQHIAAVPLCTLEAKRYEPIVKMCGITSAFDAEMALKAGAKLIGMILWPKSKRSIPLSEAKEISRVAKSYGAESVGVFVDDDSSTILTASDSCNLDLIQLHGDSSRELLPLLWKNNRIIYVLNADEDGKLINAPPSEEYVLDWFLVDSAKGGSCKGFNWEKFQMPTVKSKNGWLLAGGLHADNVHEAASALKPNGLDVSSGICFPDGLRKDPKRMCSFMSSVKTLNLL

SEQ ID NO: 19298 - protein, 262 aa, Zea mays subsp. mays
  peptide (1)..(262): Ceres Seq. ID no. 12360573
MPTQISTRQSLRFALPSNNARPISTAARMTCFAKKQHIAAVPLCTLEAKRYEPIVKMCGITSAFDAEMALKAGAKLIGMILWPKSKRSIPLSEAKEISRVAKSYGAESVGVFVDDDSSTILTASDSCNLDLIQLHGDSSRELLPLLWKNNRIIYVLNADEDGKLINAPPSEEYVLDWFLVDSAKGGSCKGFNWEKFQMPTVKSKNGWLLAGGLHADNVHEAASALKPNGLDVSSGICFPDGLRKDPKRMCSFMSSVKTLNLL

SEQ ID NO: 19299 - protein, 234 aa, Zea mays subsp. mays
  peptide (1)..(234): Ceres Seq. ID no. 12360574
MTCFAKKQHIAAVPLCTLEAKRYEPIVKMCGITSAFDAEMALKAGAKLIGMILWPKSKRSIPLSEAKEISRVAKSYGAESVGVFVDDDSSTILTASDSCNLDLIQLHGDSSRELLPLLWKNNRIIYVLNADEDGKLINAPPSEEYVLDWFLVDSAKGGSCKGFNWEKFQMPTVKSKNGWLLAGGLHADNVHEAASALKPNGLDVSSGICFPDGLRKDPKRMCSFMSSVKTLNLL

SEQ ID NO: 19300 - DNA, 912 bp, Zea mays subsp. mays
  misc_feature (1)..(912): Ceres Seq. ID no. 12375830
  misc_feature (1)..(912): Ortholog of  Ceres SEQ ID NO 12625980 as cited in SEQ ID NO 65586
  misc_feature (1)..(912): Ortholog of  Ceres SEQ ID NO 13587097 as cited in SEQ ID NO 0
aatcccctcccgccgcgtcacatcgccgccgtcctcgtgccccgttacctctaaaaccctagcggggagccggggatgaagatccagtgcaacgcgtgcggggccgcggaggcgcgggtgctgtgctgcgcggacgaggccccgctctgcgtcgcctgcgacgaggaggtgcacgccgccaacaagctcgccgggaagcaccagcgggtgccgctcctgacggacgccgccgtcgctgccgccgcggcggccccggccgtgcccaagtgcgacatctgtcaggaggcttctggatacttcttctgcctagaggaccgtgcactactttgtagagactgtgatgttgctatacacacagtgaattcctttgtttcagtacatcagagattcctgctaactggagttcaggtgggtcttgatcctgctgatccagttccacctattgctgaaaagcacgttaatgctgctggtggatcagtaaatcaaccagtgagacatcagccaaagagaagcccgacagttcaattttcagttgaagggagtgcttctgttcctactaaaaatgtaacaaatggagattgttcaaggcagaattttgtcccaacagccaggggagaagtggttgattggactatgaataatagtacaattcggtcagtagaatctccgcctaagtacatttcagaggaaagcccgacacttctgcaatctagccagaccacaacagtcttctccaaccaaattaatggcaacagtgatggggcctaccacttgtcattctcaggtggtaatgtgacagacagcctaccagattggcccgtggatgagttcttcagtaactcagaatatggtccaaactttggcttctccgagaatggttcttctaagggtgataacgctaagctggggggc

SEQ ID NO: 19301 - protein, 279 aa, Zea mays subsp. mays
  peptide (1)..(279): Ceres Seq. ID no. 12375831
MKIQCNACGAAEARVLCCADEAPLCVACDEEVHAANKLAGKHQRVPLLTDAAVAAAAAAPAVPKCDICQEASGYFFCLEDRALLCRDCDVAIHTVNSFVSVHQRFLLTGVQVGLDPADPVPPIAEKHVNAAGGSVNQPVRHQPKRSPTVQFSVEGSASVPTKNVTNGDCSRQNFVPTARGEVVDWTMNNSTIRSVESPPKYISEESPTLLQSSQTTTVFSNQINGNSDGAYHLSFSGGNVTDSLPDWPVDEFFSNSEYGPNFGFSENGSSKGDNAKLGG

SEQ ID NO: 19302 - DNA, 478 bp, Zea mays subsp. mays
  misc_feature (1)..(478): Ceres Seq. ID no. 5761353
  misc_feature (1)..(478): Ortholog of  Ceres SEQ ID NO 14315892 as cited in SEQ ID NO 57776
accaacaggaaaaaaggcccagaggcagtgccgtgaccgattcgagacgcaagagaaggatcgagacgaggcggcggttttccggggcagcatcgtctcggccacgaagatgtcttactcaaggggctcawgtgaaaggtatggatctcgctcaccttactcgagaagcacaaggtaccgaagtcgctctaggagtgtcgactctagtgatgctgaaaaccctgggaacaacctgtatgtgactggtttgtcggctcgtgtaacggatcgagatctggagaagcacttctccactgagggtgaggtgattgatgcaagcgttgtgtatgatccttggacaagggaatcacgggggtttggttttgttaccatggctgctgttaaagatgcagatcgctgcatcaaatatctggaccgtttctgtgttgcaaggtcgggtcataactgttgagaaggcaaagagaagacgaggtagaac

SEQ ID NO: 19303 - protein, 149 aa, Zea mays subsp. mays
  peptide (1)..(149): Ceres Seq. ID no. 5761354
  misc_feature (44)..(44): Xaa is any aa, unknown or other
PTGKKAQRQCRDRFETQEKDRDEAAVFRGSIVSATKMSYSRGSXERYGSRSPYSRSTRYRSRSRSVDSSDAENPGNNLYVTGLSARVTDRDLEKHFSTEGEVIDASVVYDPWTRESRGFGFVTMAAVKDADRCIKYLDRFCVARSGHNC

SEQ ID NO: 19304 - protein, 113 aa, Zea mays subsp. mays
  peptide (1)..(113): Ceres Seq. ID no. 5761355
  misc_feature (8)..(8): Xaa is any aa, unknown or other
MSYSRGSXERYGSRSPYSRSTRYRSRSRSVDSSDAENPGNNLYVTGLSARVTDRDLEKHFSTEGEVIDASVVYDPWTRESRGFGFVTMAAVKDADRCIKYLDRFCVARSGHNC

SEQ ID NO: 19305 - protein, 79 aa, Zea mays subsp. mays
  peptide (1)..(79): Ceres Seq. ID no. 5761356
  misc_feature (43)..(43): Xaa is any aa, unknown or other
QQEKRPRGSAVTDSRRKRRIETRRRFSGAASSRPRRCLTQGAXVKGMDLAHLTREAQGTEVALGVSTLVMLKTLGTTCM

SEQ ID NO: 19306 - DNA, 1433 bp, Zea mays subsp. mays
  misc_feature (1)..(1433): Ceres Seq. ID no. 12382332
  misc_feature (1)..(1433): Ortholog of  Ceres SEQ ID NO 14302820 as cited in SEQ ID NO 63287
gcacgagaccattacctagaacatcctaatcgaaaagaaccatccagaagcagccgcctcctgctcttaaaaaactctcgtctctggtcatccattccacacacccaacatcacgaaaccacgcgcagatccaaacgaacccgagcccttccaaaccctaagctcgcctcccctcccccccaaacaccaccgcgcacctatggcgaagtacggcgagggcgacaagcggtggatcgtggaggagcgcgccgacggcaccaacgtccacaactggcactgggcggagcgcgactgcctggagtggtcccgcgcgcggctctcttccctgctcgcgggcctcaccatcctcgacggcgagggcggcctcagtctccgcaccgtcgcgctcgacaagcttgatggcgaggcctacgtcaacatccgcaagggcaaggtcatcccggggtacgagctctcgctcaccctctcctgggaggccgaggccgcctcggagtccggagctgcgaaggtcaccggcaccgctgaggttccctacctcgccgacgagaacgccgacgaggaccccgacctccgcgtcaccgtgcgcggcgacgagacgcccctcgcgctccgcgccaaggacgccttcctctcccgcgggaaacccatggtgctcgagaagatccgggagttcgtcgctgccatggccaagggtggaccggccaaggacgagctggactccaagaaaactcccacgaaggtcgccggctccgcaccggcgaaggaggcggtactggctcctgcgccggctgtggagaagaaaaaggccaaggggaaggacaaggagggcttcaagaccattgagatgacggagaagttctactgccgctcaaaggacatatatgagatcttgatggatgagaacagatggaaagggtttacgcagagcaatgcgaggatcagcagagaggttggaggggaatttagcctcttcgacgggtccatcactggcgtcaacgaggagctgcaggaagggaagctgattgcacaaaagtggcggtttggaagctggcctgacggcttgtactcctcggtccggttggtgtttgatgagcccgagtctggagttacaatcataaagctcaaacaaactgatgtgccagaggaagacaagtatggaaattcaactgtggtagagaacaccgagagaggctggagagaactcatattccagcggatacgcggagtgttcggttttgggatctaaagaatctaaagaggcgatttggcatgaagttagatttcaaatttttacggggtcagaccatgcacgtcatagcaatccatgttttattcacccatttgttttccatgtccttaaacacagaacactgcatatcgtggggggtttaaaaacatctgttattcgaacgctgcaatgttgcttgctcccg

SEQ ID NO: 19307 - protein, 348 aa, Zea mays subsp. mays
  peptide (1)..(348): Ceres Seq. ID no. 12382333
MAKYGEGDKRWIVEERADGTNVHNWHWAERDCLEWSRARLSSLLAGLTILDGEGGLSLRTVALDKLDGEAYVNIRKGKVIPGYELSLTLSWEAEAASESGAAKVTGTAEVPYLADENADEDPDLRVTVRGDETPLALRAKDAFLSRGKPMVLEKIREFVAAMAKGGPAKDELDSKKTPTKVAGSAPAKEAVLAPAPAVEKKKAKGKDKEGFKTIEMTEKFYCRSKDIYEILMDENRWKGFTQSNARISREVGGEFSLFDGSITGVNEELQEGKLIAQKWRFGSWPDGLYSSVRLVFDEPESGVTIIKLKQTDVPEEDKYGNSTVVENTERGWRELIFQRIRGVFGFGI

SEQ ID NO: 19308 - protein, 199 aa, Zea mays subsp. mays
  peptide (1)..(199): Ceres Seq. ID no. 12382334
MVLEKIREFVAAMAKGGPAKDELDSKKTPTKVAGSAPAKEAVLAPAPAVEKKKAKGKDKEGFKTIEMTEKFYCRSKDIYEILMDENRWKGFTQSNARISREVGGEFSLFDGSITGVNEELQEGKLIAQKWRFGSWPDGLYSSVRLVFDEPESGVTIIKLKQTDVPEEDKYGNSTVVENTERGWRELIFQRIRGVFGFGI

SEQ ID NO: 19309 - protein, 187 aa, Zea mays subsp. mays
  peptide (1)..(187): Ceres Seq. ID no. 12382335
MAKGGPAKDELDSKKTPTKVAGSAPAKEAVLAPAPAVEKKKAKGKDKEGFKTIEMTEKFYCRSKDIYEILMDENRWKGFTQSNARISREVGGEFSLFDGSITGVNEELQEGKLIAQKWRFGSWPDGLYSSVRLVFDEPESGVTIIKLKQTDVPEEDKYGNSTVVENTERGWRELIFQRIRGVFGFGI

SEQ ID NO: 19310 - DNA, 1211 bp, Zea mays subsp. mays
  misc_feature (1)..(1211): Ceres Seq. ID no. 12390281
  misc_feature (1)..(1211): Ortholog of  Ceres SEQ ID NO 13599287 as cited in SEQ ID NO 338
  misc_feature (1)..(1211): Ortholog of  Ceres SEQ ID NO 15172934 as cited in SEQ ID NO 51783
  misc_feature (1)..(1211): Ortholog of  Ceres SEQ ID NO 14314817 as cited in SEQ ID NO 52571
  misc_feature (1)..(1211): Ortholog of  Ceres SEQ ID NO 15174056 as cited in SEQ ID NO 0
gcacgagaccattacctagaacatcctaatcgaaaaacccaaacgaatattatagaagctggctgaaaagctgagtgtttggcagtccgcagtagcttttggtggccagtagcttttggaaatggactccattgtcggttgtcgcctctgaccgtaccacctctgttacctgcaccgccgctccgttaaatcgcggcccgatcgccgatgcctccccgccccgtcccactattctctcgcctgcgcttccgcctcccgagttgcgccgccgtctccatctccacccctccatcctccgcggcgcccctgcactacggccatcgcactcccctcgctagcccttttcctctgtccccaccttgcccgcgcatcctccgtgcggccgtcgcggtttcttcgctggatctgcgcccgatcaccggcgggttcgcgctattcagcatggctgctgcctcctccgccacctccgtccacgacttcaccgtcaaggatgctagcgggaaagatgtggaccttagcacctataaggggaaggttctgctcatagtcaatgttgcatctcagtgtggcttaaccaattccaactacacagagctgagccagttgtatgagaagtacaaggaccagggttttgagatccttgcattcccatgcaaccagttcggtgggcaggagcctggcactaatgaggagattgtccagtttgcttgtactcgcttcaaggctgagtatccaattttcgacaaggttgatgtcaatggtgacaatactgcacccatttacaagttcctgaagtccagcaaaggtagtctctttggcgataacataaaatggaacttctccaaattcttggttgacaaagaggggcatgttgtggagcggtatgcaccaacaacttccccactgagcatcgagaaggacatcaagaaactactagggagttattaaaccttgtaattggattcagtagccctaccaaactgctgctttgcatcgagcacctgatgcctcagtagcgttttaataaagttgtttttataaccgagatgttttgtatttcttctgtattccctgctttgtggtaaatgtcatgtaataaaaatgatgcaatccacgatttatcttgaaaggttatgtatccaggtcggttgttatgagatatttgagaaatgagttttggcatgggggcatatcttgcgtacctgcctacc

SEQ ID NO: 19311 - protein, 246 aa, Zea mays subsp. mays
  peptide (1)..(246): Ceres Seq. ID no. 12390282
MPPRPVPLFSRLRFRLPSCAAVSISTPPSSAAPLHYGHRTPLASPFPLSPPCPRILRAAVAVSSLDLRPITGGFALFSMAAASSATSVHDFTVKDASGKDVDLSTYKGKVLLIVNVASQCGLTNSNYTELSQLYEKYKDQGFEILAFPCNQFGGQEPGTNEEIVQFACTRFKAEYPIFDKVDVNGDNTAPIYKFLKSSKGSLFGDNIKWNFSKFLVDKEGHVVERYAPTTSPLSIEKDIKKLLGSY

SEQ ID NO: 19312 - protein, 168 aa, Zea mays subsp. mays
  peptide (1)..(168): Ceres Seq. ID no. 12390283
MAAASSATSVHDFTVKDASGKDVDLSTYKGKVLLIVNVASQCGLTNSNYTELSQLYEKYKDQGFEILAFPCNQFGGQEPGTNEEIVQFACTRFKAEYPIFDKVDVNGDNTAPIYKFLKSSKGSLFGDNIKWNFSKFLVDKEGHVVERYAPTTSPLSIEKDIKKLLGSY

SEQ ID NO: 19313 - DNA, 993 bp, Zea mays subsp. mays
  misc_feature (1)..(993): Ceres Seq. ID no. 12362418
  misc_feature (1)..(993): Ortholog of  Ceres SEQ ID NO 14302836 as cited in SEQ ID NO 65013
attgatttagaaccgctcgcgatacggctgaagaatttggggacgcttacgccgtgcgcgcacgcgtccaagtcgccgtcatgacgccattgcctgccgtgccgtggcccgagatgtttcctacggccgggatcacaggtgtcgcgcgcaggccggaaaagggcaggcccccaaggactctgcgccggcaccgcgccaacaaaccccgtggctctggcgtgcggacggccggccggacgtgccgtcgagtcgaagcggcagcgctcgtctcgacccgtcgtcgaccccccgtgccgcagccagatcggcctgatgagttggaaagggtagaatcagcaggtggcagggtcattaactggatggggtaccgtgtcctgggtgtgcttgcgacatcaaggtcaattggtgactattacatgaagccattcatatcagcggaaccagaggtgactgtcacagagcgcacgcacagggacgagttcatcatcctggcgagcgacgggctgtgggacgtcatgtccaacgaggtggcctgcagggtcgcgaagagctgtctgtgcgggcgcgcggcttccaagtgccctgacaccatccgcgggagctcggccagtgatgccgccgcggtgctggtggagttcgccatgtcgcggggcagcactgacaacatcagcgtcgtggtggtggagctgaaacgtctgaagaggtggaagggtggcagtagacagaacggtcggacgtagcctggccctgtaggagtctccggctcgtcgcgaaatatatgcatggcgacggagctctagggaagcagccgagcatatgacggaatggtgtaaaaagaagaagaagaagaagaagagagggttctgactcttgagagctatacctatgctgtgaccaggtgagtgtaggagctgctcgtagctttgccgttgtattgcgttggttacttggttctttagttcaatcaatactaacaaaatggcgttccgggcc

SEQ ID NO: 19314 - protein, 219 aa, Zea mays subsp. mays
  peptide (1)..(219): Ceres Seq. ID no. 12362419
MTPLPAVPWPEMFPTAGITGVARRPEKGRPPRTLRRHRANKPRGSGVRTAGRTCRRVEAAALVSTRRRPPVPQPDRPDELERVESAGGRVINWMGYRVLGVLATSRSIGDYYMKPFISAEPEVTVTERTHRDEFIILASDGLWDVMSNEVACRVAKSCLCGRAASKCPDTIRGSSASDAAAVLVEFAMSRGSTDNISVVVVELKRLKRWKGGSRQNGRT

SEQ ID NO: 19315 - protein, 208 aa, Zea mays subsp. mays
  peptide (1)..(208): Ceres Seq. ID no. 12362420
MFPTAGITGVARRPEKGRPPRTLRRHRANKPRGSGVRTAGRTCRRVEAAALVSTRRRPPVPQPDRPDELERVESAGGRVINWMGYRVLGVLATSRSIGDYYMKPFISAEPEVTVTERTHRDEFIILASDGLWDVMSNEVACRVAKSCLCGRAASKCPDTIRGSSASDAAAVLVEFAMSRGSTDNISVVVVELKRLKRWKGGSRQNGRT

SEQ ID NO: 19316 - protein, 126 aa, Zea mays subsp. mays
  peptide (1)..(126): Ceres Seq. ID no. 12362421
MGYRVLGVLATSRSIGDYYMKPFISAEPEVTVTERTHRDEFIILASDGLWDVMSNEVACRVAKSCLCGRAASKCPDTIRGSSASDAAAVLVEFAMSRGSTDNISVVVVELKRLKRWKGGSRQNGRT

SEQ ID NO: 19317 - DNA, 477 bp, Zea mays subsp. mays
  misc_feature (1)..(477): Ceres Seq. ID no. 1853217
  misc_feature (1)..(477): Ortholog of  Ceres SEQ ID NO 14307871 as cited in SEQ ID NO 67222
tcaccgtcccacaccagtgtcggcgagtccctcctgtgcctcgtcctccccctttcccctccgagtccagcccggcgccacccactcagccgcggatccgaggcgcagatccgatccggcgatggcgtccacggcggcgaggcggctgcgggagctgcaggcgcagacggggaacaagacctgcgtggactgcgcgcagcggaacccgcagtgggcgagcgtctcctatggggtgttcatgtgcctcgagtgctcgggcaagcaccggggcctcggcgtgcacatcagcttcgtgcgctcggtcaccatggactcctggaccgaggcgcagctccgcaagatggaggccggtggcaacgaccgactcaacgccttcctcacagctcgcggcgttcctaaggagacgccccacgtcgccaagtacaactccaacgccgcagccgcctaccgcgaccgcatcgccgcgctcgctgaggg

SEQ ID NO: 19318 - protein, 132 aa, Zea mays subsp. mays
  peptide (1)..(132): Ceres Seq. ID no. 1853218
SPSHTSVGESLLCLVLPLSPPSPARRHPLSRGSEAQIRSGDGVHGGEAAAGAAGADGEQDLRGLRAAEPAVGERLLWGVHVPRVLGQAPGPRRAHQLRALGHHGLLDRGAAPQDGGRWQRPTQRLPHSSRRS

SEQ ID NO: 19319 - protein, 158 aa, Zea mays subsp. mays
  peptide (1)..(158): Ceres Seq. ID no. 1853219
HRPTPVSASPSCASSSPFPLRVQPGATHSAADPRRRSDPAMASTAARRLRELQAQTGNKTCVDCAQRNPQWASVSYGVFMCLECSGKHRGLGVHISFVRSVTMDSWTEAQLRKMEAGGNDRLNAFLTARGVPKETPHVAKYNSNAAAAYRDRIAALAE

SEQ ID NO: 19320 - protein, 158 aa, Zea mays subsp. mays
  peptide (1)..(158): Ceres Seq. ID no. 1853220
TVPHQCRRVPPVPRPPPFPSESSPAPPTQPRIRGADPIRRWRPRRRGGCGSCRRRRGTRPAWTARSGTRSGRASPMGCSCASSARASTGASACTSASCARSPWTPGPRRSSARWRPVATTDSTPSSQLAAFLRRRPTSPSTTPTPQPPTATASPRSLR

SEQ ID NO: 19321 - protein, 118 aa, Zea mays subsp. mays
  peptide (1)..(118): Ceres Seq. ID no. 2059170
MASTAARRLRELQAQTGNKTCVDCAQRNPQWASVSYGVFMCLECSGKHRGLGVHISFVRSVTMDSWTEAQLRKMEAGGNDRLNAFLTARGVPKETPHVAKYNSNAAAAYRDRIAALAE

SEQ ID NO: 19322 - DNA, 1355 bp, Zea mays subsp. mays
  misc_feature (1)..(1355): Ceres Seq. ID no. 15180828
  misc_feature (1)..(1355): Ortholog of  Ceres SEQ ID NO 13596939 as cited in SEQ ID NO 63051
gatagttacgcgaccaactggttcacaacattgcgcaaaacaaagcagagcatagcatcacagttcacagcagcgcgcggaggcaaggcgcacaacagcgtgcggtggcgcggcgtgcagagcagccgcgcgagcgaagctagtagcgccgcacggaatcgcagagaaggaagtggggagggttaccggcgtcgacgagcgagcaggctctaggtgcgatttactcgtgcagaagctccgacaactatttctgaattacctggactggtttgtgacgatatctctggagggcaagaaaacattccgattcctgccactaacttggttatgatccacctgttcctccatctggtttcacatacttgaagtctctaaaaattccaaaggacatcaagatcccatctagtattattggctgtgattgtgaaggagattgtgctagcaacaaaaattgttcatgtgctcagcgcaatggttctgatctgccttatgtatcatataagaacattggcaggttggtggagcccaaagcagttgtatttgaatgcggggctaactgcagctgcaaccatgattgtgtaaacagaacatctcaacagggttgcagtatcacttagaggtatttaagacagcttcaaaaggttggggagtcaggacttgggacactatcctccctggggctcccatctgtgagtacacgggggtgttgaggaggactgaagatctggatggttcacagaacaaccattgttttgacattgattgtcttcaaaccatgaaaggtttggatggaagggagaaaagagctggatctgaaatgcacctgcctaatctttatccagagaatgactcagatgcaccacctgcacctgagtactgcatagacggcagttccattggcaattttgcaagatttataaatcatagttgccaacctaaccttttcgtccagtgcgtcatgagctcacacaacgatgttaaactagcaaaagtgatgctttttgctgctgacacaatacttcctcttcaggagctatcctatgactacggttatcgcttggacagtgttgttgggcctgatggtaaaattgtgaagctgccatgccactgtggtgctccagattgccggaagcgcctctactagacctgcagtgtgtttccattttgattttgcaggaaacaacctatattgtaggaaagcattcatgttatttatgtagttggcatgctctgatatatagcgaaagaggagcaacttaatctccttttagagcattcttattttgtgataattggaggacatgctggtcatggtagcatattttgcaggaaatcaattaactgatatgtctggg

SEQ ID NO: 19323 - protein, 122 aa, Zea mays subsp. mays; identical to SEQ ID NO: 14686
  peptide (1)..(122): Ceres Seq. ID no. 15180829

SEQ ID NO: 19324 - protein, 108 aa, Zea mays subsp. mays
  peptide (1)..(108): Ceres Seq. ID no. 15180830
MHLPNLYPENDSDAPPAPEYCIDGSSIGNFARFINHSCQPNLFVQCVMSSHNDVKLAKVMLFAADTILPLQELSYDYGYRLDSVVGPDGKIVKLPCHCGAPDCRKRLY

SEQ ID NO: 19325 - protein, 70 aa, Zea mays subsp. mays
  peptide (1)..(70): Ceres Seq. ID no. 15180831
DSYATNWFTTLRKTKQSIASQFTAARGGKAHNSVRWRGVQSSRASEASSAARNRREGSGEGYRRRRASRL

SEQ ID NO: 19326 - DNA, 1824 bp, Zea mays subsp. mays
  misc_feature (1)..(1824): Ceres Seq. ID no. 12419130
  misc_feature (1)..(1824): Ortholog of  Ceres SEQ ID NO 14308598 as cited in SEQ ID NO 60416
  misc_feature (1)..(1824): Ortholog of  Ceres SEQ ID NO 13502952 as cited in SEQ ID NO 62271
  misc_feature (1)..(1824): Ortholog of  Ceres SEQ ID NO 13502973 as cited in SEQ ID NO 68052
  misc_feature (1)..(1824): Ortholog of  Ceres SEQ ID NO 13596000 as cited in SEQ ID NO 68188
aggccgccccgcctgccttgctctcccagcgcgctcgtgtagtcgtcgccatcttcgcttctcttctccacatttctgcgctatcccggcgtacggctgcgatccatacacgcccaatccaaaccctacctaaaactccgcctcgtgcctccgggctcacactcgtaggcacggagtgccgttccgtggtgggtggaatcaccaaaaatgccctccgtccaccaccacctcctcctcctgacgctcgccgccttggccgtggcggcagccaccgctagcgccggcggggacccgccggcaatcgaggcgcagttcgacgcctggtgcgcggagcacgggaaggcctacgccacgcccgaggagcgcgccgcgcggctggccgtgttcgcggacaacgccgccttcgtcgccgcgcacaacgcccgtgcaggcgccaacgccgctggcggcggcggcggcggcgccgcgcccccgtcctacacgctcgcgctcaacgccttcgcggacctcacgcacgaggagttccgcgccgcgcgcctcggccgcatcgcgccgggggcggcgctccggagccgcgccgcgcccgtgtactggggcctcggcggcggtgccgcggtgcctgatgcgctggactggaggaagagcggggccgtcaccaaggtcaaggaccaaggcagctgcggagcttgttggagtttttccgcaacaggtgctatggaaggaataaacaaaataaagacaggctctctggtcagtctttctgaacaggaactaattgactgtgacagatcttataatagtggctgtggtggtggcctcatggattatgcttataagtttgtgataaaaaatggtggaattgacacagaggaggactacccctatcgtgaagcagatgggacatgtaacaagaacaagctgaaaaagcgagttgtgactattgatggttacactgatgtaccttccaacaaagaagatttgttacttcaggctgttgcccagcaacctgttagtgtaggaatatgtggtagcgctagagcatttcagttatactaccagggtatctttgatggtccatgtccgacatctcttgatcatgctgtgttaatcgttggctatggttctgaaggtggcaaggattactggattgtgaaaaactcttggggtgaaagttggggaatgaagggctatatgcatatgcatcgaaacactggtgattccaagggtgtctgcggtataaacatgatggcatcatttcctaccaaaacaagcccgaatcctcctccttcaccaggcccaggtcctaccaaatgcagtctgctcacatactgtcctgagggatccacctgttgttgctcatggcgtgtcttgggcttttgcctttcctggagctgttgcgaactggacaatgcagtttgctgcaaggataaccggtactgctgccctcatgactatcctgtttgtgatacaggtcgcgggcagtgtctcaaggccagcggcaacttctctgctatagaaggaatcaggaggaaacagtctttctctaaagctccctcgtggactggctggctggagttgatggaccaatgagcgtataatcagacatggatagtagcttcatgcaagttgtgcgatccgtaggtcggtcattggccttgttccagtgccctgccacattcctgtacgcctactgcccgctgcgttgcaccgagatgcccttattttctctttattattgaaccctatggtgtaaagtttcacgattgtacatgtatgtcacacttgtattggcctatgcattagacgtctccattagtttacctt

SEQ ID NO: 19327 - protein, 460 aa, Zea mays subsp. mays
  peptide (1)..(460): Ceres Seq. ID no. 12419131
MPSVHHHLLLLTLAALAVAAATASAGGDPPAIEAQFDAWCAEHGKAYATPEERAARLAVFADNAAFVAAHNARAGANAAGGGGGGAAPPSYTLALNAFADLTHEEFRAARLGRIAPGAALRSRAAPVYWGLGGGAAVPDALDWRKSGAVTKVKDQGSCGACWSFSATGAMEGINKIKTGSLVSLSEQELIDCDRSYNSGCGGGLMDYAYKFVIKNGGIDTEEDYPYREADGTCNKNKLKKRVVTIDGYTDVPSNKEDLLLQAVAQQPVSVGICGSARAFQLYYQGIFDGPCPTSLDHAVLIVGYGSEGGKDYWIVKNSWGESWGMKGYMHMHRNTGDSKGVCGINMMASFPTKTSPNPPPSPGPGPTKCSLLTYCPEGSTCCCSWRVLGFCLSWSCCELDNAVCCKDNRYCCPHDYPVCDTGRGQCLKASGNFSAIEGIRRKQSFSKAPSWTGWLELMDQ

SEQ ID NO: 19328 - protein, 291 aa, Zea mays subsp. mays
  peptide (1)..(291): Ceres Seq. ID no. 12419132
MEGINKIKTGSLVSLSEQELIDCDRSYNSGCGGGLMDYAYKFVIKNGGIDTEEDYPYREADGTCNKNKLKKRVVTIDGYTDVPSNKEDLLLQAVAQQPVSVGICGSARAFQLYYQGIFDGPCPTSLDHAVLIVGYGSEGGKDYWIVKNSWGESWGMKGYMHMHRNTGDSKGVCGINMMASFPTKTSPNPPPSPGPGPTKCSLLTYCPEGSTCCCSWRVLGFCLSWSCCELDNAVCCKDNRYCCPHDYPVCDTGRGQCLKASGNFSAIEGIRRKQSFSKAPSWTGWLELMDQ

SEQ ID NO: 19329 - protein, 256 aa, Zea mays subsp. mays
  peptide (1)..(256): Ceres Seq. ID no. 12419133
MDYAYKFVIKNGGIDTEEDYPYREADGTCNKNKLKKRVVTIDGYTDVPSNKEDLLLQAVAQQPVSVGICGSARAFQLYYQGIFDGPCPTSLDHAVLIVGYGSEGGKDYWIVKNSWGESWGMKGYMHMHRNTGDSKGVCGINMMASFPTKTSPNPPPSPGPGPTKCSLLTYCPEGSTCCCSWRVLGFCLSWSCCELDNAVCCKDNRYCCPHDYPVCDTGRGQCLKASGNFSAIEGIRRKQSFSKAPSWTGWLELMDQ

SEQ ID NO: 19330 - DNA, 955 bp, Zea mays subsp. mays
  misc_feature (1)..(955): Ceres Seq. ID no. 12420073
  misc_feature (1)..(955): Ortholog of  Ceres SEQ ID NO 15177004 as cited in SEQ ID NO 57554
  misc_feature (1)..(955): Ortholog of  Ceres SEQ ID NO 13662587 as cited in SEQ ID NO 63275
  misc_feature (1)..(955): Ortholog of  Ceres SEQ ID NO 13599500 as cited in SEQ ID NO 0
agccttcttctagtagctacggagtaccattcatcatcagagctagcaagctcaaagaaaactgagctcgtgtgtagtgagcagcgagtgagtgactggtgagtggtgaccatttcaagaacagcgccgcagcagggagctaattcgttcgttcatcgtcgcatcatcagtttgatccttcgaccccatagcttcctgcatcttcgagctcgtcactaaacaaccatgggaggaggcacgctggagtacctgtcggatctgctgggcggcggcggccggcgccggtacaagaagaggaagcagttccagacggtggagctcaaggtgcgcatggactgcgacggctgcgagatgaaagtcaggaacgcgctctccagcatgaaaggggtgcactccgtggagatcaaccgcaagcagtacaaggtgacggtgcaggggtacgtggagccgcacaaggtggtcaagcgggtgcaggccacggggaagaaggccgagatctggccctacgtgccctacagcctcgtcgcgcacccttacgccgcgccggcctacgacaagaaggcgccgccgggctacgtgcgcagggtcgacgccgtcatgcccgtctcctccacctacggcgggcccacggcggcggccggcccgccgcaggaggagcggctcgccaccatgttcagcgacgacaaccccaacgcgtgctctgtcatgtagattagaattactttttcttttcccctacacaccaccgtgggtgcatggcgcagctctcttcgaccacagaaaatgtaaaccgtacgtggatgcatgtcaaaaccatagatgatcgcctcggttggatgtctatgtccatcacatgtgcatgtacgtacgtagctgtatgttgttgtatgctttgtatattattgtttgatggaaccaaaagagagcatgcatgcgtggcagagagattttcccc

SEQ ID NO: 19331 - protein, 161 aa, Zea mays subsp. mays
  peptide (1)..(161): Ceres Seq. ID no. 12420074
MGGGTLEYLSDLLGGGGRRRYKKRKQFQTVELKVRMDCDGCEMKVRNALSSMKGVHSVEINRKQYKVTVQGYVEPHKVVKRVQATGKKAEIWPYVPYSLVAHPYAAPAYDKKAPPGYVRRVDAVMPVSSTYGGPTAAAGPPQEERLATMFSDDNPNACSVM

SEQ ID NO: 19332 - protein, 126 aa, Zea mays subsp. mays
  peptide (1)..(126): Ceres Seq. ID no. 12420075
MDCDGCEMKVRNALSSMKGVHSVEINRKQYKVTVQGYVEPHKVVKRVQATGKKAEIWPYVPYSLVAHPYAAPAYDKKAPPGYVRRVDAVMPVSSTYGGPTAAAGPPQEERLATMFSDDNPNACSVM

SEQ ID NO: 19333 - protein, 119 aa, Zea mays subsp. mays
  peptide (1)..(119): Ceres Seq. ID no. 12420076
MKVRNALSSMKGVHSVEINRKQYKVTVQGYVEPHKVVKRVQATGKKAEIWPYVPYSLVAHPYAAPAYDKKAPPGYVRRVDAVMPVSSTYGGPTAAAGPPQEERLATMFSDDNPNACSVM

SEQ ID NO: 19334 - DNA, 1379 bp, Zea mays subsp. mays
  misc_feature (1)..(1379): Ceres Seq. ID no. 12359162
  misc_feature (1)..(1379): Ortholog of  Ceres SEQ ID NO 13655992 as cited in SEQ ID NO 65504
  misc_feature (1)..(1379): Ortholog of  Ceres SEQ ID NO 13587581 as cited in SEQ ID NO 0
acaacactcgcctgccctgccctctcatctcgcttcgcttccattccatcgcgccagtcgccagactcaccagggagacagggagagtagggggaaatatcaattagaaacaacgaggaactagcaaagaaagaaggataactcccataagaaaaatcgccaaatacgccattcatcttctccgcccgggtttcagaacgtgcggcagtttagccaggatggtggcgatcgagaaccagaaccagagccaggccgcttcccgaacggccgcgtcgaggagttcatccacgcaaggacattgtcagctgccgaccttcgcgatcctgaaatttcagctctggtggcttccaagctgagggagttccacaaccttgacatgcctggtcccaaatctgtgctcatttgggacagacttaggaactggctcagaactgccaagagcttgtgtccacctgaagaagccaaggaatttcggttggacagtctggagaaccagattactgcattggagaacgagtgttcaggtgattaccagtggattggtttctgtcacaatgatcttcagtatggcaatatcatgattgatgaagagaccaacgtgctgaccatcattgattatgagtatgcaagcttcaacccagttgcatatgacattgctaaccatttctgtgagatggcagcagactatcattcatcaaagcctcatatactggactacagcagatatccagatgttgatgagcagaagcgttttgttaagacctacctgaacatttctggtgaggaacctgatgcggaagttgtggagaacctgctccaaagcattgagaagcacacgctcgccagccatctagtatggggcctctggggaataatttcggatcatgttaacgacattgacttcgactacaaggagtatgcgaggcagagattcgagcagtactggcacaagtctgcgatcttaacatcttgaacatgtgtataaacacccgtacgtggtctcaggaactccctgagggcctgtggctgcacacacgaaattgtgcagtgccactgacacatagataagctgtgaaagaagaaatactgacgacgacgacgaataatcccgttttgggctcgggaggttatttctccgcaactcgatgagcttcaggcttcagcttcaggaaggaaggaaggagctatggggatttggctgcccgcttatgctgtaccaatgcaattaaaagataaagatccggtccggtgttgcgtgtgctatgtttagttttggctagcaccgccgagagccgtggtcctgttgtggtgtttctagtttctgtatgcttgatgttgttagtgtgctggataatttggttttgtgcttggggagtcct

SEQ ID NO: 19335 - protein, 198 aa, Zea mays subsp. mays
  peptide (1)..(198): Ceres Seq. ID no. 12359163
MPGPKSVLIWDRLRNWLRTAKSLCPPEEAKEFRLDSLENQITALENECSGDYQWIGFCHNDLQYGNIMIDEETNVLTIIDYEYASFNPVAYDIANHFCEMAADYHSSKPHILDYSRYPDVDEQKRFVKTYLNISGEEPDAEVVENLLQSIEKHTLASHLVWGLWGIISDHVNDIDFDYKEYARQRFEQYWHKSAILTS

SEQ ID NO: 19336 - protein, 131 aa, Zea mays subsp. mays
  peptide (1)..(131): Ceres Seq. ID no. 12359164
MIDEETNVLTIIDYEYASFNPVAYDIANHFCEMAADYHSSKPHILDYSRYPDVDEQKRFVKTYLNISGEEPDAEVVENLLQSIEKHTLASHLVWGLWGIISDHVNDIDFDYKEYARQRFEQYWHKSAILTS

SEQ ID NO: 19337 - protein, 99 aa, Zea mays subsp. mays
  peptide (1)..(99): Ceres Seq. ID no. 12359165
MAADYHSSKPHILDYSRYPDVDEQKRFVKTYLNISGEEPDAEVVENLLQSIEKHTLASHLVWGLWGIISDHVNDIDFDYKEYARQRFEQYWHKSAILTS

SEQ ID NO: 19338 - DNA, 665 bp, Zea mays subsp. mays
  misc_feature (1)..(665): Ceres Seq. ID no. 13568486
  misc_feature (1)..(665): Ortholog of  Ceres SEQ ID NO 13594789 as cited in SEQ ID NO 52172
  misc_feature (1)..(665): Ortholog of  Ceres SEQ ID NO 14306131 as cited in SEQ ID NO 52246
  misc_feature (1)..(665): Ortholog of  Ceres SEQ ID NO 14309585 as cited in SEQ ID NO 52660
  misc_feature (1)..(665): Ortholog of  Ceres SEQ ID NO 14305267 as cited in SEQ ID NO 0
gcttgctcccaagatcaagcgcctcccgcctccagcactctaactcaggggacacgatcgccatggccgccacatcgaccgccgccgccgtgctgtccccgccgtccgtggccgggctccgcctggcgccgtctcccggccgggcgcgcgtgtcgttccgcgcggcgccgggcgccggcgcggcggtccgtggcggcgcgcgcggagctgagctcggcgctggtgatcagcctgagcacgggcgtgtcgctcttcctgggccgcttcgtcttcttcaacttccagcgggagaacgtggcgaagcaggtgcccgcgcagaacggcaagacgcacttcgacgccggcgacgagcgcgccaaggagttcgcggccctgctcaagtccaacgaccccgtgggcttcaacctcgtcgacgtcctccgcctggggctcgctcggccacatcgtcgcctactacatcctcgccacctccagcaacggatacgaccccaacttcttntgagcggtcgtcgaggatgtattctacagacanccgtgtgcgtgcgtgtgtgcttgtcatgtatccgatcaaagtttggttaatttggacaagtagtgcaactgcagaataattggtatttgtatagtgcaccatgccaacatgaatttgatctgtctctgtcttc

SEQ ID NO: 19339 - protein, 202 aa, Zea mays subsp. mays
  peptide (1)..(202): Ceres Seq. ID no. 13568487
  misc_feature (166)..(166): Xaa is any aa, unknown or other
  misc_feature (177)..(177): Xaa is any aa, unknown or other
LLPRSSASRLQHSNSGDTIAMAATSTAAAVLSPPSVAGLRLAPSPGRARVSFRAAPGAGAAVRGGARGAELGAGDQPEHGRVALPGPLRLLQLPAGERGEAGARAERQDALRRRRRARQGVRGPAQVQRPRGLQPRRRPPPGARSATSSPTTSSPPPATDTTPTSXERSSRMYSTDXRVRACVLVMYPIKVWLIWTSSATAE

SEQ ID NO: 19340 - protein, 193 aa, Zea mays subsp. mays
  peptide (1)..(193): Ceres Seq. ID no. 13568488
  misc_feature (167)..(167): Xaa is any aa, unknown or other
  misc_feature (178)..(178): Xaa is any aa, unknown or other
ACSQDQAPPASSTLTQGTRSPWPPHRPPPPCCPRRPWPGSAWRRLPAGRACRSARRRAPARRSVAARAELSSALVISLSTGVSLFLGRFVFFNFQRENVAKQVPAQNGKTHFDAGDERAKEFAALLKSNDPVGFNLVDVLRLGLARPHRRLLHPRHLQQRIRPQLLXSGRRGCILQTXVCVRVCLSCIRSKFG

SEQ ID NO: 19341 - protein, 182 aa, Zea mays subsp. mays
  peptide (1)..(182): Ceres Seq. ID no. 13568489
  misc_feature (146)..(146): Xaa is any aa, unknown or other
  misc_feature (157)..(157): Xaa is any aa, unknown or other
MAATSTAAAVLSPPSVAGLRLAPSPGRARVSFRAAPGAGAAVRGGARGAELGAGDQPEHGRVALPGPLRLLQLPAGERGEAGARAERQDALRRRRRARQGVRGPAQVQRPRGLQPRRRPPPGARSATSSPTTSSPPPATDTTPTSXERSSRMYSTDXRVRACVLVMYPIKVWLIWTSSATAE

SEQ ID NO: 19342 - DNA, 1172 bp, Zea mays subsp. mays
  misc_feature (1)..(1172): Ceres Seq. ID no. 12375730
  misc_feature (1)..(1172): Ortholog of  Ceres SEQ ID NO 14313599 as cited in SEQ ID NO 54989
  misc_feature (1)..(1172): Ortholog of  Ceres SEQ ID NO 15176204 as cited in SEQ ID NO 55608
  misc_feature (1)..(1172): Ortholog of  Ceres SEQ ID NO 15225111 as cited in SEQ ID NO 58444
  misc_feature (1)..(1172): Ortholog of  Ceres SEQ ID NO 14313064 as cited in SEQ ID NO 59543
  misc_feature (1)..(1172): Ortholog of  Ceres SEQ ID NO 13584238 as cited in SEQ ID NO 64216
  misc_feature (1)..(1172): Ortholog of  Ceres SEQ ID NO 13661001 as cited in SEQ ID NO 67531
  misc_feature (1)..(1172): Ortholog of  Ceres SEQ ID NO 15178920 as cited in SEQ ID NO 0
gcacgagaccattacctagaacatcctaatcgaaaaatcgacagcctccgccgcacgttcacacacacagcaagcagaatccagctagctcagctctcactcgctcgctcactccagtgtccagtctcccttcacttcaggacgtcctcgattcgccgccgtctgtcaaccgagatggacgcgctgtggaatggttcgtcgtgcgattggccggcgccgacggtgatcatcagcgacgacgacgcggcggcagcggagctgcggcgggggccgtggacagtggacgaggacgcgctcctggcggcccacgtggccgcgcacggcgaggggcggtggaacgagctggcgcgcgacgcggggctacggcgcaccggcaagagctgccgcctccgctggctcaactacctccgccccggcgtgcgccgcgggggcttcaccccgcgggagcagctgctcatcctcgacctccactcgcgctggggcaaccgctggtccaagatcgcggcgcacctgccgggccgcacggacaacgaggtcaagaactactggaggacgcgggtgcagaagcacgccaagcagctgcactgcgacgtcggcagccgcaggttccacgacgccatgaggaacctctggatgccgcgcctgatcgagaggatccacgccgacgactcagccgccgtcgccgctaatgccaccggcgacgtctcccacttctactccgcgagcccatcgcatgagctgtcgtcgtcctcccagccggcgccggcgtaccgaaacgctgcgcccaacggcagctgcgcgcgtgcgccgtccccggacgcctcctgcgtcaccgggccgtcgtcgtggtcacgggaggcgtcgcccgcgtcgcagttccaatcgagcggctcgaccattgccggaccgtctacttccaccgagctgtgccagaacggatgctccagcgcgacgagcgttgacatgttcgacgagagctggtcggagcttcttgcgcgcgccaaccatgacgacacggatttcggattgggagaaactggagacaactggtggggtctggaggatatctgggaacaaccgctttaaactgatcgctccctacttttgtactactacatactacgtatgctgcccgagacgaaatgacagaattgttgtttctagtgttattg

SEQ ID NO: 19343 - protein, 361 aa, Zea mays subsp. mays
  peptide (1)..(361): Ceres Seq. ID no. 12375731
ARDHYLEHPNRKIDSLRRTFTHTASRIQLAQLSLARSLQCPVSLHFRTSSIRRRLSTEMDALWNGSSCDWPAPTVIISDDDAAAAELRRGPWTVDEDALLAAHVAAHGEGRWNELARDAGLRRTGKSCRLRWLNYLRPGVRRGGFTPREQLLILDLHSRWGNRWSKIAAHLPGRTDNEVKNYWRTRVQKHAKQLHCDVGSRRFHDAMRNLWMPRLIERIHADDSAAVAANATGDVSHFYSASPSHELSSSSQPAPAYRNAAPNGSCARAPSPDASCVTGPSSWSREASPASQFQSSGSTIAGPSTSTELCQNGCSSATSVDMFDESWSELLARANHDDTDFGLGETGDNWWGLEDIWEQPL

SEQ ID NO: 19344 - protein, 303 aa, Zea mays subsp. mays
  peptide (1)..(303): Ceres Seq. ID no. 12375732
MDALWNGSSCDWPAPTVIISDDDAAAAELRRGPWTVDEDALLAAHVAAHGEGRWNELARDAGLRRTGKSCRLRWLNYLRPGVRRGGFTPREQLLILDLHSRWGNRWSKIAAHLPGRTDNEVKNYWRTRVQKHAKQLHCDVGSRRFHDAMRNLWMPRLIERIHADDSAAVAANATGDVSHFYSASPSHELSSSSQPAPAYRNAAPNGSCARAPSPDASCVTGPSSWSREASPASQFQSSGSTIAGPSTSTELCQNGCSSATSVDMFDESWSELLARANHDDTDFGLGETGDNWWGLEDIWEQPL

SEQ ID NO: 19345 - DNA, 1137 bp, Zea mays subsp. mays
  misc_feature (1)..(1137): Ceres Seq. ID no. 12359166
  misc_feature (1)..(1137): Ortholog of  Ceres SEQ ID NO 13595548 as cited in SEQ ID NO 51024
  misc_feature (1)..(1137): Ortholog of  Ceres SEQ ID NO 13599631 as cited in SEQ ID NO 0
accgcactccagcgttcagcattagacacgagagctcctagtagccagaccactagtcccgcgaccctgtcgagagaaacagacagagcaacatggcgcctgcattgtcattcccgatcatcgacatggggctgctcgccggggaggagaggccggcggcgatggagcggctgcaagatgcgtgcgagaactggggcttcttcgagattctgaaccacggcatctcgacggagctgatggacgaggtagagaagctgaccaaggagcactacaagcgggtgcgcgagcagaggttcctcgagttcgctagcaagacgctcggggacggccgcgtcaagatcccgatccagaaggacggcgagatccccatcccttacaagcccgacgtcgacgtggagaagatcaagttccaccacttctccttcgaggagaccaccgccacgctccacctcaagctcgagaacaagaacgacttcgacctcggcctcaacctgctcgagtacgagatgtggctcggcgacgacagcatcgcctccgccgagctcacgcagaccgccaagatcgagaagcaggggatcaccaggatgcaggtgccctttagcttcaggcccaaggacttcggatccgctgtctgggacatgatcagggggaggggcacgggatacaccatcaagggaaagatcgatgtcgacactcccttcggcaacatgaagctgcccataagcaaagagggtggaaccacccacctcaagaaggaggacgacgatgatgacgatgatgacaactgaaatgaggactgctggggggcgctgctgttacctttcacgaaacgcagtgaagcagaggatgcgggatcgtcgtcgtttgatctgatacccatacccttagcgctggttaatctcttgcctttagcttatggtgctctgttgttttgcattgtctgaacatcctctcacttcctgagtgtacgttcagtttgaggtttcctgtgttgtccgtctgaattccttcaaactttgcggttggaactggatgaagaataaaattccaacccgtcctggttcttttgtgggtctgtttggaatagatgctgcctgccaatggtcctgaaataagatttagtgaaaggctttattc

SEQ ID NO: 19346 - protein, 231 aa, Zea mays subsp. mays
  peptide (1)..(231): Ceres Seq. ID no. 12359167
MAPALSFPIIDMGLLAGEERPAAMERLQDACENWGFFEILNHGISTELMDEVEKLTKEHYKRVREQRFLEFASKTLGDGRVKIPIQKDGEIPIPYKPDVDVEKIKFHHFSFEETTATLHLKLENKNDFDLGLNLLEYEMWLGDDSIASAELTQTAKIEKQGITRMQVPFSFRPKDFGSAVWDMIRGRGTGYTIKGKIDVDTPFGNMKLPISKEGGTTHLKKEDDDDDDDDN

SEQ ID NO: 19347 - protein, 220 aa, Zea mays subsp. mays
  peptide (1)..(220): Ceres Seq. ID no. 12359168
MGLLAGEERPAAMERLQDACENWGFFEILNHGISTELMDEVEKLTKEHYKRVREQRFLEFASKTLGDGRVKIPIQKDGEIPIPYKPDVDVEKIKFHHFSFEETTATLHLKLENKNDFDLGLNLLEYEMWLGDDSIASAELTQTAKIEKQGITRMQVPFSFRPKDFGSAVWDMIRGRGTGYTIKGKIDVDTPFGNMKLPISKEGGTTHLKKEDDDDDDDDN

SEQ ID NO: 19348 - protein, 208 aa, Zea mays subsp. mays
  peptide (1)..(208): Ceres Seq. ID no. 12359169
MERLQDACENWGFFEILNHGISTELMDEVEKLTKEHYKRVREQRFLEFASKTLGDGRVKIPIQKDGEIPIPYKPDVDVEKIKFHHFSFEETTATLHLKLENKNDFDLGLNLLEYEMWLGDDSIASAELTQTAKIEKQGITRMQVPFSFRPKDFGSAVWDMIRGRGTGYTIKGKIDVDTPFGNMKLPISKEGGTTHLKKEDDDDDDDDN

SEQ ID NO: 19349 - DNA, 1467 bp, Zea mays subsp. mays; identical to SEQ ID NO: 13564
  misc_feature (1)..(1467): Ceres Seq. ID no. 12368243
  misc_feature (1)..(1467): Ortholog of  Ceres SEQ ID NO 15174547 as cited in SEQ ID NO 59586
  misc_feature (1)..(1467): Ortholog of  Ceres SEQ ID NO 15169470 as cited in SEQ ID NO 66036

SEQ ID NO: 19350 - protein, 242 aa, Zea mays subsp. mays; identical to SEQ ID NO: 13565
  peptide (1)..(242): Ceres Seq. ID no. 12368244

SEQ ID NO: 19351 - protein, 217 aa, Zea mays subsp. mays; identical to SEQ ID NO: 13566
  peptide (1)..(217): Ceres Seq. ID no. 12368245

SEQ ID NO: 19352 - protein, 206 aa, Zea mays subsp. mays; identical to SEQ ID NO: 13567
  peptide (1)..(206): Ceres Seq. ID no. 12368246

SEQ ID NO: 19353 - DNA, 993 bp, Zea mays subsp. mays
  misc_feature (1)..(993): Ceres Seq. ID no. 12364374
  misc_feature (1)..(993): Ortholog of  Ceres SEQ ID NO 13599971 as cited in SEQ ID NO 0
gcacgagaccattacctagaacatcctaatcaaaaaacaggagctagataatctagcgaggttgccagagctccagtacctcacgctatatggtctcagctggcctccaaggtatactgttggcccagacgacttcaggaatctgaggttctgcgaagtgggcacaacgttcgagtttcgtaagggcgccatgccaaggcttgaagtgctgcaatttggagtttatgcagggtactggagttgggtatgcaatggtatgccgttcgagcagttcccaacgaaggatgtgatcgaagatcttgacttggacctggataacgtccttttacttcagcaagtaatagtcaaagtcaactgctcaggtgctactgccgcacaagtggatgaggtggaggccgtggtcatgcgtgccgtggaaaatcatgccaaccgtccaaccataaaaatggatcgagaatatgaagaaaatatcttatctgatgaaaagtgggagactctgcttcggcgacacattgaaaaggattgctgcgtgcgcatgatgaaggataaatctgatgctttcttcctcagccagctgcggtcgtatcgatatcttcaggaagccattattttcatcgactgttcgggtgccagcatgtgtgaggtgcagaaagtggaagcagcttatagacatgcagccgaggttcatcctaaccatccaagtattgaacttatcagaacaaacaccgacggaatggcctcctcctcatccgaccatcccaacacagagcccaggaattgatgactcggtttgttagatccttccaacccagcagcaggtaaatgtgagttgcttaagtaccaaagagagaggtcctgttcagctagatgattagaagcattggcatggcttgttaattacattcgtggttcttagtctaaaatcacattgaagagggagacggacccaagtgatgcagttcatgtgttatctgtatcaatctctatttttat

SEQ ID NO: 19354 - protein, 196 aa, Zea mays subsp. mays
  peptide (1)..(196): Ceres Seq. ID no. 12364375
MPRLEVLQFGVYAGYWSWVCNGMPFEQFPTKDVIEDLDLDLDNVLLLQQVIVKVNCSGATAAQVDEVEAVVMRAVENHANRPTIKMDREYEENILSDEKWETLLRRHIEKDCCVRMMKDKSDAFFLSQLRSYRYLQEAIIFIDCSGASMCEVQKVEAAYRHAAEVHPNHPSIELIRTNTDGMASSSSDHPNTEPRN

SEQ ID NO: 19355 - protein, 174 aa, Zea mays subsp. mays
  peptide (1)..(174): Ceres Seq. ID no. 12364376
MPFEQFPTKDVIEDLDLDLDNVLLLQQVIVKVNCSGATAAQVDEVEAVVMRAVENHANRPTIKMDREYEENILSDEKWETLLRRHIEKDCCVRMMKDKSDAFFLSQLRSYRYLQEAIIFIDCSGASMCEVQKVEAAYRHAAEVHPNHPSIELIRTNTDGMASSSSDHPNTEPRN

SEQ ID NO: 19356 - protein, 125 aa, Zea mays subsp. mays
  peptide (1)..(125): Ceres Seq. ID no. 12364377
MRAVENHANRPTIKMDREYEENILSDEKWETLLRRHIEKDCCVRMMKDKSDAFFLSQLRSYRYLQEAIIFIDCSGASMCEVQKVEAAYRHAAEVHPNHPSIELIRTNTDGMASSSSDHPNTEPRN

SEQ ID NO: 19357 - DNA, 1375 bp, Zea mays subsp. mays
  misc_feature (1)..(1375): Ceres Seq. ID no. 12375696
  misc_feature (1)..(1375): Ortholog of  Ceres SEQ ID NO 14302764 as cited in SEQ ID NO 67753
  misc_feature (1)..(1375): Ortholog of  Ceres SEQ ID NO 14302291 as cited in SEQ ID NO 68180
gcacgagaccattacctagaacatcctaatcgaaaagccgttcaactcgatcacttctttcccttccacacaggcacacaggcacacagcacacagctcactcaactcccctcccgcttcgtcagctcaccatcataaaccaaacagagagctctctccctctcggtcgttccattccaggatgctgcttaacccggcgtccatgctggacaccatccggcagcacctcctggaggagccaccagcggcggccgacgagagcttcgggatcctggtggcggaccagtggagcgactcgctcccgttccgcaccgacgacgccgacgacatggtggtgttcggggcgctgcaggacgccttcgcctacggctggctacccgacggctccttcgcgcacgtgaagcccgagccggtgcggtcccccgactcctcctactactcctacgacggctcctgcttcggcggcctcccgtacccggagcagccactgacgcccggcagcgagggcgaggcggccgccacgcccagccccaggagggaggaggccgcggcggccgtggccaggggcaagcactacaggggcgtcaggcagcgcccgtggggcaagttcgcggcggagatcagggacccggccaagaacggcgcgcgcgtctggctcggcacctacgacaccgccgaggacgccgcgctcgcctacgaccgcgccgcctaccgcatgcgcggctcgcgcgcgctcctcaacttcccgctccgcatcgcctccgagatcgccgccgcggccgccggcgacaagcggccgttggcgttgcccgagcccgccacctcctcggactcgtnctccaccggcggctcgcccaagaggcggaagcgaggcgaagccgccgccgccaacatggccatggcgctggtgcccccgccttcccagcttagccggccggcccagccatggttccctgccgccgcgccggtcgagcaggcggcgatgccgccgcgcgtggagcagctcgtcatctagctagccccgcgcgttaaaccggactcgcggcgagacaatgaggcgtgcaagtgcaacgacgggtgagccggcggaaggcggaggaaaacaggacgaggcccttgcgcgaatgcgacggcgcgcggaatgcgataagctcgggagcaattgggggtccggatgccgctgttgctccgtgcaactcgcgcaagtggaaagaagctgtctgtgtgtagattcatccaagtgtcttgtctgcaaacggattttcggtatatgcgtccttgtcacctgtcagggtggtgtggtgtgagggcttgggcttgtgctgctgataagtttggagatctgtacaaagaaaaaacgtagggagaagatgag

SEQ ID NO: 19358 - protein, 277 aa, Zea mays subsp. mays
  peptide (1)..(277): Ceres Seq. ID no. 12375697
  misc_feature (219)..(219): Xaa is any aa, unknown or other
MLLNPASMLDTIRQHLLEEPPAAADESFGILVADQWSDSLPFRTDDADDMVVFGALQDAFAYGWLPDGSFAHVKPEPVRSPDSSYYSYDGSCFGGLPYPEQPLTPGSEGEAAATPSPRREEAAAAVARGKHYRGVRQRPWGKFAAEIRDPAKNGARVWLGTYDTAEDAALAYDRAAYRMRGSRALLNFPLRIASEIAAAAAGDKRPLALPEPATSSDSXSTGGSPKRRKRGEAAAANMAMALVPPPSQLSRPAQPWFPAAAPVEQAAMPPRVEQLVI

SEQ ID NO: 19359 - protein, 270 aa, Zea mays subsp. mays
  peptide (1)..(270): Ceres Seq. ID no. 12375698
  misc_feature (212)..(212): Xaa is any aa, unknown or other
MLDTIRQHLLEEPPAAADESFGILVADQWSDSLPFRTDDADDMVVFGALQDAFAYGWLPDGSFAHVKPEPVRSPDSSYYSYDGSCFGGLPYPEQPLTPGSEGEAAATPSPRREEAAAAVARGKHYRGVRQRPWGKFAAEIRDPAKNGARVWLGTYDTAEDAALAYDRAAYRMRGSRALLNFPLRIASEIAAAAAGDKRPLALPEPATSSDSXSTGGSPKRRKRGEAAAANMAMALVPPPSQLSRPAQPWFPAAAPVEQAAMPPRVEQLVI

SEQ ID NO: 19360 - protein, 228 aa, Zea mays subsp. mays
  peptide (1)..(228): Ceres Seq. ID no. 12375699
  misc_feature (170)..(170): Xaa is any aa, unknown or other
MVVFGALQDAFAYGWLPDGSFAHVKPEPVRSPDSSYYSYDGSCFGGLPYPEQPLTPGSEGEAAATPSPRREEAAAAVARGKHYRGVRQRPWGKFAAEIRDPAKNGARVWLGTYDTAEDAALAYDRAAYRMRGSRALLNFPLRIASEIAAAAAGDKRPLALPEPATSSDSXSTGGSPKRRKRGEAAAANMAMALVPPPSQLSRPAQPWFPAAAPVEQAAMPPRVEQLVI

SEQ ID NO: 19361 - DNA, 1892 bp, Zea mays subsp. mays
  misc_feature (1)..(1892): Ceres Seq. ID no. 12364555
  misc_feature (1)..(1892): Ortholog of  Ceres SEQ ID NO 14306857 as cited in SEQ ID NO 60035
  misc_feature (1)..(1892): Ortholog of  Ceres SEQ ID NO 15227091 as cited in SEQ ID NO 60294
  misc_feature (1)..(1892): Ortholog of  Ceres SEQ ID NO 15169627 as cited in SEQ ID NO 64517
  misc_feature (1)..(1892): Ortholog of  Ceres SEQ ID NO 15169611 as cited in SEQ ID NO 65939
  misc_feature (1)..(1892): Ortholog of  Ceres SEQ ID NO 14307960 as cited in SEQ ID NO 66187
  misc_feature (1)..(1892): Ortholog of  Ceres SEQ ID NO 13502874 as cited in SEQ ID NO 66298
  misc_feature (1)..(1892): Ortholog of  Ceres SEQ ID NO 12614124 as cited in SEQ ID NO 68392
gcacgagaccattacctagaacatcctaatcgaaaaactcgttagtcgttactcccaacaccgggaatccatggagccggcctatgtcgtcaccctctccttcctcttcctcttcttgctccaccatctcctcggccgccaccgccgcaggaccaacggcaagaacaagagaacgcagctgccaccgagccctcccgccatcccggtcttgggtcacctccacctcttacggaagcctatccacgcggcgctcgctcgcctcgcggagcgctacgggccggtgttcttcctccggctcggctcgcggcaagccgtggtggtgtcgtccgcggcttgcgccacggagtgcttcaccgagaatgacgtctgcttcgcgaaccgcccgcggttccccacgctcctgctggtttccttcggcggcgccacgctcccaatgtgccgctacggcccgtactggcgcaacctccgccgcgtcgccacggtgcagctcctgtccgcgcaccgcgtcagctgcatgctccccgtcatatccgccgaggtgcgcgcaatggcgcggaggatgtaccaatccgccgccgccgcccccgccggcgccgcgagggtcgagctgaagcggaggctgttcgagctctcccacagcgccctgatggagaccatcgcgcgaaccaagacgtcccgtgccgtggcggacgacgacacggacatgtctccggaggcccaggaattcatgaaggcgctggacgtgttccttccgcttctcagcggggccaacgcgtgggactacctgccggtgctacggtggctcgacgtgttcggcgtgaggaacaagatcctgcgcgcggtgagcgcaagggacgcgttcctacggcggctcatcgacgcggagcggcggaggctggaggagggcggcgagaacaacgataagaagagcatgattggcgttctgctctcactgcagaagtcagaaccggaggtgtacacggataccatgatcatggctctgtgctcgagcatgttcgctgggggttctgaaacaacagcgacgacggcggaatgggcgatgtcgctgctgctaagccaccccgatgttctgaagaaagcgcaggcggagattgacgcgtccgtggggcactcccggctgctcggcgccgacgacctgccgcgcctcggctacctccactgcatcgtcagcgagaccctgcggctgtacccggtcgtgccgacgctggtcccgcacgagtccaccgccgactgcacggtcggcggccaccgtgtgccgagcgggacgatgctcctcgtcaacgtgtacgccatccacagggaccccgcgatatgggcggacccagccgcgttcaggccggagcggttcgaggacggccgtgccgacgggctgttcgtgatgccgttcgggatgggaaggcggaaatgccccggagaggccctcgcgctgcggacgctggggctggtcctggggacgttgatccagtgcttcgactgggacacggtcggcggcgccgaggtcgatatggccgaagggggcggaatcacgctcccgagggctgtccctctggaggccatctgcaagccgcgccatgctatgcttggcgtcctcaagggactgtgagcgccatgctatgccttgatacataagtaagctttttttctttagtaaagcagtcatcttgcgtctcaagcagttgcttgctttattgcttgaaactcactttcttcctggagtgtagccgccgcagtgtaagcgcgcggggttcaaatgttatttcattcacagccatcagccatgtatatgttgaactagcaatgtgaatgtgacccacgtaaaatcgcatgggtttactagttttttttttcagttatagcatttgtgttttttt

SEQ ID NO: 19362 - protein, 517 aa, Zea mays subsp. mays
  peptide (1)..(517): Ceres Seq. ID no. 12364556
MEPAYVVTLSFLFLFLLHHLLGRHRRRTNGKNKRTQLPPSPPAIPVLGHLHLLRKPIHAALARLAERYGPVFFLRLGSRQAVVVSSAACATECFTENDVCFANRPRFPTLLLVSFGGATLPMCRYGPYWRNLRRVATVQLLSAHRVSCMLPVISAEVRAMARRMYQSAAAAPAGAARVELKRRLFELSHSALMETIARTKTSRAVADDDTDMSPEAQEFMKALDVFLPLLSGANAWDYLPVLRWLDVFGVRNKILRAVSARDAFLRRLIDAERRRLEEGGENNDKKSMIGVLLSLQKSEPEVYTDTMIMALCSSMFAGGSETTATTAEWAMSLLLSHPDVLKKAQAEIDASVGHSRLLGADDLPRLGYLHCIVSETLRLYPVVPTLVPHESTADCTVGGHRVPSGTMLLVNVYAIHRDPAIWADPAAFRPERFEDGRADGLFVMPFGMGRRKCPGEALALRTLGLVLGTLIQCFDWDTVGGAEVDMAEGGGITLPRAVPLEAICKPRHAMLGVLKGL

SEQ ID NO: 19363 - protein, 396 aa, Zea mays subsp. mays
  peptide (1)..(396): Ceres Seq. ID no. 12364557
MCRYGPYWRNLRRVATVQLLSAHRVSCMLPVISAEVRAMARRMYQSAAAAPAGAARVELKRRLFELSHSALMETIARTKTSRAVADDDTDMSPEAQEFMKALDVFLPLLSGANAWDYLPVLRWLDVFGVRNKILRAVSARDAFLRRLIDAERRRLEEGGENNDKKSMIGVLLSLQKSEPEVYTDTMIMALCSSMFAGGSETTATTAEWAMSLLLSHPDVLKKAQAEIDASVGHSRLLGADDLPRLGYLHCIVSETLRLYPVVPTLVPHESTADCTVGGHRVPSGTMLLVNVYAIHRDPAIWADPAAFRPERFEDGRADGLFVMPFGMGRRKCPGEALALRTLGLVLGTLIQCFDWDTVGGAEVDMAEGGGITLPRAVPLEAICKPRHAMLGVLKGL

SEQ ID NO: 19364 - protein, 369 aa, Zea mays subsp. mays
  peptide (1)..(369): Ceres Seq. ID no. 12364558
MLPVISAEVRAMARRMYQSAAAAPAGAARVELKRRLFELSHSALMETIARTKTSRAVADDDTDMSPEAQEFMKALDVFLPLLSGANAWDYLPVLRWLDVFGVRNKILRAVSARDAFLRRLIDAERRRLEEGGENNDKKSMIGVLLSLQKSEPEVYTDTMIMALCSSMFAGGSETTATTAEWAMSLLLSHPDVLKKAQAEIDASVGHSRLLGADDLPRLGYLHCIVSETLRLYPVVPTLVPHESTADCTVGGHRVPSGTMLLVNVYAIHRDPAIWADPAAFRPERFEDGRADGLFVMPFGMGRRKCPGEALALRTLGLVLGTLIQCFDWDTVGGAEVDMAEGGGITLPRAVPLEAICKPRHAMLGVLKGL

SEQ ID NO: 19365 - DNA, 1108 bp, Zea mays subsp. mays
  misc_feature (1)..(1108): Ceres Seq. ID no. 13577820
  misc_feature (1)..(1108): Ortholog of  Ceres SEQ ID NO 14303245 as cited in SEQ ID NO 0
attaatcccccacgttccccttccctttctctcccgccgccgcacgcccctctcaaacctccgcgctcccgcccagctagggtttccccgatctcccctccttctcaaccgccgccgtcgccgagagcgccgccacgatgttggagctgcggcttgtgcaggggagctcggggaaaccctagctgggcgggcgctgaaggcgttgcgggggctggtgaagctgcaggcgctggtccggggcaacatcgtgcggcggcggcggcggaaaccaccaccaccagcaccaccagtcgccgtgctcgacgacgatgggctccgagcagaacagccggagctacgcgaccatgccggagtcgccgtccaaggactcgacgaccgcgcagcagtcggtgccgagcccgccgtcggtgggcatggccgaggaggaggccctgagcccgctgcgcgtgcccgtgcccgcggacgtggccgagctctgcgacagcccccagttcttctcggccacgtcgtcgcggcccgggagctcgaggcggggcccgttcacgccgacggncaagagcgagtgctcgcgcagcctcttcggcggctactcccgactacccgaaactacatggccaacacggagtcgttccgcgccaaggcgcggtcgcagagcgcgccgaagcagaggccgcagtacgagcggtccagctccctacgcagggcgtcggcggcgcagaggtcggcggcggcggcggcctcctccctgcacgccaagttcaccaacaaggcgtacccgggctctggcaggctggatcggcttggcttgccggccaggtactgatactgagcctgcctaattcgcgtcaggatgatgtgctgccgctgtgtctcgagcgaggaggacgacgacgaagaagtgcaatcgactagtggtagttaggttcccccgtgccttggttgtgctattaccatcaacagttttttctgtttcttgctttgtgtagctagccatgtctaaagttgctggtagctgtaatgatgctataatgcgtgcttaactgctgacgaacctttttcctctacatttccgtggtatatatatatgtgccgtcaaatcatgcctggg

SEQ ID NO: 19366 - protein, 273 aa, Zea mays subsp. mays
  peptide (1)..(273): Ceres Seq. ID no. 13577821
  misc_feature (184)..(184): Xaa is any aa, unknown or other
LIPHVPLPFLSRRRTPLSNLRAPAQLGFPRSPLLLNRRRRRERRHDVGAAACAGELGETLAGRALKALRGLVKLQALVRGNIVRRRRRKPPPPAPPVAVLDDDGLRAEQPELRDHAGVAVQGLDDRAAVGAEPAVGGHGRGGGPEPAARARARGRGRALRQPPVLLGHVVAARELEAGPVHADXQERVLAQPLRRLLPTTRNYMANTESFRAKARSQSAPKQRPQYERSSSLRRASAAQRSAAAAASSLHAKFTNKAYPGSGRLDRLGLPARY

SEQ ID NO: 19367 - protein, 176 aa, Zea mays subsp. mays
  peptide (1)..(176): Ceres Seq. ID no. 13577822
  misc_feature (82)..(82): Xaa is any aa, unknown or other
MGSEQNSRSYATMPESPSKDSTTAQQSVPSPPSVGMAEEEALSPLRVPVPADVAELCDSPQFFSATSSRPGSSRRGPFTPTXKSECSRSLFGGYSRLPETTWPTRSRSAPRRGRRARRSRGRSTSGPAPYAGRRRRRGRRRRRPPPCTPSSPTRRTRALAGWIGLACRPGTDTEPA

SEQ ID NO: 19368 - protein, 164 aa, Zea mays subsp. mays
  peptide (1)..(164): Ceres Seq. ID no. 13577823
  misc_feature (70)..(70): Xaa is any aa, unknown or other
MPESPSKDSTTAQQSVPSPPSVGMAEEEALSPLRVPVPADVAELCDSPQFFSATSSRPGSSRRGPFTPTXKSECSRSLFGGYSRLPETTWPTRSRSAPRRGRRARRSRGRSTSGPAPYAGRRRRRGRRRRRPPPCTPSSPTRRTRALAGWIGLACRPGTDTEPA

SEQ ID NO: 19369 - DNA, 985 bp, Zea mays subsp. mays; identical to SEQ ID NO: 4228
  misc_feature (1)..(985): Ceres Seq. ID no. 13495278
  misc_feature (1)..(985): Ortholog of  Ceres SEQ ID NO 14307896 as cited in SEQ ID NO 66915

SEQ ID NO: 19370 - protein, 327 aa, Zea mays subsp. mays; identical to SEQ ID NO: 4229
  peptide (1)..(327): Ceres Seq. ID no. 13495279

SEQ ID NO: 19371 - protein, 284 aa, Zea mays subsp. mays; identical to SEQ ID NO: 4230
  peptide (1)..(284): Ceres Seq. ID no. 13495280

SEQ ID NO: 19372 - protein, 233 aa, Zea mays subsp. mays; identical to SEQ ID NO: 4231
  peptide (1)..(233): Ceres Seq. ID no. 13495281

SEQ ID NO: 19373 - DNA, 2629 bp, Zea mays subsp. mays
  misc_feature (1)..(2629): Ceres Seq. ID no. 12375783
  misc_feature (1)..(2629): Ortholog of  Ceres SEQ ID NO 13654989 as cited in SEQ ID NO 63117
  misc_feature (1)..(2629): Ortholog of  Ceres SEQ ID NO 13657138 as cited in SEQ ID NO 65923
  misc_feature (1)..(2629): Ortholog of  Ceres SEQ ID NO 13584744 as cited in SEQ ID NO 69137
gcacgagaccattacctagaacatcctaatcgaaaaacagtgcagtgcattcaatctcaaataaaaagccctgctacagtgctagcagtactcggatccacgaccttctccctccctccgctgctgctccgtcaaggaagggaggaaagaaagggcaggggaatggaggtggaggaagacggccgagccgcccgagtgctgctgagctcccagtgtctctgtctctgatgagatgactggacttatttgatgctcttgccgttctcgacttggggcgcgagccgatggatctcctccggatgaaacttctcctgccctccttcatcagctgccttcttctgatgcaggcagcactatgtgatggcgccgccgccaccaccaccaccaccggcgaaaacggaacggcaaactggacatgtgtgtgcgcagctcatcctctcggtgaaccagactccaacagcagcttgctgtccaattgctcttcctcctgccattgccaccgagatgagaacggcggcggcggcggcggcggcgcaggctcgtggaactgcacgtgtgcctctggtgatgagggccttcagaaggaagagcatgctgagctacgtgacgggagctgtttcacttcctgcaactgcacgtcgggtactggaacttcagaggaagggagaaagcgtgtctcaagcaaaacagtcatagctacgctcctggtctgcgtggttctcaccaccaccgctttcctcgtcaccaccgtatactacttccgccgcaaggacgccctctctccgcgatcgcagatatactccttcgatagatacactactagctggagcagcaggtcgaacctcgtcagcagtcgatcgtctccgcttccccagatgaaacccaaaccaaagcttggtggtctgaaagagtttctgtgcagctgcaatcttgtcatctgtgggggagagagcggcgcattccccggtgtcgtcgcccggttctcgtacgcagagctggagcaagcgaccgggagattctcggacgaccaccttatcggagtcggtgggtcaagcaaggtgtaccgcggccagctcggcgatggcagagtcgttgccgtgaagaagcttaggccgctaggaggcacggacgaagacttggagttcctgtcagagatcgagctgctgtcgaggctgaaccactgccacgtggtgccgttgctggggtactgctcggagagccagggccggcagctggagcggctgctggtgttcgagtgcatggccaacggcaacctgagggactgcctagacctgaagcgagggaggaagcccatggactggcagacgcgggtgagcgtcgcgctcggcgccgcgagggggctggagtacctgcacgaggcggcggcgccgcgcatcctccaccgcgacatcaagtccaccaacatcctcctggacgacaagttcagagccaagatcactgacctcggcatggccaagtgcctgatgaacgacggcgtgaccagctgctcgagctccccggcgcggatgctgggcacgttcggctacttcgcaccggagtacgccatcgtgggcaaggcgtcgctcaagtccgacgtcttcagcttcggcgtcgttgtgctggagctcatcaccggccggcagcccatccacaagtcgtcgtcgacgagggccgacgagagcctcgtactctgggcgacgtcgcggctgcgggacagcgggctggtggtcacggagctgccggacccgacgctgcagggcaagttcccggcggaggagatgcagatcatggcgcacctggcgcgggagtgcctgcagtgggaccccgaggccaggcccaccatgacggaggtcgtgcacatcctcgccaccatcgcaccactccagcacggcgccaagcgtcggaaccttcccatcgccaccgccttcaacctcacgccatcgccgcacgtcgggcggtgtgacccggagcctaaagacgacgacatcgagaggcagatgcagcagcaggagtgctcgccgacgacggctgtccagtggcaacaacaacaagcgcgctgcacccacgcgccaacgggccgcgcgtcgtggcccggcgacagggggaacgttgtgagcagaggcgcggcggtgtcgggcgagctggtgaacgggacggtgctgatgaacccccacgggcggggcagctggcggcggccgccgccgcttggcgacgaggaggcagtggacgtggatctgacggagccccggatggaggcgttcacgcagccggcggcgtttcagcctttcaggtgacggaaggattaggatcaggtggtggtggttctgattggtgcggcggcggcgggtgctgctgtacatcttcttgttcgtgcctccacgatccacaccaggatcatctgcttctgcatctgcgttcatgaatgtacagtacaggcaaatacatctagattggcaacgggaaaagaaaagaaaggcatcgagatcgttatgggatataggacctagattgaacacgagatcaatgcatgaatctgaatccacggcgcgcgtcattggacacatcactgttgtacacaagcaaacagacaatgagtgttcacagaagcaaaaaatataagaccgagttc

SEQ ID NO: 19374 - protein, 669 aa, Zea mays subsp. mays
  peptide (1)..(669): Ceres Seq. ID no. 12375784
MDLLRMKLLLPSFISCLLLMQAALCDGAAATTTTTGENGTANWTCVCAAHPLGEPDSNSSLLSNCSSSCHCHRDENGGGGGGGAGSWNCTCASGDEGLQKEEHAELRDGSCFTSCNCTSGTGTSEEGRKRVSSKTVIATLLVCVVLTTTAFLVTTVYYFRRKDALSPRSQIYSFDRYTTSWSSRSNLVSSRSSPLPQMKPKPKLGGLKEFLCSCNLVICGGESGAFPGVVARFSYAELEQATGRFSDDHLIGVGGSSKVYRGQLGDGRVVAVKKLRPLGGTDEDLEFLSEIELLSRLNHCHVVPLLGYCSESQGRQLERLLVFECMANGNLRDCLDLKRGRKPMDWQTRVSVALGAARGLEYLHEAAAPRILHRDIKSTNILLDDKFRAKITDLGMAKCLMNDGVTSCSSSPARMLGTFGYFAPEYAIVGKASLKSDVFSFGVVVLELITGRQPIHKSSSTRADESLVLWATSRLRDSGLVVTELPDPTLQGKFPAEEMQIMAHLARECLQWDPEARPTMTEVVHILATIAPLQHGAKRRNLPIATAFNLTPSPHVGRCDPEPKDDDIERQMQQQECSPTTAVQWQQQQARCTHAPTGRASWPGDRGNVVSRGAAVSGELVNGTVLMNPHGRGSWRRPPPLGDEEAVDVDLTEPRMEAFTQPAAFQPFR

SEQ ID NO: 19375 - protein, 664 aa, Zea mays subsp. mays
  peptide (1)..(664): Ceres Seq. ID no. 12375785
MKLLLPSFISCLLLMQAALCDGAAATTTTTGENGTANWTCVCAAHPLGEPDSNSSLLSNCSSSCHCHRDENGGGGGGGAGSWNCTCASGDEGLQKEEHAELRDGSCFTSCNCTSGTGTSEEGRKRVSSKTVIATLLVCVVLTTTAFLVTTVYYFRRKDALSPRSQIYSFDRYTTSWSSRSNLVSSRSSPLPQMKPKPKLGGLKEFLCSCNLVICGGESGAFPGVVARFSYAELEQATGRFSDDHLIGVGGSSKVYRGQLGDGRVVAVKKLRPLGGTDEDLEFLSEIELLSRLNHCHVVPLLGYCSESQGRQLERLLVFECMANGNLRDCLDLKRGRKPMDWQTRVSVALGAARGLEYLHEAAAPRILHRDIKSTNILLDDKFRAKITDLGMAKCLMNDGVTSCSSSPARMLGTFGYFAPEYAIVGKASLKSDVFSFGVVVLELITGRQPIHKSSSTRADESLVLWATSRLRDSGLVVTELPDPTLQGKFPAEEMQIMAHLARECLQWDPEARPTMTEVVHILATIAPLQHGAKRRNLPIATAFNLTPSPHVGRCDPEPKDDDIERQMQQQECSPTTAVQWQQQQARCTHAPTGRASWPGDRGNVVSRGAAVSGELVNGTVLMNPHGRGSWRRPPPLGDEEAVDVDLTEPRMEAFTQPAAFQPFR

SEQ ID NO: 19376 - protein, 650 aa, Zea mays subsp. mays
  peptide (1)..(650): Ceres Seq. ID no. 12375786
MQAALCDGAAATTTTTGENGTANWTCVCAAHPLGEPDSNSSLLSNCSSSCHCHRDENGGGGGGGAGSWNCTCASGDEGLQKEEHAELRDGSCFTSCNCTSGTGTSEEGRKRVSSKTVIATLLVCVVLTTTAFLVTTVYYFRRKDALSPRSQIYSFDRYTTSWSSRSNLVSSRSSPLPQMKPKPKLGGLKEFLCSCNLVICGGESGAFPGVVARFSYAELEQATGRFSDDHLIGVGGSSKVYRGQLGDGRVVAVKKLRPLGGTDEDLEFLSEIELLSRLNHCHVVPLLGYCSESQGRQLERLLVFECMANGNLRDCLDLKRGRKPMDWQTRVSVALGAARGLEYLHEAAAPRILHRDIKSTNILLDDKFRAKITDLGMAKCLMNDGVTSCSSSPARMLGTFGYFAPEYAIVGKASLKSDVFSFGVVVLELITGRQPIHKSSSTRADESLVLWATSRLRDSGLVVTELPDPTLQGKFPAEEMQIMAHLARECLQWDPEARPTMTEVVHILATIAPLQHGAKRRNLPIATAFNLTPSPHVGRCDPEPKDDDIERQMQQQECSPTTAVQWQQQQARCTHAPTGRASWPGDRGNVVSRGAAVSGELVNGTVLMNPHGRGSWRRPPPLGDEEAVDVDLTEPRMEAFTQPAAFQPFR

SEQ ID NO: 19377 - DNA, 799 bp, Zea mays subsp. mays
  misc_feature (1)..(799): Ceres Seq. ID no. 12364546
  misc_feature (1)..(799): Ortholog of  Ceres SEQ ID NO 13600595 as cited in SEQ ID NO 629
  misc_feature (1)..(799): Ortholog of  Ceres SEQ ID NO 13593379 as cited in SEQ ID NO 20573
gcacgagaccattacctagaacatcctaatcgaaaaagtttccactgtgctccttctcgccgactccgccatgaccgcctcgccctacccgacgacgccgtggctgcggccaccgcctcctatggcatttctgagtctcctcctcctccttggctgcctctccccgtcgatctcactggcgggtgcggaggcggcgggggttctgagacaagtggttggtggggacgacggcgggacattcttcgagccgttcaacgtgacctacgaccaccgcgcgcttatccttggcgggaagcgcaggatgctcgtctctgcggggctccactacccgcgtgccacgcccgagatgtggccgagtttgattgcaaagtgcaaggagggcggcgtggatgtaattgagacatatgtgttttggaatgggcatgagccggccaaaggccagtggtttcccagtttggttgcgcgatgtccctggggatagaattccgcactgacaatgaaccctacaaggctgaaatgcagatttttgtgacaaaaattgtagatatcatgaaagaggagaagctttattcttggcaaggtggtcccattatactgcagcagattgaaaatgaatacggtaacattcaaggccattatggtcaagcagggaaatagagaatggagaagatggtagtgctgctgctgactgttgtagatattgagacaggcacaatagagaatagagtgacacttggtatggccataaatcgctactttttccactagagcgaatagcattctccgtgtacatctgttg

SEQ ID NO: 19378 - protein, 136 aa, Zea mays subsp. mays
  peptide (1)..(136): Ceres Seq. ID no. 12364547
MTASPYPTTPWLRPPPPMAFLSLLLLLGCLSPSISLAGAEAAGVLRQVVGGDDGGTFFEPFNVTYDHRALILGGKRRMLVSAGLHYPRATPEMWPSLIAKCKEGGVDVIETYVFWNGHEPAKGQWFPSLVARCPWG

SEQ ID NO: 19379 - protein, 132 aa, Zea mays subsp. mays
  peptide (1)..(132): Ceres Seq. ID no. 12364548
ARDHYLEHPNRKSFHCAPSRRLRHDRLALPDDAVAAATASYGISESPPPPWLPLPVDLTGGCGGGGGSETSGWWGRRRDILRAVQRDLRPPRAYPWREAQDARLCGAPLPACHARDVAEFDCKVQGGRRGCN

SEQ ID NO: 19380 - protein, 119 aa, Zea mays subsp. mays
  peptide (1)..(119): Ceres Seq. ID no. 12364549
MAFLSLLLLLGCLSPSISLAGAEAAGVLRQVVGGDDGGTFFEPFNVTYDHRALILGGKRRMLVSAGLHYPRATPEMWPSLIAKCKEGGVDVIETYVFWNGHEPAKGQWFPSLVARCPWG

SEQ ID NO: 19381 - DNA, 1435 bp, Zea mays subsp. mays
  misc_feature (1)..(1435): Ceres Seq. ID no. 12436094
  misc_feature (1)..(1435): Ortholog of  Ceres SEQ ID NO 14313583 as cited in SEQ ID NO 55431
  misc_feature (1)..(1435): Ortholog of  Ceres SEQ ID NO 14302844 as cited in SEQ ID NO 65379
  misc_feature (1)..(1435): Ortholog of  Ceres SEQ ID NO 15226354 as cited in SEQ ID NO 0
aacattgcaccgcatcgtctaagctcgcctgccctttacagcagcttactactacaaagacgacaacacagcgcgcgcgcgccaagctgagctcagctcgtcacgacacgccagcatggtggtgccttccacgacgccggtggtgcgccaagaaacgccaccgccgtcccacgacggcataggcataccgacggtggacctgtcggcgccgggcggccgcggcgcgctgtcgcggcaggtggcgcgcgcgtgcgcgcagcacggcttcttccgggccgtgaaccacggcgtggcgccaggccccgccgcacggctggacgccgccgccaggacgttcttcgcgctggcgccgcacaacaagcagcgcgccggcccgcccagcccactcggatacggctgccgcagcatcggcttcaacggcgacgccggggagctcgagtacctgctgctccacgccaacccggccgccgtcgcgcacagggccagatccatcgacactgatgacccctcgcgcttcagcaatgtggtgaacgagtatgtgggagcgatgaggcagctcgcatgtgagatcctggacctgctcggagaggggctagggctcaaggaccccagatccttcagcaggctcatcgctgacacagacagcgactcactcctgcggataaaccactaccctccaccatgcgccattcacaagcttgaccacgacagtcagtgcaggatgaagaacagtttcaggatcgtggcaggcaatggcgcgaaccagtcggcaggtgcacggatcggattcggggagcactcagacccgcagatccttagcttgctccgatcaaacgatgttgacggccttcaggtgcttctgaacagcgacggcagagaggtgtgggttcaggtgccagccgatccatcagcgttctttgtcaatgttggtgatctcctccaggccttcacaaatgggaaggtgataagcgtccggcacagggtaattgcaagctcgagcagggcgaggctgtcaacgatctacttcgctgcgccgccactgcatgcacgaattttggccctcccagagacagtcacagccaactcacccaggcagtaccggcccttcacctgggccgagtacaagaagacaatgtactccctccgcctcagccacagccgcctcaacctcttccacatcggccatgatgaccacggcaaaggagaacaagaatagggagaaagtggctgaactgcaggcagagagtttatgttggaggcttaggtaggtagaattgtccccaaaattttggctctctggcctccacagccagataatgtctagcagtatgctggttctgccaagtgccaatgggtaatagtatttagcattgtacacaagtccttgttgtatggaactgatgtactattgcctgttttagcagtttgttgtctc

SEQ ID NO: 19382 - protein, 366 aa, Zea mays subsp. mays
  peptide (1)..(366): Ceres Seq. ID no. 12436095
MVVPSTTPVVRQETPPPSHDGIGIPTVDLSAPGGRGALSRQVARACAQHGFFRAVNHGVAPGPAARLDAAARTFFALAPHNKQRAGPPSPLGYGCRSIGFNGDAGELEYLLLHANPAAVAHRARSIDTDDPSRFSNVVNEYVGAMRQLACEILDLLGEGLGLKDPRSFSRLIADTDSDSLLRINHYPPPCAIHKLDHDSQCRMKNSFRIVAGNGANQSAGARIGFGEHSDPQILSLLRSNDVDGLQVLLNSDGREVWVQVPADPSAFFVNVGDLLQAFTNGKVISVRHRVIASSSRARLSTIYFAAPPLHARILALPETVTANSPRQYRPFTWAEYKKTMYSLRLSHSRLNLFHIGHDDHGKGEQE

SEQ ID NO: 19383 - protein, 222 aa, Zea mays subsp. mays
  peptide (1)..(222): Ceres Seq. ID no. 12436096
MRQLACEILDLLGEGLGLKDPRSFSRLIADTDSDSLLRINHYPPPCAIHKLDHDSQCRMKNSFRIVAGNGANQSAGARIGFGEHSDPQILSLLRSNDVDGLQVLLNSDGREVWVQVPADPSAFFVNVGDLLQAFTNGKVISVRHRVIASSSRARLSTIYFAAPPLHARILALPETVTANSPRQYRPFTWAEYKKTMYSLRLSHSRLNLFHIGHDDHGKGEQE

SEQ ID NO: 19384 - DNA, 1300 bp, Zea mays subsp. mays
  misc_feature (1)..(1300): Ceres Seq. ID no. 12418940
  misc_feature (1)..(1300): Ortholog of  Ceres SEQ ID NO 15176317 as cited in SEQ ID NO 52865
  misc_feature (1)..(1300): Ortholog of  Ceres SEQ ID NO 13518893 as cited in SEQ ID NO 58108
  misc_feature (1)..(1300): Ortholog of  Ceres SEQ ID NO 12617152 as cited in SEQ ID NO 63555
acggcacggccacagctgactgactcctcctgcgttggctgataatcatggctagagctccgctgctcctcgcgctactgtgcgcgtgcgccgccaatgcggcggggaggaagatggtcggcgtgtacgagctcaaggcgggcgatttctccgtcggcgtcaccaactggggcgccaccatcacctccgttgtgctgccggactccaaaggggatttgtctgacgtcgtgcttggctacgacaccattggaggatacgtgagtggtaaaagctacttcggagcgcttgtcggacgagtggccaacaggatcgccaacgcgcgcttcgtgctcgacggaaaggcttaccatcttttcaagaacgatggcaacaacacgcttcatggtggccatagggggttcagtcaggttgtatggacggttaaagagttcgtcggtggcggtgactcgccctacatcacgttgtactaccacagcttcgatggagaacaaggtttcccaggcgacctggacgtgtacgtgacgtaccagctggcggccccctacgtgctgcgggtgcacatgaacgcgacggccgtgaacaaggcgaccccggtgaacctggcgcagcacacgtactggaacctgggcgggcagggcagcggcgacgtcctccgcaacacggtgcagctgttcgcgtcccggtacacgcccgtgggcggcggcctcatcccgacgggcgcggtggcgcccgtggccggcacgccctacgacttcctcgcgccggccgcggtgggctcgcgcatccgccaggtctccggcggcaaggccggcgtctacggctacgacaccaactacgccgtggacggggagcccggcgcgctgcggaaggtggccgtcgtccgggacggcgcgtccggccgggcgctggagctgtgggccaaccagcctggggtgcagttctacacgggcaacttcctccaggacgtcaaggggaagggcggcaaggtgtaccagcagtacggcgcgctgtgcctcgagacgcaggggttcccggacgccgtcaaccaccctaatttcccctcccagatcgtcaggccggggcaggtgtacaagcacgacatggtgttcaagttctccttctagctgatctgtataggcaacaccctggtccctggctaatcaatctactagtacctgttatgattgccactggcaaagtggcaactgggccttattgggactggagagacacgttacatgattccaagtcaatttgttttgcggaccgtaattaatgtttatcgcaaagattatgtatt

SEQ ID NO: 19385 - protein, 358 aa, Zea mays subsp. mays
  peptide (1)..(358): Ceres Seq. ID no. 12418941
MARAPLLLALLCACAANAAGRKMVGVYELKAGDFSVGVTNWGATITSVVLPDSKGDLSDVVLGYDTIGGYVSGKSYFGALVGRVANRIANARFVLDGKAYHLFKNDGNNTLHGGHRGFSQVVWTVKEFVGGGDSPYITLYYHSFDGEQGFPGDLDVYVTYQLAAPYVLRVHMNATAVNKATPVNLAQHTYWNLGGQGSGDVLRNTVQLFASRYTPVGGGLIPTGAVAPVAGTPYDFLAPAAVGSRIRQVSGGKAGVYGYDTNYAVDGEPGALRKVAVVRDGASGRALELWANQPGVQFYTGNFLQDVKGKGGKVYQQYGALCLETQGFPDAVNHPNFPSQIVRPGQVYKHDMVFKFSF

SEQ ID NO: 19386 - protein, 336 aa, Zea mays subsp. mays
  peptide (1)..(336): Ceres Seq. ID no. 12418942
MVGVYELKAGDFSVGVTNWGATITSVVLPDSKGDLSDVVLGYDTIGGYVSGKSYFGALVGRVANRIANARFVLDGKAYHLFKNDGNNTLHGGHRGFSQVVWTVKEFVGGGDSPYITLYYHSFDGEQGFPGDLDVYVTYQLAAPYVLRVHMNATAVNKATPVNLAQHTYWNLGGQGSGDVLRNTVQLFASRYTPVGGGLIPTGAVAPVAGTPYDFLAPAAVGSRIRQVSGGKAGVYGYDTNYAVDGEPGALRKVAVVRDGASGRALELWANQPGVQFYTGNFLQDVKGKGGKVYQQYGALCLETQGFPDAVNHPNFPSQIVRPGQVYKHDMVFKFSF

SEQ ID NO: 19387 - protein, 187 aa, Zea mays subsp. mays
  peptide (1)..(187): Ceres Seq. ID no. 12418943
MNATAVNKATPVNLAQHTYWNLGGQGSGDVLRNTVQLFASRYTPVGGGLIPTGAVAPVAGTPYDFLAPAAVGSRIRQVSGGKAGVYGYDTNYAVDGEPGALRKVAVVRDGASGRALELWANQPGVQFYTGNFLQDVKGKGGKVYQQYGALCLETQGFPDAVNHPNFPSQIVRPGQVYKHDMVFKFSF

SEQ ID NO: 19388 - DNA, 2127 bp, Zea mays subsp. mays
  misc_feature (1)..(2127): Ceres Seq. ID no. 12436087
  misc_feature (1)..(2127): Ortholog of  Ceres SEQ ID NO 14311203 as cited in SEQ ID NO 53639
  misc_feature (1)..(2127): Ortholog of  Ceres SEQ ID NO 15176053 as cited in SEQ ID NO 57792
  misc_feature (1)..(2127): Ortholog of  Ceres SEQ ID NO 14311175 as cited in SEQ ID NO 60223
  misc_feature (1)..(2127): Ortholog of  Ceres SEQ ID NO 15224727 as cited in SEQ ID NO 64990
  misc_feature (1)..(2127): Ortholog of  Ceres SEQ ID NO 14308023 as cited in SEQ ID NO 65865
  misc_feature (1)..(2127): Ortholog of  Ceres SEQ ID NO 14307972 as cited in SEQ ID NO 66436
  misc_feature (1)..(2127): Ortholog of  Ceres SEQ ID NO 15170175 as cited in SEQ ID NO 67138
  misc_feature (1)..(2127): Ortholog of  Ceres SEQ ID NO 12614670 as cited in SEQ ID NO 68565
accacgtctcccctcacctggctctccccctgccacctcacgcgcgcccctgctctgtctcttttggctccgctgaggccgagcacacacaacaaattctctctctcctctctcactctctctctctctcacacacactctgctccctgtgcggaggacgggccggccgcatggggtgggggtggacggcgctggcggcggccgcgatggcgtacgtggcggtgaagctgatggaggtgctgtggtggcggccgcggcggctggagcagcacttcgcgcggcaggggatcaggggcccccgctaccgcttcttcgtcggctgcgtccgcgagatggtggcgctcatggtggccgcctccgccaagccaatgccgcgtccctaccgctcccacaacgtcctcccgcgcgtcctcgccttctaccaccactggaagaaaatctacggttccacgttcctgatatggttcggcccgacgccgaggctcgccgtcgccgacccggacctcatccgggagatcctcctgtcccgcgccgaccaattcgaccgctacgagtcgcacccgatggtgcgccagctcgagggcgaggggctcgtcagcctgcgcggcgacaagtgggcgcaccgccgcaaggtgctcacgccggcgttccacatggagaacctcaagctgctgctgccgttcgtcgggaggacggtggtcgacgtggtggacaagtggcacgacatggccgccgcggcgtccggcgaggtcgagatcgacgtgtccgagtggttccaggtggtgacggaggacgccatcacccgtacggcgttcggccggagctacgaggacggcaaggccgttttcaagctccagacccagctcatggccttcgcctccgaggcgtttcgcaaggtcttcatccctggatacaggttcctgccgaccaagaagaacacgacctcgtggaagctggacaaggagatcaggaagaacctggcgacgctgatcggccggcggcaggaagccgcggacgacgagaagctcagcggctgtgccaaggacctccncggcctcctgatcaacgcgggcagcaacggcggcaaggtgagccccatcaccgngaacgacatagtggaggagtgcaagacgttcttcttcgcgggcaagcagaccacgtcgaacctcctgacatggaccacagtcctgctcgccatgcaccccgagtggcaggagctcgcccgtcaggaggtgctccaagtctgcggggcgcgtgacatcccttcccgcgagcagctcaccaagctcaagacactcgggatgatcctgaacgagacgctgcggctgtacccgccggcggtggcgacggtgcgtcgcgccaaggcggacgtggagctgggcgggtgcctgatcccgcgcggcacggagctgctgatcccgatcatggccatgcaccacgacgcgcggctgtgggggccggacgccacgcagttcaacccggcgcggttcgccaggggcgcggcgcangcggccaggcaccccacggcgttcatcccgttcgggctgggcgcgcggatgtgcatcggccagaacctggcgctcctggagtccaagctcacgctggccatcgtcctccagcggttcgacttccggctgtcgcccagctacctccacgcgccgacggtgctgatgctcctccacccgcagtacggggcgcccgtggtcttccggccgcgaccgtctgagccgtccgattccgattgcgacagtagggatgtgtgaggagatgacggagctcgtactaaccttgtcagtgtcaattgcgcctggcatgatgaccaataaccacctccgcagcatgctgctttgccctcaagggcaaacgagcagagcagccgccgccacgccgccaccgccaccgcccagcaccaccggaggaacaagtgactagaaggagcaccaccgtaccgtactaagtactaacaaatatatcctgctgaaggtgccagcagcagcttagactagtagagcagagtagaaggcttgaccagtgcctcccaatttttcagtcatttgggttgatgatttccttccttccatgaggttttgccaggtgtggttggtgtatgaaggattgcaaaattgt

SEQ ID NO: 19389 - protein, 586 aa, Zea mays subsp. mays
  peptide (1)..(586): Ceres Seq. ID no. 12436088
  misc_feature (350)..(350): Xaa is any aa, unknown or other
  misc_feature (368)..(368): Xaa is any aa, unknown or other
  misc_feature (502)..(502): Xaa is any aa, unknown or other
HVSPHLALPLPPHARPCSVSFGSAEAEHTQQILSLLSHSLSLSHTLCSLCGGRAGRMGWGWTALAAAAMAYVAVKLMEVLWWRPRRLEQHFARQGIRGPRYRFFVGCVREMVALMVAASAKPMPRPYRSHNVLPRVLAFYHHWKKIYGSTFLIWFGPTPRLAVADPDLIREILLSRADQFDRYESHPMVRQLEGEGLVSLRGDKWAHRRKVLTPAFHMENLKLLLPFVGRTVVDVVDKWHDMAAAASGEVEIDVSEWFQVVTEDAITRTAFGRSYEDGKAVFKLQTQLMAFASEAFRKVFIPGYRFLPTKKNTTSWKLDKEIRKNLATLIGRRQEAADDEKLSGCAKDLXGLLINAGSNGGKVSPITXNDIVEECKTFFFAGKQTTSNLLTWTTVLLAMHPEWQELARQEVLQVCGARDIPSREQLTKLKTLGMILNETLRLYPPAVATVRRAKADVELGGCLIPRGTELLIPIMAMHHDARLWGPDATQFNPARFARGAAXAARHPTAFIPFGLGARMCIGQNLALLESKLTLAIVLQRFDFRLSPSYLHAPTVLMLLHPQYGAPVVFRPRPSEPSDSDCDSRDV

SEQ ID NO: 19390 - protein, 530 aa, Zea mays subsp. mays
  peptide (1)..(530): Ceres Seq. ID no. 12436089
  misc_feature (294)..(294): Xaa is any aa, unknown or other
  misc_feature (312)..(312): Xaa is any aa, unknown or other
  misc_feature (446)..(446): Xaa is any aa, unknown or other
MGWGWTALAAAAMAYVAVKLMEVLWWRPRRLEQHFARQGIRGPRYRFFVGCVREMVALMVAASAKPMPRPYRSHNVLPRVLAFYHHWKKIYGSTFLIWFGPTPRLAVADPDLIREILLSRADQFDRYESHPMVRQLEGEGLVSLRGDKWAHRRKVLTPAFHMENLKLLLPFVGRTVVDVVDKWHDMAAAASGEVEIDVSEWFQVVTEDAITRTAFGRSYEDGKAVFKLQTQLMAFASEAFRKVFIPGYRFLPTKKNTTSWKLDKEIRKNLATLIGRRQEAADDEKLSGCAKDLXGLLINAGSNGGKVSPITXNDIVEECKTFFFAGKQTTSNLLTWTTVLLAMHPEWQELARQEVLQVCGARDIPSREQLTKLKTLGMILNETLRLYPPAVATVRRAKADVELGGCLIPRGTELLIPIMAMHHDARLWGPDATQFNPARFARGAAXAARHPTAFIPFGLGARMCIGQNLALLESKLTLAIVLQRFDFRLSPSYLHAPTVLMLLHPQYGAPVVFRPRPSEPSDSDCDSRDV

SEQ ID NO: 19391 - protein, 518 aa, Zea mays subsp. mays
  peptide (1)..(518): Ceres Seq. ID no. 12436090
  misc_feature (282)..(282): Xaa is any aa, unknown or other
  misc_feature (300)..(300): Xaa is any aa, unknown or other
  misc_feature (434)..(434): Xaa is any aa, unknown or other
MAYVAVKLMEVLWWRPRRLEQHFARQGIRGPRYRFFVGCVREMVALMVAASAKPMPRPYRSHNVLPRVLAFYHHWKKIYGSTFLIWFGPTPRLAVADPDLIREILLSRADQFDRYESHPMVRQLEGEGLVSLRGDKWAHRRKVLTPAFHMENLKLLLPFVGRTVVDVVDKWHDMAAAASGEVEIDVSEWFQVVTEDAITRTAFGRSYEDGKAVFKLQTQLMAFASEAFRKVFIPGYRFLPTKKNTTSWKLDKEIRKNLATLIGRRQEAADDEKLSGCAKDLXGLLINAGSNGGKVSPITXNDIVEECKTFFFAGKQTTSNLLTWTTVLLAMHPEWQELARQEVLQVCGARDIPSREQLTKLKTLGMILNETLRLYPPAVATVRRAKADVELGGCLIPRGTELLIPIMAMHHDARLWGPDATQFNPARFARGAAXAARHPTAFIPFGLGARMCIGQNLALLESKLTLAIVLQRFDFRLSPSYLHAPTVLMLLHPQYGAPVVFRPRPSEPSDSDCDSRDV

SEQ ID NO: 19392 - DNA, 448 bp, Zea mays subsp. mays
  misc_feature (1)..(448): Ceres Seq. ID no. 4616522
  misc_feature (1)..(448): Ortholog of  Ceres SEQ ID NO 13594970 as cited in SEQ ID NO 56328
  misc_feature (1)..(448): Ortholog of  Ceres SEQ ID NO 12585079 as cited in SEQ ID NO 63137
gcgtccattccacctgcttggtccatcagcagcgagcgaacagggaaaaaggagaggccgagaagcgctttagcgataagactggtgcacccgtagcggcacggcatggcggccacggcgtactccgtggcgctcctcggcggcgcacgcctgccggccgccctcctccctcggcgcagcagcgtgtgccaccagcagcttcgcctccaagacgcgccgaggctctccctgcaccgtgccagggccgcttccgaggacacgtcggcctccggcggcgacgagctcatcgaagacctcaaggcaaagtgggacgccgttgaggacaagcccaccgtcctcctgtacggcggcggcgccgtcgtggcgctatggttgacgtccgttgttgtcggcgccatcaacgccgtgccgctgctccccaagatcctggagctcgtcggcctcgtct

SEQ ID NO: 19393 - protein, 114 aa, Zea mays subsp. mays
  peptide (1)..(114): Ceres Seq. ID no. 4616523
MAATAYSVALLGGARLPAALLPRRSSVCHQQLRLQDAPRLSLHRARAASEDTSASGGDELIEDLKAKWDAVEDKPTVLLYGGGAVVALWLTSVVVGAINAVPLLPKILELVGLV

SEQ ID NO: 19394 - protein, 105 aa, Zea mays subsp. mays
  peptide (1)..(105): Ceres Seq. ID no. 4616524
VHSTCLVHQQRANREKGEAEKRFSDKTGAPVAARHGGHGVLRGAPRRRTPAGRPPPSAQQRVPPAASPPRRAEALPAPCQGRFRGHVGLRRRRAHRRPQGKVGRR

SEQ ID NO: 19395 - DNA, 1649 bp, Zea mays subsp. mays
  misc_feature (1)..(1649): Ceres Seq. ID no. 12364563
  misc_feature (1)..(1649): Ortholog of  Ceres SEQ ID NO 14307233 as cited in SEQ ID NO 54395
  misc_feature (1)..(1649): Ortholog of  Ceres SEQ ID NO 14306986 as cited in SEQ ID NO 54853
gcacgagaccattacctagaacatcctaatcaaaaagacttgagttcaccggtactatttatgtaccgtacataaagtaaagtttaacgaaaagaaaagcacgggagacgggacgggaccgctgggcgcgccgggccgcgccgagccgagcgagtcgtccactctccactccgcccgccacgcccacgccccgtcctcgcttccgtctcccacaatccaaggacaccgagcagcaggcggcggaagcaacccgctgtgggggcggcgtggagtccagttttgctcggctcgtcgctgggatccgccggccggcgaagcggggaagggaagaggagcggagattggagagtacaagcaggggaagatgtcagacgcgctgatcaacggcctcgccggcgccggcggcgggatcatcgcccagctccttacctacccgctccagaccgtgaacgcgcggcaacagacggagcgcgacccctccaagccggcgttcaaggacggcgccgctcgccagttgtatctggttgtgaagaacgaggggtgggagcgcctgtatggcgggcttatgccctctctcgtcggcaccgctgcctcccagggtgtctactactacttctaccaaatattccggaacagggccgaggcaagggcccttgagcgatccaggagagggcttggcgatgggtctgtcggcatgctccagtctctcactgtcgctgccctgtctggctgtgtcaatgtactgctcacaaacccgatttgggttgttgttacacgaatgcaaactcacagaaaggcaaacaaacagcaaagacctcagggtttgaattgtgctcttgataagccccttgaagctgctacagctgaaaacgctccatacaaaacgattgatgtttttcaggaactctacaaagaatctggagttcttggcttctggaaaggggtaattccggctcttatcatggttagcaatcccgcaattcagttcatgctatatgagactcttctgaagaaattgaagaagagacgagcctctaattttaagggagctgatggattgactgctcttgaaatttttcttcttggtgctgttgcgaaacttggtgcaaccgtcgttacgtatccccttctagttgttaaggcaagacttcaggcaaagcacatgattaacgatgacaagaggcatcgctacaaaggtacacttgatgcgttcacaaagatggtacgatatgagggtctgtcagggatgtacaaaggaatgggcacaaaaattgtgcaaagtgtttttgcttctgctttgctttttatgattaaggaggagctggtgaagggtgctcgactattggtaactggtaacactagtctggttaagaaactaccatcaaagtcatcaagatgaactacgggcatcgcaagcgttagtatatcatcctaaaaagccatttattatccgcataaaccgtaaacaaggtcgacaagctatagagctcgcctctgctttggatatgtcaactgtaggttacacaatagccagtatgattcacgtagggaccaaagactatgttggatagatatttgtatcattcatgtagaatgtatcgtggaagatcgaaacagaagaaaataaataagtatgataatttgaactc

SEQ ID NO: 19396 - protein, 344 aa, Zea mays subsp. mays
  peptide (1)..(344): Ceres Seq. ID no. 12364564
MSDALINGLAGAGGGIIAQLLTYPLQTVNARQQTERDPSKPAFKDGAARQLYLVVKNEGWERLYGGLMPSLVGTAASQGVYYYFYQIFRNRAEARALERSRRGLGDGSVGMLQSLTVAALSGCVNVLLTNPIWVVVTRMQTHRKANKQQRPQGLNCALDKPLEAATAENAPYKTIDVFQELYKESGVLGFWKGVIPALIMVSNPAIQFMLYETLLKKLKKRRASNFKGADGLTALEIFLLGAVAKLGATVVTYPLLVVKARLQAKHMINDDKRHRYKGTLDAFTKMVRYEGLSGMYKGMGTKIVQSVFASALLFMIKEELVKGARLLVTGNTSLVKKLPSKSSR

SEQ ID NO: 19397 - protein, 277 aa, Zea mays subsp. mays
  peptide (1)..(277): Ceres Seq. ID no. 12364565
MPSLVGTAASQGVYYYFYQIFRNRAEARALERSRRGLGDGSVGMLQSLTVAALSGCVNVLLTNPIWVVVTRMQTHRKANKQQRPQGLNCALDKPLEAATAENAPYKTIDVFQELYKESGVLGFWKGVIPALIMVSNPAIQFMLYETLLKKLKKRRASNFKGADGLTALEIFLLGAVAKLGATVVTYPLLVVKARLQAKHMINDDKRHRYKGTLDAFTKMVRYEGLSGMYKGMGTKIVQSVFASALLFMIKEELVKGARLLVTGNTSLVKKLPSKSSR

SEQ ID NO: 19398 - protein, 234 aa, Zea mays subsp. mays
  peptide (1)..(234): Ceres Seq. ID no. 12364566
MLQSLTVAALSGCVNVLLTNPIWVVVTRMQTHRKANKQQRPQGLNCALDKPLEAATAENAPYKTIDVFQELYKESGVLGFWKGVIPALIMVSNPAIQFMLYETLLKKLKKRRASNFKGADGLTALEIFLLGAVAKLGATVVTYPLLVVKARLQAKHMINDDKRHRYKGTLDAFTKMVRYEGLSGMYKGMGTKIVQSVFASALLFMIKEELVKGARLLVTGNTSLVKKLPSKSSR

SEQ ID NO: 19399 - DNA, 1083 bp, Zea mays subsp. mays
  misc_feature (1)..(1083): Ceres Seq. ID no. 13492652
  misc_feature (1)..(1083): Ortholog of  Ceres SEQ ID NO 14315223 as cited in SEQ ID NO 52527
  misc_feature (1)..(1083): Ortholog of  Ceres SEQ ID NO 14303324 as cited in SEQ ID NO 54563
  misc_feature (1)..(1083): Ortholog of  Ceres SEQ ID NO 14307085 as cited in SEQ ID NO 54749
  misc_feature (1)..(1083): Ortholog of  Ceres SEQ ID NO 14313599 as cited in SEQ ID NO 54989
ccacacagcaaaaccacccgcgctccgccaatccagagagccagccagcccgaggtcacacagcagcgagctcggtcttctcgccaggacacgaacacgaccccagcaggcggcaggcaagccacgctctctcgacggacggacgttaatcgagacatggggcgctctccgtgctgcgagaagatggggctgaagaggggtccgtggacggccgaggaggacaggattctggtggcgcacgtcgagcgccacggccacagcaactggcgcgcgctgcccaagcaggcgggcctgctccgctgcggcaagagctgccgcctccgctggatcaactacctgcgccccgacatcaagcgcggcaacttcagccgggaggaggaggacgccatcatacagctccaccaaatgctcggcaacagatggtcgacaatcgctgccaggctgccggggaggacggacaacgagatcaagaacgtctggcacacccacctcaagaagcgcctggagccaaagccagccagccagcaggcgcccaagcgcaagcccacgaagaagcagcagccgcagccggagcccgtaacggcgctcgaggggccgaccggggccgtgccggtgtcgccggagcggtcactctccacgacgacgtcgaccaccaccagcaccgcggactactcggccgcctcgtcgctggagaacgcaggcgacagcttcacctcggaggaggactactaccagatcgacgacagcttctggtccgagacgctggcgatgacgacgacggtggacagcttcgagtccggggtgcagcaggcggagggaagcttcggcaagtcggcggcgccgccgtcgtcgaccaacgacgacatggacttctggctcaagctgttcatgcaggccagcgacatgcagaatttgccccagattatttaggcgggaaacggacctagacggttggttatctctcggctgatgatgatattcattggcgcgcgctcacgattctttgaatctttgttctgctccgttttcggtggatgcatatatcccactgaaaccttgtgaagcggaaagcaattgcttcgt

SEQ ID NO: 19400 - protein, 309 aa, Zea mays subsp. mays
  peptide (1)..(309): Ceres Seq. ID no. 15222886
PHSKTTRAPPIQRASQPEVTQQRARSSRQDTNTTPAGGRQATLSRRTDVNRDMGRSPCCEKMGLKRGPWTAEEDRILVAHVERHGHSNWRALPKQAGLLRCGKSCRLRWINYLRPDIKRGNFSREEEDAIIQLHQMLGNRWSTIAARLPGRTDNEIKNVWHTHLKKRLEPKPASQQAPKRKPTKKQQPQPEPVTALEGPTGAVPVSPERSLSTTTSTTTSTADYSAASSLENAGDSFTSEEDYYQIDDSFWSETLAMTTTVDSFESGVQQAEGSFGKSAAPPSSTNDDMDFWLKLFMQASDMQNLPQII

SEQ ID NO: 19401 - protein, 257 aa, Zea mays subsp. mays
  peptide (1)..(257): Ceres Seq. ID no. 15222887
MGRSPCCEKMGLKRGPWTAEEDRILVAHVERHGHSNWRALPKQAGLLRCGKSCRLRWINYLRPDIKRGNFSREEEDAIIQLHQMLGNRWSTIAARLPGRTDNEIKNVWHTHLKKRLEPKPASQQAPKRKPTKKQQPQPEPVTALEGPTGAVPVSPERSLSTTTSTTTSTADYSAASSLENAGDSFTSEEDYYQIDDSFWSETLAMTTTVDSFESGVQQAEGSFGKSAAPPSSTNDDMDFWLKLFMQASDMQNLPQII

SEQ ID NO: 19402 - protein, 248 aa, Zea mays subsp. mays
  peptide (1)..(248): Ceres Seq. ID no. 15222888
MGLKRGPWTAEEDRILVAHVERHGHSNWRALPKQAGLLRCGKSCRLRWINYLRPDIKRGNFSREEEDAIIQLHQMLGNRWSTIAARLPGRTDNEIKNVWHTHLKKRLEPKPASQQAPKRKPTKKQQPQPEPVTALEGPTGAVPVSPERSLSTTTSTTTSTADYSAASSLENAGDSFTSEEDYYQIDDSFWSETLAMTTTVDSFESGVQQAEGSFGKSAAPPSSTNDDMDFWLKLFMQASDMQNLPQII

SEQ ID NO: 19403 - DNA, 944 bp, Zea mays subsp. mays
  misc_feature (1)..(944): Ceres Seq. ID no. 12390522
  misc_feature (1)..(944): Ortholog of  Ceres SEQ ID NO 14302082 as cited in SEQ ID NO 64529
atttttcccctcgtcctccctgcgatttcgcgacctccatccaatccctctgcacggagaatcgtctaatggcggaggagggctacagaggtgacgctgaacgtgtacgacctcagcaacggcctcagcaacggcaagcccattgaggccatctggcacacgggagtggtggtgtacgggaacgagtactacttcggcggcgggatccagtcgtcccccgcgggacgacgccgtacgggcggccgctgcgggtggtggagctgggcgtcacgcacatcccgcgggaggtgttcgaggactacctccgcgacatcgcgccccggtacacggccgagacctaccgcctgctcacccacaactgcaacaacttcagtcacgaggtggcgcagttcctcgtcggcactggcgccggcgtgcccgattacatcctcaacctccccgccgaggtcatgtccagccccatgggcccgctcatcatgcccatgatccagaacctcgagtccacgctcaggagcaacgtcgctccgcagaccacgcagttcgtgcccacgcccgcctccgtntccgcgccgaccgaggctcccgcctccgagcgaaaagcgccggcgccggcgccggcggagaaggcttcgaaggaagctcctgcgcctgcgaagaaggaagcccctactcctgcggctgaccctctcgggagcgccagggggaaggtgcaggaggaggtgatgaaggagttcgcggccatcatggccagcggtacgctacgggccagcgaggcggcggcgctggccatgcgccgggtcatggagcgccacggcgacggcgccacgatgcagcagggctagacgaatcaggctgtgaacgcgttccggttccatgggaattggaatttgtcatctgcatgctgatgccgccgccgtatggaaaaatttggagaagttattcct

SEQ ID NO: 19404 - protein, 130 aa, Zea mays subsp. mays
  peptide (1)..(130): Ceres Seq. ID no. 12390523
  misc_feature (38)..(38): Xaa is any aa, unknown or other
MSSPMGPLIMPMIQNLESTLRSNVAPQTTQFVPTPASXSAPTEAPASERKAPAPAPAEKASKEAPAPAKKEAPTPAADPLGSARGKVQEEVMKEFAAIMASGTLRASEAAALAMRRVMERHGDGATMQQG

SEQ ID NO: 19405 - protein, 126 aa, Zea mays subsp. mays
  peptide (1)..(126): Ceres Seq. ID no. 12390524
  misc_feature (34)..(34): Xaa is any aa, unknown or other
MGPLIMPMIQNLESTLRSNVAPQTTQFVPTPASXSAPTEAPASERKAPAPAPAEKASKEAPAPAKKEAPTPAADPLGSARGKVQEEVMKEFAAIMASGTLRASEAAALAMRRVMERHGDGATMQQG

SEQ ID NO: 19406 - protein, 121 aa, Zea mays subsp. mays
  peptide (1)..(121): Ceres Seq. ID no. 12390525
  misc_feature (29)..(29): Xaa is any aa, unknown or other
MPMIQNLESTLRSNVAPQTTQFVPTPASXSAPTEAPASERKAPAPAPAEKASKEAPAPAKKEAPTPAADPLGSARGKVQEEVMKEFAAIMASGTLRASEAAALAMRRVMERHGDGATMQQG

SEQ ID NO: 19407 - DNA, 1698 bp, Zea mays subsp. mays; identical to SEQ ID NO: 13749
  misc_feature (1)..(1698): Ceres Seq. ID no. 13494587
  misc_feature (1)..(1698): Ortholog of  Ceres SEQ ID NO 14316344 as cited in SEQ ID NO 60120

SEQ ID NO: 19408 - protein, 355 aa, Zea mays subsp. mays; identical to SEQ ID NO: 13750
  peptide (1)..(355): Ceres Seq. ID no. 13494588

SEQ ID NO: 19409 - protein, 263 aa, Zea mays subsp. mays; identical to SEQ ID NO: 13751
  peptide (1)..(263): Ceres Seq. ID no. 13494589

SEQ ID NO: 19410 - protein, 244 aa, Zea mays subsp. mays; identical to SEQ ID NO: 13752
  peptide (1)..(244): Ceres Seq. ID no. 13494590

SEQ ID NO: 19411 - DNA, 2064 bp, Zea mays subsp. mays
  misc_feature (1)..(2064): Ceres Seq. ID no. 12361230
  misc_feature (1)..(2064): Ortholog of  Ceres SEQ ID NO 12372734 as cited in SEQ ID NO 1206
  misc_feature (1)..(2064): Ortholog of  Ceres SEQ ID NO 13584160 as cited in SEQ ID NO 63677
gcacgagaccattacctagaacatcctaatcgaaaaagaaaggtccccgtagaaattcgaaaccacaccaccacctggaaacccagacaaagcacgagccacgcacggcccccgctgcctcccttccgccgccgccgccgccggcggcgcgccaccgtcgctgctctcccgccttcaccgcgcccaactccaatccttgcctcccccgcgcgcttcagcctcttcactccccatcgttttcgcctggccagatccaggtttccttgaccgagacctcgcctgccttacgcctccggtcggattcttcgccgtccttgtccccactgggcaccgctggggtggagcggagatcggatccgccgggagctgattccttctctcgcaggctggatgcccttactttcttcgatggactgctcgtgttattctgcaattctcagttttgctgtgaacgctgaatcgaatgtttctttcgttgcgttcagtctagtttgacgcggattcatttgctggtcggcatagcatgatcctacggtgattgcggatagcttgtgcaagctggtggcttgggtgttgtctttttaatctggcctaaagatatcctgagacggtagcgtcacatggatgctagtacagaggttactgatgctattggtgcggtgggctttgacaatgaggccgcggggaagttgccgcccagtgatagtgtagaggggcacgcagaagaacacgatgtgctggctgatggagcccattcgggcgagagcgaggtgatcaacccatctgaagaagtagaaatggaagccacctcgcagtcccaggacataaagcctcgagttcctgagggggttcaaggccattcaatgaaggttggtactaaatctcagcgacagagccctcgaggcggggataagagtcaaactaggaaaagctcttttagtccttcttatcctaaggcgcccattgcacgggtttctgatccagatctagttgattgctctttgagcaatggtgatgctggttccagtaagaaaaaggccgagaagagcagtttccgcccagttgccaaggagaccccatcacttgaggactcaaatgagaagaaaaaaactcagaaggcatcaaaccaacattctgtcaaaaaggatattgaagaagaatcaaatgaaagtgtgaaacctcaaagggttggcagcactccttcatatggatttagttttaagtgtgatgagagagctgaaaaacgaagagagttctactcaaagctcgaggagaagattcatgcacaggaactagagaaaagcaacttgcaggcaaaatcaaaggaaactgaagaagctgaactcaaaatgctgagaaagagtttaaatttcaaggcaacaccaatgcccagcttttataaggaaccacctccccccaaggttgagttgaagaagatacctacaacaagagctaggtcaccaaagcttggtcgctccaagaacacatcctcaggagggacagaagggaatccaaatcctccagctcgttcagctcgactgagtctcgatgaaagggtctcccaaaatggtgtcaagaaagcacctgctgcaaatgcagcgaagaagccccagcggaaatctctacctaaactgccttcagagcaaacaaccaaagttgacattgcaccatctgttccatctgcagaagagctagaaaacaagttgccgacgaagggtggtcttgatcgagagccgatccgcgctcaaattacacctgacgaacctggactcactgcataggaacctatcaagccgactcctatgaaaggagggagttgtgccccagcttcctttatcacattttgctatttctgcagtaaactgctggctggtattatgtattagaattagtctcagcaccaggagcttgaagagtggcaagtgacaccgtgtattctttatcttagtttctgttgacataccaggtatttgtagttggcagacaggcagaatttcatattattctccagggctaccagtcaattaagttgccgtccaagtaagatatgtacacgattttgcc

SEQ ID NO: 19412 - protein, 386 aa, Zea mays subsp. mays
  peptide (1)..(386): Ceres Seq. ID no. 12361231
MDASTEVTDAIGAVGFDNEAAGKLPPSDSVEGHAEEHDVLADGAHSGESEVINPSEEVEMEATSQSQDIKPRVPEGVQGHSMKVGTKSQRQSPRGGDKSQTRKSSFSPSYPKAPIARVSDPDLVDCSLSNGDAGSSKKKAEKSSFRPVAKETPSLEDSNEKKKTQKASNQHSVKKDIEEESNESVKPQRVGSTPSYGFSFKCDERAEKRREFYSKLEEKIHAQELEKSNLQAKSKETEEAELKMLRKSLNFKATPMPSFYKEPPPPKVELKKIPTTRARSPKLGRSKNTSSGGTEGNPNPPARSARLSLDERVSQNGVKKAPAANAAKKPQRKSLPKLPSEQTTKVDIAPSVPSAEELENKLPTKGGLDREPIRAQITPDEPGLTA

SEQ ID NO: 19413 - protein, 327 aa, Zea mays subsp. mays
  peptide (1)..(327): Ceres Seq. ID no. 12361232
MEATSQSQDIKPRVPEGVQGHSMKVGTKSQRQSPRGGDKSQTRKSSFSPSYPKAPIARVSDPDLVDCSLSNGDAGSSKKKAEKSSFRPVAKETPSLEDSNEKKKTQKASNQHSVKKDIEEESNESVKPQRVGSTPSYGFSFKCDERAEKRREFYSKLEEKIHAQELEKSNLQAKSKETEEAELKMLRKSLNFKATPMPSFYKEPPPPKVELKKIPTTRARSPKLGRSKNTSSGGTEGNPNPPARSARLSLDERVSQNGVKKAPAANAAKKPQRKSLPKLPSEQTTKVDIAPSVPSAEELENKLPTKGGLDREPIRAQITPDEPGLTA

SEQ ID NO: 19414 - protein, 305 aa, Zea mays subsp. mays
  peptide (1)..(305): Ceres Seq. ID no. 12361233
MKVGTKSQRQSPRGGDKSQTRKSSFSPSYPKAPIARVSDPDLVDCSLSNGDAGSSKKKAEKSSFRPVAKETPSLEDSNEKKKTQKASNQHSVKKDIEEESNESVKPQRVGSTPSYGFSFKCDERAEKRREFYSKLEEKIHAQELEKSNLQAKSKETEEAELKMLRKSLNFKATPMPSFYKEPPPPKVELKKIPTTRARSPKLGRSKNTSSGGTEGNPNPPARSARLSLDERVSQNGVKKAPAANAAKKPQRKSLPKLPSEQTTKVDIAPSVPSAEELENKLPTKGGLDREPIRAQITPDEPGLTA

SEQ ID NO: 19415 - DNA, 1589 bp, Zea mays subsp. mays
  misc_feature (1)..(1589): Ceres Seq. ID no. 12364378
  misc_feature (1)..(1589): Ortholog of  Ceres SEQ ID NO 13597162 as cited in SEQ ID NO 63955
  misc_feature (1)..(1589): Ortholog of  Ceres SEQ ID NO 14313567 as cited in SEQ ID NO 68074
gcacgagaccattacctagaacatcctaatcaaaaaacttcacgcaccaccctagtacaagagataccacagtccacagcaaaacgtacgccagaacaagctaagcgcgcgcgagccgcagacatcctaacgatggccgtcgtcgaggtcgtcacctccgagctggtggcgccgagcgagcccacgccgcggcgcccgctctggctgtccaacctcgacctcgccgcgcggaacggctacaccccgacgatctacttcttccgccgtccccaggacagcagcgacggccggctgcgtgcggactcctgcttctcgacccacgcgctgcgtgcggcgctggccgccgcgctggtccggttctacccgtttgccggccggctccgcgccgccggccgcggcgggcgcgccgagatcgactgcaacgccgcgggcgcgctcttggtcgtcgcgcggtccgccgcggcgctcgaggacttcctccacgacttcgcgccgtccaaggccatgaacgacacgttcgtgcccacgtacgactccgctggccccgacgcaccgttgctactgcttcaggtcacctttttcaggtgcggcggcgtggcgctcggcacggcgatgcaccacttcgtcatcgacggccgcagcgccttccacttcatctgaacgtggtccagcatcgcccgtggagacaccgccgccgcgcccccgtcgcttgaccgcacggcactccgggcgcgcccactgctcactactgccgccgccctcttcgaccacacccacgagtacggcggccgcgcctccaggccagcagcagtaaccgccggcgccgccggaagcaaggcggagtacgccagcgcgatcctccgcgtgaccggcgcgcaggccgccgccctgcgcgcccgcgcgggcgcggtgtccacgttccgcgcgctggtggcgcacgtctnncggtgcgcgtgcgcggcacgcgcgctggctcacgacgcgagtcccgcctgtacacgatggtggacatgcgngcccgcctgtccccgccgntgccgnacgccttnttcggcaacgcggtggcgcgcacctccgtgtcggcccgcgtcggcgacntccctggccaacccgctgggtttcggcgcacgtcggctccgcgcggcgacggggcacggggacgagtatgtgcgctcgctgctggattacctggagacggcggacctggcgacggtaccgcgccagggcctgcgcggcacggacctgcgggtgatcagctggctggggatgccgtcgtacgacgccgacttcgggtggggcgagccggcgctgctggcgccggcgctcatgtattacccggggttcgtgtacctgttgaactgccccggcaagggtggcgatgttgccgtggccgccgcgctggagcccgagcgcatgcagcgttcaaggagctcttctacgaggagctggctatgctggagtgaacgtacgtgaggcaaaagattcacgcttaacgtgcactttgtgtgcaccagttaatctataatatgtctatgtataactatatttatcgttatatctataatctacatactatatagaaatattct

SEQ ID NO: 19416 - protein, 219 aa, Zea mays subsp. mays
  peptide (1)..(219): Ceres Seq. ID no. 12364379
ARDHYLEHPNQKTSRTTLVQEIPQSTAKRTPEQAKRARAADILTMAVVEVVTSELVAPSEPTPRRPLWLSNLDLAARNGYTPTIYFFRRPQDSSDGRLRADSCFSTHALRAALAAALVRFYPFAGRLRAAGRGGRAEIDCNAAGALLVVARSAAALEDFLHDFAPSKAMNDTFVPTYDSAGPDAPLLLLQVTFFRCGGVALGTAMHHFVIDGRSAFHFI

SEQ ID NO: 19417 - protein, 175 aa, Zea mays subsp. mays
  peptide (1)..(175): Ceres Seq. ID no. 12364380
MAVVEVVTSELVAPSEPTPRRPLWLSNLDLAARNGYTPTIYFFRRPQDSSDGRLRADSCFSTHALRAALAAALVRFYPFAGRLRAAGRGGRAEIDCNAAGALLVVARSAAALEDFLHDFAPSKAMNDTFVPTYDSAGPDAPLLLLQVTFFRCGGVALGTAMHHFVIDGRSAFHFI

SEQ ID NO: 19418 - protein, 153 aa, Zea mays subsp. mays
  peptide (1)..(153): Ceres Seq. ID no. 12364381
  misc_feature (5)..(5): Xaa is any aa, unknown or other
  misc_feature (12)..(12): Xaa is any aa, unknown or other
  misc_feature (14)..(14): Xaa is any aa, unknown or other
  misc_feature (16)..(16): Xaa is any aa, unknown or other
  misc_feature (33)..(33): Xaa is any aa, unknown or other
MVDMXARLSPPXPXAXFGNAVARTSVSARVGDXPGQPAGFRRTSAPRGDGARGRVCALAAGLPGDGGPGDGTAPGPARHGPAGDQLAGDAVVRRRLRVGRAGAAGAGAHVLPGVRVPVELPRQGWRCCRGRRAGARAHAAFKELFYEELAMLE

SEQ ID NO: 19419 - DNA, 2126 bp, Zea mays subsp. mays
  misc_feature (1)..(2126): Ceres Seq. ID no. 12436083
  misc_feature (1)..(2126): Ortholog of  Ceres SEQ ID NO 13596319 as cited in SEQ ID NO 67933
aaagagccgacgtcactcctcccgatctgggcgcggacgccaacgacgcgacggcccaagtcgcgacgccaccagctccccatcccctcggacgccatggaggaagctcgcgaccacaggctctcctccaccgccggccgccccttcctctctggcttctgcgccgcggcgctccgacgtaagcccctcggcgcccgcgcctccgccgccgccgccgccaccggcgagggccttgtgcggcagctcggcgtcctcgacctcgtgctgctcgggatcggtgcgtccatcggcgccggcatattcgtcgtcactggcaccgtcgcccgcgacgccggcccaggtgtcacgatcagttttgttcttgctggagctgcgtgcgtgctcaatgccctgtgctatgctgaactggcgtctcggttccctgctgtggttgggggagcatacttgtacacgtacgcagcgttcaatgagatcaccgccttcttggtcttcactcagttgatggtggattaccatatcggcgcagcaagcattgctcgcagcttagcaagctactttatcgagttcttggagctaatcccgctcttgaagggccaaattccaagctgggtaggccatggggaggagttttttggtggtgttgtatcaattaacatactggcccccgttcttctcatcatcttaactgcgattctctgctatggtgtcaaagaatcatcagcagtgaacacgtttatgacaacattgaagataatcattgttatagtcattgtatttgctggtgtgtttgaggtggatgtatcaaactggtctccgtttatgccaaatggtttcaaatctgtagtgactggagccacagtagtcttttttgcatatgttggatttgatgcggttgctaattctgctgaggaagccaaaaggccacagagagacctacccattggtatactaggaagccttatagcatgtgtgttgttatacgttgctgtatgcttggtcattactggaatggttccatatacattactcggtgaagatgctcctttggctgaggcttttgctgctaagggcctgaaatttattactgtattgattagtattggagctgttgctggacttacaacaacacttcttgttggcttgtatgttcagtcacgtttgtactttggacttggaagggatgggcttttaccttcagtatttgctgaagtacacccaacaaggcatactcctgtacagtctcagatttgggtcggttgtgttgcagcagtcatggcaggcctctttaatgtgcgtatgctctcacatattctttccgttggcactctgaccggttattcagttgtatcagcttgtgtgatcacactaagatggaatgacaaaggaactagtcgtcgctcccttggaagtatgtcaatttggcaagagggtgttcttagtcttgtcatagttgctctttgtggttttatagtgggactttgctatcgctttaactatgctatagcctttatggttgtagcttttctgatagctgttgctgccagtttcgctctccagtttcgtcaggtctatgtggatccacctggcttttcttgtcctggggtaccgttggttcccattatttctgttttcttcaacatggtcctgtttgctcagctacatgaagaagcgtggtatagatttgtcattcttagtctcatcgctgtgggagtttatgccggctatggtcagtacaatgctgttccttccagctcagaacactctactattggttaccatggcattccttctgaagccgcatgagctatgttcatccccggagttcttcgaacatactgtatggtaccaacatacaccatcgtcaccgaagtttgaacctgttgcttttttttttgatgttttgcacagtgcatactcttgtagttacgcttagtactcctatacctatatctagacagtgaatttcacagcctgtgttgtgcccaccacaccattcgtcaggaagcttgccaagtgcatagaccttgtaaaaatgcaaatgaaaataaagaactgcagctgcattgtttgtaggaactcattgtcatgcactatgtataattctgtgtatattgtgaagagttcat

SEQ ID NO: 19420 - protein, 600 aa, Zea mays subsp. mays
  peptide (1)..(600): Ceres Seq. ID no. 12436084
KEPTSLLPIWARTPTTRRPKSRRHQLPIPSDAMEEARDHRLSSTAGRPFLSGFCAAALRRKPLGARASAAAAATGEGLVRQLGVLDLVLLGIGASIGAGIFVVTGTVARDAGPGVTISFVLAGAACVLNALCYAELASRFPAVVGGAYLYTYAAFNEITAFLVFTQLMVDYHIGAASIARSLASYFIEFLELIPLLKGQIPSWVGHGEEFFGGVVSINILAPVLLIILTAILCYGVKESSAVNTFMTTLKIIIVIVIVFAGVFEVDVSNWSPFMPNGFKSVVTGATVVFFAYVGFDAVANSAEEAKRPQRDLPIGILGSLIACVLLYVAVCLVITGMVPYTLLGEDAPLAEAFAAKGLKFITVLISIGAVAGLTTTLLVGLYVQSRLYFGLGRDGLLPSVFAEVHPTRHTPVQSQIWVGCVAAVMAGLFNVRMLSHILSVGTLTGYSVVSACVITLRWNDKGTSRRSLGSMSIWQEGVLSLVIVALCGFIVGLCYRFNYAIAFMVVAFLIAVAASFALQFRQVYVDPPGFSCPGVPLVPIISVFFNMVLFAQLHEEAWYRFVILSLIAVGVYAGYGQYNAVPSSSEHSTIGYHGIPSEAA

SEQ ID NO: 19421 - protein, 568 aa, Zea mays subsp. mays
  peptide (1)..(568): Ceres Seq. ID no. 12436085
MEEARDHRLSSTAGRPFLSGFCAAALRRKPLGARASAAAAATGEGLVRQLGVLDLVLLGIGASIGAGIFVVTGTVARDAGPGVTISFVLAGAACVLNALCYAELASRFPAVVGGAYLYTYAAFNEITAFLVFTQLMVDYHIGAASIARSLASYFIEFLELIPLLKGQIPSWVGHGEEFFGGVVSINILAPVLLIILTAILCYGVKESSAVNTFMTTLKIIIVIVIVFAGVFEVDVSNWSPFMPNGFKSVVTGATVVFFAYVGFDAVANSAEEAKRPQRDLPIGILGSLIACVLLYVAVCLVITGMVPYTLLGEDAPLAEAFAAKGLKFITVLISIGAVAGLTTTLLVGLYVQSRLYFGLGRDGLLPSVFAEVHPTRHTPVQSQIWVGCVAAVMAGLFNVRMLSHILSVGTLTGYSVVSACVITLRWNDKGTSRRSLGSMSIWQEGVLSLVIVALCGFIVGLCYRFNYAIAFMVVAFLIAVAASFALQFRQVYVDPPGFSCPGVPLVPIISVFFNMVLFAQLHEEAWYRFVILSLIAVGVYAGYGQYNAVPSSSEHSTIGYHGIPSEAA

SEQ ID NO: 19422 - protein, 433 aa, Zea mays subsp. mays
  peptide (1)..(433): Ceres Seq. ID no. 12436086
MVDYHIGAASIARSLASYFIEFLELIPLLKGQIPSWVGHGEEFFGGVVSINILAPVLLIILTAILCYGVKESSAVNTFMTTLKIIIVIVIVFAGVFEVDVSNWSPFMPNGFKSVVTGATVVFFAYVGFDAVANSAEEAKRPQRDLPIGILGSLIACVLLYVAVCLVITGMVPYTLLGEDAPLAEAFAAKGLKFITVLISIGAVAGLTTTLLVGLYVQSRLYFGLGRDGLLPSVFAEVHPTRHTPVQSQIWVGCVAAVMAGLFNVRMLSHILSVGTLTGYSVVSACVITLRWNDKGTSRRSLGSMSIWQEGVLSLVIVALCGFIVGLCYRFNYAIAFMVVAFLIAVAASFALQFRQVYVDPPGFSCPGVPLVPIISVFFNMVLFAQLHEEAWYRFVILSLIAVGVYAGYGQYNAVPSSSEHSTIGYHGIPSEAA

SEQ ID NO: 19423 - DNA, 2189 bp, Zea mays subsp. mays
  misc_feature (1)..(2189): Ceres Seq. ID no. 12375779
  misc_feature (1)..(2189): Ortholog of  Ceres SEQ ID NO 12623695 as cited in SEQ ID NO 61286
gcacgagaccattacctagaacatcctaatcgaaaagcccaaaattttcggaggctgtccaccgcaccaccaccctgcgcgccgagcgcaccccgatccagatccacccatcctccggtctccggcgggcgccctcttcaacgtcctcacgcgcctccggacgccagtgcgcgcgcagtgagcatcaacatcaacccacctcttctctcgtcggaccggtgcgcaccaggcggcggcggaggcggcaggcatgaaacgggtgtcgtcgcacgtctcgctcgcctccgaggcggagatcaacctcgacctgtcgcgcctcgtcatcgacaagcccaggttcacgctggagcggaagcgctccttcgacgagcagtcgtggagcgagctctcccaccgccagaacgacggcttcgacagcgtgctgcagtcgccggcattcccgtccggcggcttcgactcgcccttctccgtcggcacgcacttcggcggcccgcacccgctcgtcaacgaggcctgggaggcgctcaggaaatcggtcgtctacttccgggaacagcccgtcggcaccattgctgccgtcgatcatgcgtcggaggaagtgctcaactatgatcaggtttttgtgagggatttcgttccgagcgcattggcttttctaatgaacaatgagactgacatagtgaagaattttcttttgaaaactcttcaccttcagagctctgagaaaatggtagaccgattcaagcttggagcaggagcgatgccagcaagtttcaaggtggaccgtaataaaaacagaaacactgaaaccttagtggctgattttggtgagagtgcaatcggtagggtggcaccggttgactctggattttggtggatcattctccttcgggcatatacaaagtacaccggagatgttagtttgtcagaatcacctgaatgccagaagtgcatgaggttgatactgaatctctgcttatctgaaggatttgatacttttccaactctgctctgcacagatggctgctcaatgattgatcgtcgaatgggtatatatggttatcccattgagatccaagccctattctatatggcattaagatgtgctctccaaatgctcaagccagagggcgaagggaaggatttcatagagaagatagggcaacgactacatgcactaacctaccacatgaggaattacttctggctagattttcaccagctgaataacatatacagatacaaaacagaagagtattcccacactgctgtgaacaagttcaatgtaattccagattccattcctgattgggtgtttgatttcatgccatgtcgaggagctactttcttggcaacgtcagccctgctatgatggatttcaggtggtttgcccttggcaattgcattgccattgtatcatctctagctaccccagaacagtcagttgctataatggatctgatcgaggaaaagtgggatgagctagttggtgagatgcctctgaagatatgctatcctgctctcgagaatcatgagtggagaattattactggatgtgaccccaaaaacacccggtggagttaccacaatggaggatcttggccagttcttctgtggctgctgacagcagcctgcataaagactggtcggccacaaatggcaaaacgtgccattgagctcgcagagtcaaggctgctcaaggacggctggcccgagtattacgatggcaagctaggaagattcgttggcaagcaggccaggaagttccagacctggtccattgccggttacctcgtcgcccgcatgatgctggaggacccatcgacactgatgatgatctccatggaggaggaccgccctgtgaagtcgaccatgcggcggtcagcatcatggaatgcctgaatgcgtggatagttgtttctgaaccaaggaaattcagaatcagctgttatacggatttgtgatttgtttggaccacaagagtgcagcgttggtgtgatttgttgggaccacaaagttcaacattgattatagttggactctgtcaattaggacagagtttgtataccatagaggatcataggagttgcacaagattttgccatgcccttttggtttgtttcagaacaatactcaggatcctgttcagttgaaaccttgattttggaataacaaatcactgtttatgc

SEQ ID NO: 19424 - protein, 373 aa, Zea mays subsp. mays
  peptide (1)..(373): Ceres Seq. ID no. 12375780
MKRVSSHVSLASEAEINLDLSRLVIDKPRFTLERKRSFDEQSWSELSHRQNDGFDSVLQSPAFPSGGFDSPFSVGTHFGGPHPLVNEAWEALRKSVVYFREQPVGTIAAVDHASEEVLNYDQVFVRDFVPSALAFLMNNETDIVKNFLLKTLHLQSSEKMVDRFKLGAGAMPASFKVDRNKNRNTETLVADFGESAIGRVAPVDSGFWWIILLRAYTKYTGDVSLSESPECQKCMRLILNLCLSEGFDTFPTLLCTDGCSMIDRRMGIYGYPIEIQALFYMALRCALQMLKPEGEGKDFIEKIGQRLHALTYHMRNYFWLDFHQLNNIYRYKTEEYSHTAVNKFNVIPDSIPDWVFDFMPCRGATFLATSALL

SEQ ID NO: 19425 - protein, 237 aa, Zea mays subsp. mays
  peptide (1)..(237): Ceres Seq. ID no. 12375781
MNNETDIVKNFLLKTLHLQSSEKMVDRFKLGAGAMPASFKVDRNKNRNTETLVADFGESAIGRVAPVDSGFWWIILLRAYTKYTGDVSLSESPECQKCMRLILNLCLSEGFDTFPTLLCTDGCSMIDRRMGIYGYPIEIQALFYMALRCALQMLKPEGEGKDFIEKIGQRLHALTYHMRNYFWLDFHQLNNIYRYKTEEYSHTAVNKFNVIPDSIPDWVFDFMPCRGATFLATSALL

SEQ ID NO: 19426 - protein, 214 aa, Zea mays subsp. mays
  peptide (1)..(214): Ceres Seq. ID no. 12375782
MVDRFKLGAGAMPASFKVDRNKNRNTETLVADFGESAIGRVAPVDSGFWWIILLRAYTKYTGDVSLSESPECQKCMRLILNLCLSEGFDTFPTLLCTDGCSMIDRRMGIYGYPIEIQALFYMALRCALQMLKPEGEGKDFIEKIGQRLHALTYHMRNYFWLDFHQLNNIYRYKTEEYSHTAVNKFNVIPDSIPDWVFDFMPCRGATFLATSALL

SEQ ID NO: 19427 - DNA, 1332 bp, Zea mays subsp. mays
  misc_feature (1)..(1332): Ceres Seq. ID no. 12375832
  misc_feature (1)..(1332): Ortholog of  Ceres SEQ ID NO 14312769 as cited in SEQ ID NO 55493
  misc_feature (1)..(1332): Ortholog of  Ceres SEQ ID NO 13639300 as cited in SEQ ID NO 56701
ggttctgggcctattcacggcattcagggggaaatgggtgagttccaagctcttcctctcatcaacttcttcccgttccacgcagaccaaccagacattaagaattgagatcctgcaaccgcaacaatggcggccatggcgaacacctctcgtctccccaccccctgcagcctcccaaccatcagcatcggcgctaagagcaggaggctagctgtggcggccgtcagatgcggtcccggcggcagcaggagccaccggaggagccttggggtcttgctgtgtcgatcctcgtccacggccggagcccaagggagcacgaggatggaggactataacaccgccatgaagcggatgatgcgtaacccctacgagtaccatcacgatctcggcatgaactatgctgtcataagtgagagcttgattgttggctcacagcctcagaagcctgaagatatcaatcacttgaaaaatgaagagcgagtagcatatattctttgcttacagcaggacaaggacattgaatattggggcattgacttccaatccattgtcaataggtgcaaagaacttggcattcagcacatcaggagaccggccgtggattttgatccagactcactgaggtcgcaactgccgaaagcagtttcggcgctagaatgggctacgtcgcagcgcaaagggcgggtttatgtccactgcaccgctgggcttgggagagcacctgcggttgcaatcgcttacatgttttggtttgagaacatggatcttaacacggcttatcagaagctaacctccataaggccctgtggacccagcaagagagccatccgcgccgcaacctatgatctagctaagaacgatccatccaaagagccttttgagaaccttccggagcacgcttttgagggcgttgcagactgggagaggaagttgattcatgaccgggtgcgtgctcttcacgaagcatgagcagaagaaactttctccacgcgtcaagaaggggaactaagcttcctaatgaggcaatggctgtgcttcggcaccagatcattagatgtcgaaacgataaagtttgttctcaataaagcgtatacgacgccatatttgttgctgggtagtttgtaatagtcactaataggaaggaaataaagagggccttgcatgagattccagctggtgtcttcacctttgtggtgactgcaaatgagatgcccatccattaatggcatggcgcattgtaggtatattgtgtaaataaacctgtggatcttcatttgaggaacatcacttctgtaaaagtttatttgaagatacggccagctttgcaaatcc

SEQ ID NO: 19428 - protein, 280 aa, Zea mays subsp. mays
  peptide (1)..(280): Ceres Seq. ID no. 12375833
MAAMANTSRLPTPCSLPTISIGAKSRRLAVAAVRCGPGGSRSHRRSLGVLLCRSSSTAGAQGSTRMEDYNTAMKRMMRNPYEYHHDLGMNYAVISESLIVGSQPQKPEDINHLKNEERVAYILCLQQDKDIEYWGIDFQSIVNRCKELGIQHIRRPAVDFDPDSLRSQLPKAVSALEWATSQRKGRVYVHCTAGLGRAPAVAIAYMFWFENMDLNTAYQKLTSIRPCGPSKRAIRAATYDLAKNDPSKEPFENLPEHAFEGVADWERKLIHDRVRALHEA

SEQ ID NO: 19429 - protein, 277 aa, Zea mays subsp. mays
  peptide (1)..(277): Ceres Seq. ID no. 12375834
MANTSRLPTPCSLPTISIGAKSRRLAVAAVRCGPGGSRSHRRSLGVLLCRSSSTAGAQGSTRMEDYNTAMKRMMRNPYEYHHDLGMNYAVISESLIVGSQPQKPEDINHLKNEERVAYILCLQQDKDIEYWGIDFQSIVNRCKELGIQHIRRPAVDFDPDSLRSQLPKAVSALEWATSQRKGRVYVHCTAGLGRAPAVAIAYMFWFENMDLNTAYQKLTSIRPCGPSKRAIRAATYDLAKNDPSKEPFENLPEHAFEGVADWERKLIHDRVRALHEA

SEQ ID NO: 19430 - protein, 215 aa, Zea mays subsp. mays
  peptide (1)..(215): Ceres Seq. ID no. 12375835
MEDYNTAMKRMMRNPYEYHHDLGMNYAVISESLIVGSQPQKPEDINHLKNEERVAYILCLQQDKDIEYWGIDFQSIVNRCKELGIQHIRRPAVDFDPDSLRSQLPKAVSALEWATSQRKGRVYVHCTAGLGRAPAVAIAYMFWFENMDLNTAYQKLTSIRPCGPSKRAIRAATYDLAKNDPSKEPFENLPEHAFEGVADWERKLIHDRVRALHEA

SEQ ID NO: 19431 - DNA, 732 bp, Zea mays subsp. mays
  misc_feature (1)..(732): Ceres Seq. ID no. 12355130
  misc_feature (1)..(732): Ortholog of  Ceres SEQ ID NO 12615235 as cited in SEQ ID NO 62537
gtctaatcaatcccgcattccccattgcacgccgtctccgctagggttttactccgcagccacaccgcgccgccggagcagcgcgagacccgcgaggcgagccacgcgagagagatgaggctcctgacgcacaacatgctggcgtcgaacgtccggggcgcaaccaccggctacccgctgacgctggaggcgaccaactggtgcaccaaggaggtggagctcaactccgacttcatccgcggtctcctccccaagatcgactggcgcgcgctcgtcgccgccacccgcgcgatcggcctccccgagctcctccccgaggagcagccccccgaggaggagatcttcgccgagggcgccgccgacgtcgagggaagcgccatccgccgcatccaccacgcgctcctcgaggttcatgtccaggagggctccctcgtctgccccgacaccagccgctgcttccccatcaacaagggcatccccaacatgatgctccacgaggacgaggtctgattttgccgtgtcagtttcgccctggcctcttttgctcgcgcacctgctctacatggtctgtcgcgaagggtatcaggccttgtggacttcgtactcagattgtacctgtgaagtatggattgcagtcttgcagattgtgcccttataatatgatagatagccgtgtaatactcggaattgccgtttcgtgttgttaatttggtgcatgtcatgctttgttcc

SEQ ID NO: 19432 - protein, 131 aa, Zea mays subsp. mays
  peptide (1)..(131): Ceres Seq. ID no. 12355131
MRLLTHNMLASNVRGATTGYPLTLEATNWCTKEVELNSDFIRGLLPKIDWRALVAATRAIGLPELLPEEQPPEEEIFAEGAADVEGSAIRRIHHALLEVHVQEGSLVCPDTSRCFPINKGIPNMMLHEDEV

SEQ ID NO: 19433 - protein, 124 aa, Zea mays subsp. mays
  peptide (1)..(124): Ceres Seq. ID no. 12355132
MLASNVRGATTGYPLTLEATNWCTKEVELNSDFIRGLLPKIDWRALVAATRAIGLPELLPEEQPPEEEIFAEGAADVEGSAIRRIHHALLEVHVQEGSLVCPDTSRCFPINKGIPNMMLHEDEV

SEQ ID NO: 19434 - DNA, 472 bp, Zea mays subsp. mays
  misc_feature (1)..(472): Ceres Seq. ID no. 2076396
  misc_feature (1)..(472): Ortholog of  Ceres SEQ ID NO 13599496 as cited in SEQ ID NO 0
gtcccaggagcgtggcctcactctcctcgtcgcatcccctctcctcatcttcaaagcgcgggcggcggcaatggcgatggcctccacctacgcgccgggcggaggcgcgggggcgctcgcgcagggaagatgcaggtccgcggtcccgcggggctgggcttcctcggcccctccaaggccgccggcctcccccgccccctcgccctcgccaggcggacgagcagccccgtcgcggtgggcgccaggccgcgcttcatccagcacaagaaggaggccttctggttctaccgcttcctctccatcgtgtacgaccacgtcatcaacccgggccactggaccgaggacatgcgcgacgacgcgctggaacccgccgacctcttcagccgccacctcacggtcgtcgacgtcggcggcggcacggggttcaccacgctcggcatcgtcaagcacgtcaacccggagaacgtcacgc

SEQ ID NO: 19435 - protein, 157 aa, Zea mays subsp. mays
  peptide (1)..(157): Ceres Seq. ID no. 2076397
VPGAWPHSPRRIPSPHLQSAGGGNGDGLHLRAGRRRGGARAGKMQVRGPAGLGFLGPSKAAGLPRPLALARRTSSPVAVGARPRFIQHKKEAFWFYRFLSIVYDHVINPGHWTEDMRDDALEPADLFSRHLTVVDVGGGTGFTTLGIVKHVNPENVT

SEQ ID NO: 19436 - protein, 157 aa, Zea mays subsp. mays
  peptide (1)..(157): Ceres Seq. ID no. 2076398
SQERGLTLLVASPLLIFKARAAAMAMASTYAPGGGAGALAQGRCRSAVPRGWASSAPPRPPASPAPSPSPGGRAAPSRWAPGRASSSTRRRPSGSTASSPSCTTTSSTRATGPRTCATTRWNPPTSSAATSRSSTSAAARGSPRSASSSTSTRRTSR

SEQ ID NO: 19437 - protein, 156 aa, Zea mays subsp. mays
  peptide (1)..(156): Ceres Seq. ID no. 2076399
PRSVASLSSSHPLSSSSKRGRRQWRWPPPTRRAEARGRSRREDAGPRSRGAGLPRPLQGRRPPPPPRPRQADEQPRRGGRQAALHPAQEGGLLVLPLPLHRVRPRHQPGPLDRGHARRRAGTRRPLQPPPHGRRRRRRHGVHHARHRQARQPGERH

SEQ ID NO: 19438 - protein, 114 aa, Zea mays subsp. mays
  peptide (1)..(114): Ceres Seq. ID no. 2076400
MQVRGPAGLGFLGPSKAAGLPRPLALARRTSSPVAVGARPRFIQHKKEAFWFYRFLSIVYDHVINPGHWTEDMRDDALEPADLFSRHLTVVDVGGGTGFTTLGIVKHVNPENVT

SEQ ID NO: 19439 - DNA, 893 bp, Zea mays subsp. mays
  misc_feature (1)..(893): Ceres Seq. ID no. 12340397
  misc_feature (1)..(893): Ortholog of  Ceres SEQ ID NO 14302343 as cited in SEQ ID NO 67343
caggctccattacccagattcctattctaacaatgcctaacgatgatatcacacacccaactcctgaccttactggatacattactgagggacagatatacattgataggcagctccataacagacagatttatccacctattaatgtcctgccatctctttcacgattgatgaagagtgctattggtgagggcatgacacgtcgagaccattcggatgtatctaatcagctttatgccaactatgctattggaaaggatgttcaggccatgaaggctgtcgttggagaggaggcactctcgtctgaggatctgctttacttagagttccttgacaagtttgagaggaagtttgtgacacaaggagcatatgacacacggaacatcttccagtcactcgatcttgcatggacattgcttcggatcttccctcgcgaacttctccaccgtattccagcaaagaccttggaccagtactatagcagagatgcttcccactgaatcactgatcgttgatcagtgttccaatattttggcaagtgcagctttgaataaattgaacagattggcctcgtggccattttcccgtatttatcngtagtcaggtccaattcttttctgttggtgagcgcaagttattcatagatgactcggtcatgggaatatttgtaatattatgtcatgtatcgttaaatttcagttgttttgtttcagctgccagaactgttagcaagagtattctggagctggaagctcgaacgcaactggttgtatctatatccgtgaatgccgaataaaggaggggcaataaactgcagcgaaatatgtgctgtcagacattgttgaacattttctcgattttgctgttttgagatgtgagaaatcttttcactg

SEQ ID NO: 19440 - protein, 165 aa, Zea mays subsp. mays
  peptide (1)..(165): Ceres Seq. ID no. 12340398
GSITQIPILTMPNDDITHPTPDLTGYITEGQIYIDRQLHNRQIYPPINVLPSLSRLMKSAIGEGMTRRDHSDVSNQLYANYAIGKDVQAMKAVVGEEALSSEDLLYLEFLDKFERKFVTQGAYDTRNIFQSLDLAWTLLRIFPRELLHRIPAKTLDQYYSRDASH

SEQ ID NO: 19441 - protein, 155 aa, Zea mays subsp. mays
  peptide (1)..(155): Ceres Seq. ID no. 12340399
MPNDDITHPTPDLTGYITEGQIYIDRQLHNRQIYPPINVLPSLSRLMKSAIGEGMTRRDHSDVSNQLYANYAIGKDVQAMKAVVGEEALSSEDLLYLEFLDKFERKFVTQGAYDTRNIFQSLDLAWTLLRIFPRELLHRIPAKTLDQYYSRDASH

SEQ ID NO: 19442 - protein, 109 aa, Zea mays subsp. mays
  peptide (1)..(109): Ceres Seq. ID no. 12340400
MKSAIGEGMTRRDHSDVSNQLYANYAIGKDVQAMKAVVGEEALSSEDLLYLEFLDKFERKFVTQGAYDTRNIFQSLDLAWTLLRIFPRELLHRIPAKTLDQYYSRDASH

SEQ ID NO: 19443 - DNA, 478 bp, Zea mays subsp. mays
  misc_feature (1)..(478): Ceres Seq. ID no. 5761763
  misc_feature (1)..(478): Ortholog of  Ceres SEQ ID NO 12635696 as cited in SEQ ID NO 0
gccgattagcaccagtctgatgataaacctgcttcgcgcttctgtatgtcatgtgcagggggtactaccgctgcagcagctccaaggggtgcccagcgaggaagcaggtggagcgcagccacgcggaccccaccgcgctgctcgtcacctacaccttcgagcacaatcacgaggcgccgcagcccaagagcagcggcggcagctgctgccaccagcaaggcaagccgtccgcgcggccgccggaggagtgggagcgggagctgcagggggaggacgccctgttcgcggggctcggcgagctgcccgagtgcgccgtcgtcttcggccgccgccgcgagctcagcctggccgccaccgcgccgtgctcctgatggtccttcgactctttttacgtntgtnttyatntttttttcttttccttttgggccctctttaagttttacacggaacgatttggaggcactggtacatagctctg

SEQ ID NO: 19444 - protein, 144 aa, Zea mays subsp. mays
  peptide (1)..(144): Ceres Seq. ID no. 5761764
  misc_feature (132)..(132): Xaa is any aa, unknown or other
  misc_feature (133)..(133): Xaa is any aa, unknown or other
  misc_feature (134)..(134): Xaa is any aa, unknown or other
  misc_feature (135)..(135): Xaa is any aa, unknown or other
PISTSLMINLLRASVCHVQGVLPLQQLQGVPSEEAGGAQPRGPHRAARHLHLRAQSRGAAAQEQRRQLLPPARQAVRAAAGGVGAGAAGGGRPVRGARRAARVRRRLRPPPRAQPGRHRAVLLMVLRLFLRXXXXFFLFLLGPL

SEQ ID NO: 19445 - protein, 144 aa, Zea mays subsp. mays
  peptide (1)..(144): Ceres Seq. ID no. 5761765
  misc_feature (117)..(117): Xaa is any aa, unknown or other
  misc_feature (118)..(118): Xaa is any aa, unknown or other
  misc_feature (119)..(119): Xaa is any aa, unknown or other
  misc_feature (120)..(120): Xaa is any aa, unknown or other
MSCAGGTTAAAAPRGAQRGSRWSAATRTPPRCSSPTPSSTITRRRSPRAAAAAAATSKASRPRGRRRSGSGSCRGRTPCSRGSASCPSAPSSSAAAASSAWPPPRRAPDGPSTLFTXXXXFFSFPFGPSLSFTRNDLEALVHSS

SEQ ID NO: 19446 - protein, 138 aa, Zea mays subsp. mays
  peptide (1)..(138): Ceres Seq. ID no. 5761766
  misc_feature (126)..(126): Xaa is any aa, unknown or other
  misc_feature (127)..(127): Xaa is any aa, unknown or other
  misc_feature (128)..(128): Xaa is any aa, unknown or other
  misc_feature (129)..(129): Xaa is any aa, unknown or other
MINLLRASVCHVQGVLPLQQLQGVPSEEAGGAQPRGPHRAARHLHLRAQSRGAAAQEQRRQLLPPARQAVRAAAGGVGAGAAGGGRPVRGARRAARVRRRLRPPPRAQPGRHRAVLLMVLRLFLRXXXXFFLFLLGPL

SEQ ID NO: 19447 - protein, 106 aa, Zea mays subsp. mays
  peptide (1)..(106): Ceres Seq. ID no. 5761767
MCRGYYRCSSSKGCPARKQVERSHADPTALLVTYTFEHNHEAPQPKSSGGSCCHQQGKPSARPPEEWERELQGEDALFAGLGELPECAVVFGRRRELSLAATAPCS

SEQ ID NO: 19448 - DNA, 708 bp, Zea mays subsp. mays
  misc_feature (1)..(708): Ceres Seq. ID no. 12462432
  misc_feature (1)..(708): Ortholog of  Ceres SEQ ID NO 13583505 as cited in SEQ ID NO 62240
agcccagtactccttgctccacgccgccgctcaaaaccggcagaagtaagaacggggagggaagcacgccccaaacgttccgaggtttcgcctctcggagcgcaccaacgccacccggagcgactcgccaccggcgcggagaaggagggcggaggctaggcgatggcggacgagaattaggctgggaagaaagaggaagaggaatttagcacaggccctctgtcagtactaatgatgagtgttaagaacaacacccaggttctcatcaattgccgcaacaacaagaagctgcttggccgggttcgtgcttttgatcgccactgtaacatggtgctcgagaacgtgcgggagatgtggacagaggtccccaagactggcaagggcaaaaagaaggctctgcctgtgaacaaggatagattcatcagcaagatgttcctcaggggcgactcggtcatcatcgtgctgaggaaccccaagtgatcgcccaaccggaagccaggtctctgttgaaaactgtagcttatgatgtatgttggggatgattaactggttatcttgaactgacgttcatgtggcatcgcaatggcacatgaacatacggcgttccatgagtttgttaaccggagtatgaacctaccacctgcggtatttgatccctgaatgttgagtttgcacttctgcttattattgccttgccccaccgtgttc

SEQ ID NO: 19449 - protein, 82 aa, Zea mays subsp. mays; identical to SEQ ID NO: 12477
  peptide (1)..(82): Ceres Seq. ID no. 12462433

SEQ ID NO: 19450 - protein, 81 aa, Zea mays subsp. mays; identical to SEQ ID NO: 12478
  peptide (1)..(81): Ceres Seq. ID no. 12462434

SEQ ID NO: 19451 - protein, 68 aa, Zea mays subsp. mays
  peptide (1)..(68): Ceres Seq. ID no. 12462435
PSTPCSTPPLKTGRSKNGEGSTPQTFRGFASRSAPTPPGATRHRRGEGGRRLGDGGRELGWEERGRGI

SEQ ID NO: 19452 - DNA, 947 bp, Zea mays subsp. mays
  misc_feature (1)..(947): Ceres Seq. ID no. 14305114
  misc_feature (1)..(947): Ortholog of  Ceres SEQ ID NO 14301396 as cited in SEQ ID NO 51789
  misc_feature (1)..(947): Ortholog of  Ceres SEQ ID NO 12610031 as cited in SEQ ID NO 55811
  misc_feature (1)..(947): Ortholog of  Ceres SEQ ID NO 12619664 as cited in SEQ ID NO 66048
atcacccctcgttgtcatctcatatcctgagccagagatcaaagaaaccagagggagcgaggcatggcagcaggcttgcaggtgtttggccagccggcgtctactgatgtctccagggttctgacatgcctgtttgagaagaaactggagttcgatcttgtccgcatcgatacgttcaagacgcatcacaagcttcccgagttcatcaggcttcgggatcctaatgggcaagtgaccttgaagcacggcgacaaaactctcgttgattcgagggacatctgccggtacgtctgcacccagtttccaaacgatggaaacaagagcctttacggatccggcgctctagaacgggcgtcgatagaacagtggcttcaggcggaggctcagaacttcgggccccccagctccgcgctcgtcttccagctggcgttcgtccctcacctcactcacctgggcgttcgtcaggaccctgccgtgatcgccgagaacgaggataagctgaagcaggtccttgatgtctacgacgagatactctcgaggaacgagtacctggctggcgacgagttcaccctggccgacctctcccacctcccgaactcgcactacatcgtgaacaccgagagaggaaggaagctcttcactaacaagaagaacgtggccaagtggtacgagaagctctcgaagcgcgagacgtggaagcaggtcgctaagatgcagaaggaacatcctggtgcgttcgagtgattgcttgtcttggggggagctgcgagtgcaccatcatgaatggcttcatcgtctgtgtcggtctggctctacagttcattttgttttgagtgatccattgtttaattcctcctatcagtgttgtcgtgtgcaccaaaaataatgtgaagcccagctgtgatgtatatgatccttttgctctaatctatcatgacgtataagct

SEQ ID NO: 19453 - protein, 226 aa, Zea mays subsp. mays; identical to SEQ ID NO: 12318
  peptide (1)..(226): Ceres Seq. ID no. 14305115

SEQ ID NO: 19454 - DNA, 1175 bp, Zea mays subsp. mays
  misc_feature (1)..(1175): Ceres Seq. ID no. 12359182
  misc_feature (1)..(1175): Ortholog of  Ceres SEQ ID NO 14313897 as cited in SEQ ID NO 59695
  misc_feature (1)..(1175): Ortholog of  Ceres SEQ ID NO 13660049 as cited in SEQ ID NO 67010
ctattgatttgtgctttactccatttatcatcatttagttttgcatacatgttgagactgtgcacttgtcaaactacatgattgatattaataaagcttgggcggctaaactatgcctggatgttgggtgggggcagggatgcattttctgggggttgttattatttgtttgaaatctgattcaggtcccacattcaaccgggccttatgtgattagttgtaagctgacatgaagatgatgcttttgtaggttcatcctcccagcttcgttaattgctatcaatgatgttgctgcatatttctttgggttcttctttgggaaaacaccactgatcaagctctctccaaagaaaacatgggaaggctttataggtgcatcagtgacaacattgctttctgcatttgtggttgctaatttcatgggccatttccagtggttaacatgcccaagaaaggatctatcaactggatggctttattgtgacccaggtcccatgtttacaccagaaggttatgatctaccgggatggataccacaatggtttccatggcgagaaattgcaattatgcccgttcaatggcatgcattagctcttggcttgtttgcttcaataatagcaccatttggtggcttttttgcaagtggattcaagagggcattcaaatttaaggattttggggacagcatacctggtcatggtggatttacagataggatggactgccaaatggtcatggctgtttttgcgtacatctattaccaatcatttgtaatggtacaggacttatctgttgagacaatcctggagcagatactacgtaatctcacctttgaggagcagcgtgagctatatggacagctaggcaagttacttgtgagagcgaactgaagctaacagtggccgtggaagcacctaatccaaaaggataatgcgcaatgctttttcaggccttgcttttttgttaatcttcttgtacagccctagcacccctaaggatgaaacgaagaaccacaacgctgacagggatcgcatcgctgtatgacgttttggagcatacagctcctcccgtctttttcagagatttgtgtcacctttttgatttgcttctggtgctacgcttgttgccgcatcaaaaccagctaacgctgttttgtcgtgtcaatggtttatttg

SEQ ID NO: 19455 - protein, 156 aa, Zea mays subsp. mays
  peptide (1)..(156): Ceres Seq. ID no. 12359183
MGHFQWLTCPRKDLSTGWLYCDPGPMFTPEGYDLPGWIPQWFPWREIAIMPVQWHALALGLFASIIAPFGGFFASGFKRAFKFKDFGDSIPGHGGFTDRMDCQMVMAVFAYIYYQSFVMVQDLSVETILEQILRNLTFEEQRELYGQLGKLLVRAN

SEQ ID NO: 19456 - protein, 131 aa, Zea mays subsp. mays
  peptide (1)..(131): Ceres Seq. ID no. 12359184
MFTPEGYDLPGWIPQWFPWREIAIMPVQWHALALGLFASIIAPFGGFFASGFKRAFKFKDFGDSIPGHGGFTDRMDCQMVMAVFAYIYYQSFVMVQDLSVETILEQILRNLTFEEQRELYGQLGKLLVRAN

SEQ ID NO: 19457 - protein, 107 aa, Zea mays subsp. mays
  peptide (1)..(107): Ceres Seq. ID no. 12359185
MPVQWHALALGLFASIIAPFGGFFASGFKRAFKFKDFGDSIPGHGGFTDRMDCQMVMAVFAYIYYQSFVMVQDLSVETILEQILRNLTFEEQRELYGQLGKLLVRAN

SEQ ID NO: 19458 - DNA, 1205 bp, Zea mays subsp. mays
  misc_feature (1)..(1205): Ceres Seq. ID no. 12364538
  misc_feature (1)..(1205): Ortholog of  Ceres SEQ ID NO 15226954 as cited in SEQ ID NO 53050
gcacgagaccattacctagaacatcctaatcgaaaaataagccgcgcccgcctccgcacgccccgctccgatggcagccgcggctgtgaccctgccctcctcgggcacgcccttcgccgtcgccacaaccgcctcttcctcatccgcccgccgctgcctgctcctgccctccgcggctccccgccgagctctccgcgtcgtggcctccgccgctaccgaggcgccgcccaagcccacgcagccgccgacatcgccctccggcatcgtgctcgtcgacccatccgaagcccagaaggtgcaccggctcaaggccgtctacgaccagaaggtcgtcccgctcatcaccgaggagttcggctacaccaatgtccaccaggttcccaagctcgagaagattgtggtgaactgcggtctgggcgcggaggcagggaactcgaaggggctggatgccgccatgaaggacctggccatgatcaccgggcagtggcccgtcaagaccaaggccaggaagtccgtggccagcttcaagatccgtgagggaaacaccatcggtatcgcagtcaccctccgcggcaggataatgtacaacttcctggataggctcatcaaccttgggctccctaggaccatggacttcctgggtgtcaaccccaacagcttcgacgggcacggcaactacagccttggcctccgtgaccagggcgtgttcccggagatcccgtacgaggtgggcgggaagaagaacggcatggacgtgtccatcgtcaccagcgccaagacggacaacgaggcgttcaggctgctggtcctcctcggcatgccattctcggagaacatcaagaccgacgtggtgatccggaagaagaggttgaaccgccaccacttcctgagcaagggcaaggggaagggaggacgacggtgaggagaggaaccagccagccagccagcccatggttgcacacgctctgttcagcttgttttaattccgatctttttgcagaatttggcttacaaattcgatgctgttgttgtctgtcaattatgtaacttgtgcacctatgaaaaaggtttgcaatgatcatgtccgttttgctgatttcttcttgatgcataatttgtagtcacaagttataccactgccagacattgtaatcggaggaagcagtaatgtgagacggacactgtaatgcaaacgtatttcagct

SEQ ID NO: 19459 - protein, 283 aa, Zea mays subsp. mays
  peptide (1)..(283): Ceres Seq. ID no. 12364539
MAAAAVTLPSSGTPFAVATTASSSSARRCLLLPSAAPRRALRVVASAATEAPPKPTQPPTSPSGIVLVDPSEAQKVHRLKAVYDQKVVPLITEEFGYTNVHQVPKLEKIVVNCGLGAEAGNSKGLDAAMKDLAMITGQWPVKTKARKSVASFKIREGNTIGIAVTLRGRIMYNFLDRLINLGLPRTMDFLGVNPNSFDGHGNYSLGLRDQGVFPEIPYEVGGKKNGMDVSIVTSAKTDNEAFRLLVLLGMPFSENIKTDVVIRKKRLNRHHFLSKGKGKGGRR

SEQ ID NO: 19460 - protein, 178 aa, Zea mays subsp. mays
  peptide (1)..(178): Ceres Seq. ID no. 12364540
ARDHYLEHPNRKISRARLRTPRSDGSRGCDPALLGHALRRRHNRLFLIRPPLPAPALRGSPPSSPRRGLRRYRGAAQAHAAADIALRHRARRPIRSPEGAPAQGRLRPEGRPAHHRGVRLHQCPPGSQAREDCGELRSGRGGRELEGAGCRHEGPGHDHRAVARQDQGQEVRGQLQDP

SEQ ID NO: 19461 - protein, 155 aa, Zea mays subsp. mays
  peptide (1)..(155): Ceres Seq. ID no. 12364541
MKDLAMITGQWPVKTKARKSVASFKIREGNTIGIAVTLRGRIMYNFLDRLINLGLPRTMDFLGVNPNSFDGHGNYSLGLRDQGVFPEIPYEVGGKKNGMDVSIVTSAKTDNEAFRLLVLLGMPFSENIKTDVVIRKKRLNRHHFLSKGKGKGGRR

SEQ ID NO: 19462 - DNA, 1098 bp, Zea mays subsp. mays
  misc_feature (1)..(1098): Ceres Seq. ID no. 13494528
  misc_feature (1)..(1098): Ortholog of  Ceres SEQ ID NO 12465955 as cited in SEQ ID NO 147
gcacgtttctctgcgactcgcacggcccgcgcccaccaccgaccaccccacctggttcggtcggcactcggcaccccgccccgcatacatgccgccgcccagcctcaccgtggcgcgcgacccggccgccgccgccaccacgcggcaccgcaaggtccacccgacgccgggcggaggcgcagggacgacgaaggagatgggcgcggcggaggggtgggcgcggcccgagtggtgctcggcggcgggcgccgcggccgtgctgcggcggcacccggcgcccgcgctcttcgggtgcggcctcctgctcttcatggccgtcgagtacaccatccccatggtcaggccggacgcgccgccgctcgacctgggcttcgtcgccaccaggggcttgcacgccgccgtcgccgcgaggccctggctcaactcgctcctcgccgcgctcaacacggtcttcgtcgcgatgcaggcggcgtacatcctgtgggccatcctcggcgagcagcggccgcgcgccgccgtcgccacgctcatgatgttcacctgccggggcgcgctgggctgcgccacccagctcccgctgccggaggagttcctggggtccgggatggacttccccgtgggcaacgtctccttcttcctcttcttctcgggccacgtcgcgggcgcggtcatcgcggccgccgacatgcgccgcgagggccggctggcgctggcgcgcctntacgacgcgctcaacgcgctccagggggtcaggctgctggcgtgcaggggacactacaccatcgacctggccgtcggtgtcggagcggggatcctcttcgatacgctctccggatggtacttccacgccaagaacgcaccggagaagcactgccgcagctgccagtgccacaaggctctcctttcacgctagctcataggtgtggtgtgtttggtaagttactgtagcggtgctgttttgtaagaaatggttttgattgccagtcgttgtgatagttttcatcgcgggtttataatacgaatcgactgagaactattttcgccaacgattcgatatactaaccgttgtgaaaaatatgttataggtgtatttatcct

SEQ ID NO: 19463 - protein, 315 aa, Zea mays subsp. mays
  peptide (1)..(315): Ceres Seq. ID no. 13494529
  misc_feature (241)..(241): Xaa is any aa, unknown or other
ARFSATRTARAHHRPPHLVRSALGTPPRIHAAAQPHRGARPGRRRHHAAPQGPPDAGRRRRDDEGDGRGGGVGAARVVLGGGRRGRAAAAPGARALRVRPPALHGRRVHHPHGQAGRAAARPGLRRHQGLARRRRREALAQLAPRRAQHGLRRDAGGVHPVGHPRRAAAARRRRHAHDVHLPGRAGLRHPAPAAGGVPGVRDGLPRGQRLLLPLLLGPRRGRGHRGRRHAPRGPAGAGAPXRRAQRAPGGQAAGVQGTLHHRPGRRCRSGDPLRYALRMVLPRQERTGEALPQLPVPQGSPFTLAHRCGVFGKLL

SEQ ID NO: 19464 - protein, 303 aa, Zea mays subsp. mays
  peptide (1)..(303): Ceres Seq. ID no. 13494530
  misc_feature (240)..(240): Xaa is any aa, unknown or other
HVSLRLARPAPTTDHPTWFGRHSAPRPAYMPPPSLTVARDPAAAATTRHRKVHPTPGGGAGTTKEMGAAEGWARPEWCSAAGAAAVLRRHPAPALFGCGLLLFMAVEYTIPMVRPDAPPLDLGFVATRGLHAAVAARPWLNSLLAALNTVFVAMQAAYILWAILGEQRPRAAVATLMMFTCRGALGCATQLPLPEEFLGSGMDFPVGNVSFFLFFSGHVAGAVIAAADMRREGRLALARXYDALNALQGVRLLACRGHYTIDLAVGVGAGILFDTLSGWYFHAKNAPEKHCRSCQCHKALLSR

SEQ ID NO: 19465 - protein, 274 aa, Zea mays subsp. mays
  peptide (1)..(274): Ceres Seq. ID no. 13494531
  misc_feature (211)..(211): Xaa is any aa, unknown or other
MPPPSLTVARDPAAAATTRHRKVHPTPGGGAGTTKEMGAAEGWARPEWCSAAGAAAVLRRHPAPALFGCGLLLFMAVEYTIPMVRPDAPPLDLGFVATRGLHAAVAARPWLNSLLAALNTVFVAMQAAYILWAILGEQRPRAAVATLMMFTCRGALGCATQLPLPEEFLGSGMDFPVGNVSFFLFFSGHVAGAVIAAADMRREGRLALARXYDALNALQGVRLLACRGHYTIDLAVGVGAGILFDTLSGWYFHAKNAPEKHCRSCQCHKALLSR

SEQ ID NO: 19466 - DNA, 1158 bp, Zea mays subsp. mays
  misc_feature (1)..(1158): Ceres Seq. ID no. 12359329
  misc_feature (1)..(1158): Ortholog of  Ceres SEQ ID NO 15178317 as cited in SEQ ID NO 52489
  misc_feature (1)..(1158): Ortholog of  Ceres SEQ ID NO 14314415 as cited in SEQ ID NO 57442
cctccaaaccaaggcggccaagccccttccatttgccaggcggccacaccatctgatccccaattcgtttccacctatcgagctaaggtgcgacgacggcggtcgcagcgtcccctccctccctccgtaccgctgccgccggtctaccaaacggtgaaatatttacgtaagcgaatcagggtcttgaagatagcttccagatatgtggggttttgcatcaaatgcttgggcatccgggctggggaagaggagtcccccaaattgcacctcttcgagtgctgcttgttccgatgacgaagcatcctcgtgcacgagcagggaagaaggcctggaatgcccaatatgttgggagtctttcaatatagtggagaatgtgccttacgtgctatggtgcggccacaccctttgcaagaactgcgtcctaggacttcaatgggccgtcatcaaagttccaactgtgccgatgcagctacccttcttcgtttgctgtccctggtgcaacctcctgtcgcttcgcatactttacaaagggaacctcacgttcccacggaagaattatttcctcctctggatggttgaggggatgaatggtgagcgggccagatcacgcccagctactcacagcgagcaacatactccatggctctcaagcagcagcagagcaaatggaaatgcaggctgttcaaatcccacaagacgccaccttccgctgccaccgccggttgacactacttcgcccaccaatgcaaatcatgccaaccatggggtccctgtccctctgctgaacgcagagagagtacaagcttcgctgcgcaagtccttgtcgttcctggttcacctgaccgccaagtttcccctggtgttcatcttcctcctcatagtgctctatgcgatccctgccagcgcagcagtcttgctactgtacatccttatcacggtgctgttcgcgctcccctcgttcctgatactgtatttcgcgtatccgagcctggactggcttgttagggaaatctttgcctgagatttccttgttcggtaaaatctcaatactgttgttgagtccttgtataactgaaccttccctagatcttgttgcaagcgtggatgctattgcaaagttttggtttttacaccatgagatgtgtttacctcaagtcc

SEQ ID NO: 19467 - protein, 272 aa, Zea mays subsp. mays
  peptide (1)..(272): Ceres Seq. ID no. 12359330
MWGFASNAWASGLGKRSPPNCTSSSAACSDDEASSCTSREEGLECPICWESFNIVENVPYVLWCGHTLCKNCVLGLQWAVIKVPTVPMQLPFFVCCPWCNLLSLRILYKGNLTFPRKNYFLLWMVEGMNGERARSRPATHSEQHTPWLSSSSRANGNAGCSNPTRRHLPLPPPVDTTSPTNANHANHGVPVPLLNAERVQASLRKSLSFLVHLTAKFPLVFIFLLIVLYAIPASAAVLLLYILITVLFALPSFLILYFAYPSLDWLVREIFA

SEQ ID NO: 19468 - protein, 185 aa, Zea mays subsp. mays
  peptide (1)..(185): Ceres Seq. ID no. 12359331
MQLPFFVCCPWCNLLSLRILYKGNLTFPRKNYFLLWMVEGMNGERARSRPATHSEQHTPWLSSSSRANGNAGCSNPTRRHLPLPPPVDTTSPTNANHANHGVPVPLLNAERVQASLRKSLSFLVHLTAKFPLVFIFLLIVLYAIPASAAVLLLYILITVLFALPSFLILYFAYPSLDWLVREIFA

SEQ ID NO: 19469 - protein, 149 aa, Zea mays subsp. mays
  peptide (1)..(149): Ceres Seq. ID no. 12359332
MVEGMNGERARSRPATHSEQHTPWLSSSSRANGNAGCSNPTRRHLPLPPPVDTTSPTNANHANHGVPVPLLNAERVQASLRKSLSFLVHLTAKFPLVFIFLLIVLYAIPASAAVLLLYILITVLFALPSFLILYFAYPSLDWLVREIFA

SEQ ID NO: 19470 - DNA, 3065 bp, Zea mays subsp. mays
  misc_feature (1)..(3065): Ceres Seq. ID no. 12375814
  misc_feature (1)..(3065): Ortholog of  Ceres SEQ ID NO 13593889 as cited in SEQ ID NO 53305
gcacgagaccattacctagaacatcctaaatcgaaaatcccaacatcgcccgctctctcctcgctgttctccgctgtcatctcccccggagaagcgtggctcctgtagccggcctcctacctgcccctcctccgcgcgccgagcaccagacgacgcgacacggccgagcacggtcgctgcttccgcggcggcgccgctccactctcgtgctgcagctagcggaacagagatccgtggggacatgaacagggtttctcctctctgttggtatgaactaaattgatcgatggtcctattgaatatagagctactattatatggcatattctgtcatgcaaatgatggtggttgtaagttgtgattgaggaactccattgtttgagaaatggatgaaacaccaactagttctgggcaatctgaagatagttcatgtgaacctaattggtggccaccagacttattagagaagatagagtctgcttccatatcaaggaaacatgatgttttgggtaatctaaggtcctcatcctggaaggcatcacaattactgtggtcaacaggatcttattcagggttaatccctaatggtttctattcaatcatcccggataaaaagttgaaggagactttcccaacaattccatcggtagatgacctgcaaactcttgaagcagatgggcttaaggctgacataattattgtagacactgagagggataagaaggttttcatgttgaagcagcttagtgctgcacttgtgaaagggttaagctctagcccagcattagtgataaagaaaatagcaggtttggtttttgactgcttcaagcgacaaaatcctgacgccagtccagcaaaaggctcgattgaagatactcatttctttggatataaaggaccacaacttctagggcagataagacatggatcatgccgacctcgagctattctatttaaagttcttgcagatgctgttggccttgagagtaaacttgtagttggtctacctgatgacggtgccgttggatttgtggactcctacaaacatatgtctgtggtagtttcgctaaactctatggaactgctagtggatcttatgcgatttccaggccagttgattccattttcagctaaggctatctttatatcgcatatatctgctgcgggtgaaagtgactcagctgaaaatgactcctgtgattctccccttgagcccaacagccctctgtatggattgtctgataaagttgaaactgaaggaattgaatcttcatcaaatctatctggacgatcactgcgtaatatgatgttgagatcaaggacattttctgaggggaaattaagcacgtcatgtagtgaaccgaatatagcgaatgccttttggaggcacagtcaaaggagaggagttgccgaggaaccccgtggtgctagttccagtcctgagcatccattaatgagagcaaggggaagatctatacttggtggtgagaagcaatcatttcaagaatacacagaatctggagctgcttcaagatcagatggtcttgggggcacttcaacctctaatgctcgaagaataaggcgtagaagcattagcatcacccctgagattggagatgacattgtgagggcagttcgggctatgaacgaaacactaaagcaaaatcgctttcaaagggatcatgtcgaaggttcatgctcatatgttacggaagaccaaagcaacgccaatgactgcccaaataaagatgatgcatctcggataattggtgctactgacagtgactcaagaaaccgaactggtcctactcaaaaggccatgtcattgccttcttcgcctcatgaatataggggtcaagatacccaaaaaggtgatgattttataagtaaagagaagatggcattggcatggaacaaagttttccagagctccccatttcttaacaagcccttgctgccgtttgaggaatggaacatagatttctctgagataacaattggcacgcgggttggaataggattcttcggagaagttttccgtggtatatggaatggaaccgatgttgccatcaaagtatttctagaacaggacttgacaactgaaaacatggaagatttttgcaacgagatatacatcctgagccggttgcgacatccaaacgttatattgtttcttggtgcatgcattacacctccacacttgtcaatggttactgaatatatggaaatgggatcactgtattatctcatccatatgagtggtcagaaaaagaaacttagttggcgtaggaggttgaaaattattcgtgatatatgcagggggttgatgtgcatacaccgcatgaagatagttcacagggatctcaaaagtgcaaactgcctggtgaacaaacattggactgttaagatatgtgactttggtctatctcgagtgatgattgatagtcctatgactgataattcctctgctggcaccccggaatggatggcccctgagcttatacggaatgaaccttttacagagaaatgtgatatattcagccttggtgttatcatgtgggagctgtgcacattgagtcgcccatgggaaggcatctccccagttcaagtggtgtacgcagttgctaatgaaggttcgcggcttgagattcctgaaggacctctcggcaggttgattgcagattgctgggcagagcctgagaatcggccgagctgccaggagatcctaacccgtttgctggactgcgaatacactgtcagctgaaatggaagctgctcgctcgtccactcaattcctgcacaggtggaaacatttcttgtataaaacctgtaaaaaaggctgccgattctgcggacttgaggtcacatatcgaagcgctgtgtttttttttaaacaatggcgaccctttctcaaaaaaaatgtaaaaatgattccctggttatagaagaacatgtctgattcgatagacgtgccttgcatcgcagggcaagctggttgttgtaccttattctagataagtagcacgcccgcgaatgctgttcggctttcaaatagctgcagctcc

SEQ ID NO: 19471 - protein, 792 aa, Zea mays subsp. mays
  peptide (1)..(792): Ceres Seq. ID no. 12375815
MDETPTSSGQSEDSSCEPNWWPPDLLEKIESASISRKHDVLGNLRSSSWKASQLLWSTGSYSGLIPNGFYSIIPDKKLKETFPTIPSVDDLQTLEADGLKADIIIVDTERDKKVFMLKQLSAALVKGLSSSPALVIKKIAGLVFDCFKRQNPDASPAKGSIEDTHFFGYKGPQLLGQIRHGSCRPRAILFKVLADAVGLESKLVVGLPDDGAVGFVDSYKHMSVVVSLNSMELLVDLMRFPGQLIPFSAKAIFISHISAAGESDSAENDSCDSPLEPNSPLYGLSDKVETEGIESSSNLSGRSLRNMMLRSRTFSEGKLSTSCSEPNIANAFWRHSQRRGVAEEPRGASSSPEHPLMRARGRSILGGEKQSFQEYTESGAASRSDGLGGTSTSNARRIRRRSISITPEIGDDIVRAVRAMNETLKQNRFQRDHVEGSCSYVTEDQSNANDCPNKDDASRIIGATDSDSRNRTGPTQKAMSLPSSPHEYRGQDTQKGDDFISKEKMALAWNKVFQSSPFLNKPLLPFEEWNIDFSEITIGTRVGIGFFGEVFRGIWNGTDVAIKVFLEQDLTTENMEDFCNEIYILSRLRHPNVILFLGACITPPHLSMVTEYMEMGSLYYLIHMSGQKKKLSWRRRLKIIRDICRGLMCIHRMKIVHRDLKSANCLVNKHWTVKICDFGLSRVMIDSPMTDNSSAGTPEWMAPELIRNEPFTEKCDIFSLGVIMWELCTLSRPWEGISPVQVVYAVANEGSRLEIPEGPLGRLIADCWAEPENRPSCQEILTRLLDCEYTVS

SEQ ID NO: 19472 - protein, 677 aa, Zea mays subsp. mays
  peptide (1)..(677): Ceres Seq. ID no. 12375816
MLKQLSAALVKGLSSSPALVIKKIAGLVFDCFKRQNPDASPAKGSIEDTHFFGYKGPQLLGQIRHGSCRPRAILFKVLADAVGLESKLVVGLPDDGAVGFVDSYKHMSVVVSLNSMELLVDLMRFPGQLIPFSAKAIFISHISAAGESDSAENDSCDSPLEPNSPLYGLSDKVETEGIESSSNLSGRSLRNMMLRSRTFSEGKLSTSCSEPNIANAFWRHSQRRGVAEEPRGASSSPEHPLMRARGRSILGGEKQSFQEYTESGAASRSDGLGGTSTSNARRIRRRSISITPEIGDDIVRAVRAMNETLKQNRFQRDHVEGSCSYVTEDQSNANDCPNKDDASRIIGATDSDSRNRTGPTQKAMSLPSSPHEYRGQDTQKGDDFISKEKMALAWNKVFQSSPFLNKPLLPFEEWNIDFSEITIGTRVGIGFFGEVFRGIWNGTDVAIKVFLEQDLTTENMEDFCNEIYILSRLRHPNVILFLGACITPPHLSMVTEYMEMGSLYYLIHMSGQKKKLSWRRRLKIIRDICRGLMCIHRMKIVHRDLKSANCLVNKHWTVKICDFGLSRVMIDSPMTDNSSAGTPEWMAPELIRNEPFTEKCDIFSLGVIMWELCTLSRPWEGISPVQVVYAVANEGSRLEIPEGPLGRLIADCWAEPENRPSCQEILTRLLDCEYTVS

SEQ ID NO: 19473 - protein, 571 aa, Zea mays subsp. mays
  peptide (1)..(571): Ceres Seq. ID no. 12375817
MSVVVSLNSMELLVDLMRFPGQLIPFSAKAIFISHISAAGESDSAENDSCDSPLEPNSPLYGLSDKVETEGIESSSNLSGRSLRNMMLRSRTFSEGKLSTSCSEPNIANAFWRHSQRRGVAEEPRGASSSPEHPLMRARGRSILGGEKQSFQEYTESGAASRSDGLGGTSTSNARRIRRRSISITPEIGDDIVRAVRAMNETLKQNRFQRDHVEGSCSYVTEDQSNANDCPNKDDASRIIGATDSDSRNRTGPTQKAMSLPSSPHEYRGQDTQKGDDFISKEKMALAWNKVFQSSPFLNKPLLPFEEWNIDFSEITIGTRVGIGFFGEVFRGIWNGTDVAIKVFLEQDLTTENMEDFCNEIYILSRLRHPNVILFLGACITPPHLSMVTEYMEMGSLYYLIHMSGQKKKLSWRRRLKIIRDICRGLMCIHRMKIVHRDLKSANCLVNKHWTVKICDFGLSRVMIDSPMTDNSSAGTPEWMAPELIRNEPFTEKCDIFSLGVIMWELCTLSRPWEGISPVQVVYAVANEGSRLEIPEGPLGRLIADCWAEPENRPSCQEILTRLLDCEYTVS

SEQ ID NO: 19474 - DNA, 842 bp, Zea mays subsp. mays
  misc_feature (1)..(842): Ceres Seq. ID no. 12358082
  misc_feature (1)..(842): Ortholog of  Ceres SEQ ID NO 14302451 as cited in SEQ ID NO 66180
aacatcatcagctcgcgttgcgtgctcggcccgcctaatcctctttctttagctcaagaccggcgactaaatttggcgccagccggcagcagggggtataagtagtcgccgccgccgtcttcctcgcacctccccgctccgctctcccttgtcgagttctcagcaccggccgatccatcctcctccgcctccctcggttcggcctctggcctgcacaccatgaactctcgcttccggagcctctggagagccatggctggggcggcgagcagcggcaaggacacggtgcgcctgcggctgcacctgctcccggaccgccacgacgactgcgtgctcgtgtcggaggcgcccctgagcagcgacaagggcggggagttcttcatcgacatggacaggcaggcgccctccgccacggcggcggagcactgcgcggcgagcctgggcgccgcgtgcgccggcggcggcttcgtcatgagctgcagggtggagggggaggcgaggagcagcaggccgttcgtgcagcttgccatgcggcatgtcacgtgcatggaggacgccgccatgttcgtcgcgctcgccgcggccgtcgacctcagcgtcaaggcgtgccgcccgttccgcaggaaaccgaacaagaaggccgcctngccgtcgcccgaccacctcgagctcgacacctaggaacgcagaacaggaaggccccgccgactagcacccatggccgcccatggatccatctaactcgacctgtaaattcacttaatttcaagagctggactgaatcgtttgccacaatcaaaactctgttgtttgactggcctcagcagttagtacatgtttgg

SEQ ID NO: 19475 - protein, 153 aa, Zea mays subsp. mays
  peptide (1)..(153): Ceres Seq. ID no. 12358083
  misc_feature (143)..(143): Xaa is any aa, unknown or other
MNSRFRSLWRAMAGAASSGKDTVRLRLHLLPDRHDDCVLVSEAPLSSDKGGEFFIDMDRQAPSATAAEHCAASLGAACAGGGFVMSCRVEGEARSSRPFVQLAMRHVTCMEDAAMFVALAAAVDLSVKACRPFRRKPNKKAAXPSPDHLELDT

SEQ ID NO: 19476 - protein, 142 aa, Zea mays subsp. mays
  peptide (1)..(142): Ceres Seq. ID no. 12358084
  misc_feature (132)..(132): Xaa is any aa, unknown or other
MAGAASSGKDTVRLRLHLLPDRHDDCVLVSEAPLSSDKGGEFFIDMDRQAPSATAAEHCAASLGAACAGGGFVMSCRVEGEARSSRPFVQLAMRHVTCMEDAAMFVALAAAVDLSVKACRPFRRKPNKKAAXPSPDHLELDT

SEQ ID NO: 19477 - protein, 97 aa, Zea mays subsp. mays
  peptide (1)..(97): Ceres Seq. ID no. 12358085
  misc_feature (87)..(87): Xaa is any aa, unknown or other
MDRQAPSATAAEHCAASLGAACAGGGFVMSCRVEGEARSSRPFVQLAMRHVTCMEDAAMFVALAAAVDLSVKACRPFRRKPNKKAAXPSPDHLELDT

SEQ ID NO: 19478 - DNA, 679 bp, Zea mays subsp. mays
  misc_feature (1)..(679): Ceres Seq. ID no. 12418045
  misc_feature (1)..(679): Ortholog of  Ceres SEQ ID NO 14309904 as cited in SEQ ID NO 20623
aattgcgacacttgaaaaacgtgaagaaagatacaaggcggtgtttgcagagaggatctcggtcttccggaaagcctgctgctcccttttcggttacaagatagtgatgaatgatcagcagcagtcaaatgggattcccgtaacacgctttattctgcagtcagtgtatgcccaaagcgatgatgaaaagcttgagtttgactatgaatcaggaagcactaatatcgtggtcaacgattacacatcccaacaagaaattgctcggcaggtcgacatctacataaggaggacgaactccataccagccttcactgccaacctgacaatggagtctttcaacaaaagaagtatatgctgaagacatgaaactagtgtcagggcacattgcttgatttctgtatgttatcattgacgaagagtatgtatatgagcactcacattggtgggtgaaaactgctcctgctaattaaagttgaggctggagctttgattctattcccaacggattctttttttccctttaactagcaaggngtacatgagtattactgggcatggcgacgtaatgttgaagcttccggcttgtntagagttgagtgtagctaccaggtaactaggaatacttgattcgccaatcatgnctgacgttattcctntgagagaacgagagntttgctgc

SEQ ID NO: 19479 - protein, 118 aa, Zea mays subsp. mays
  peptide (1)..(118): Ceres Seq. ID no. 12418046
IATLEKREERYKAVFAERISVFRKACCSLFGYKIVMNDQQQSNGIPVTRFILQSVYAQSDDEKLEFDYESGSTNIVVNDYTSQQEIARQVDIYIRRTNSIPAFTANLTMESFNKRSIC

SEQ ID NO: 19480 - protein, 83 aa, Zea mays subsp. mays
  peptide (1)..(83): Ceres Seq. ID no. 12418047
MNDQQQSNGIPVTRFILQSVYAQSDDEKLEFDYESGSTNIVVNDYTSQQEIARQVDIYIRRTNSIPAFTANLTMESFNKRSIC
